United States Patent Application Publication US 2019/0348154 A1 - sequence listing, part 39

SEQ ID NO: 143939 - DNA, 1095 bp, Enterobacter cloacae
atggtcaaaagcatacattacttaaggggaattgcggctttattcgtagttctattccatttaagaggctatgtaaacaacacctacgtacagtcaaatcttggagatttgctgtttgttaatggagcttttggtgtagatttattctttgtaattagtgggtttataatctgctttgcgactcaaaaaaaggaatacttttatccacttaagttttttattagaagattttttagaatctatccacttttgatattatcagtgtcaatttactttatatttttgacaatcaaaaagggatcaaccggcttagattcatggtttatatggtcaatcatacctctccaaatcgattatcatgctggggctcctttctttggatacaatgtacttgcaatagcatggacattaacttacgagatttctttttatattatctttcttgcatccatgattatatcccacaagtatagggctatattatgctcatccataatcttaacaatggttttatctacacaattaatgagtgtcactccaacactcaatggcataaatacaaactatatcaaaaatgactttatcactcttatttcatcacctatatacattgactttgtatatggcataatatcgtatgttatatatattcacattttacctgctctatcgatatacaagggaacagttttaaatgttttgctaatttcaaccataactgttactacagtattaatatttacaacaaaaaacattgaccacgggcctctaggctggggggttatggcctttatcattgtagtagctacgactttaatggatgcaagtttcacgacagcaaaaaacaaacctctaattatgctcgggaatatttcattttctctttacatgtggcattacattttcatagaaataactaatacatatttcccaagcatttcaatgaatggattttataccttagtcattatgacgacctgctcaattgcaatagcatcgatttcattcaatcttattgagattccatcaattaatctttcgaagaaaatcatttcatggatagacagaaacaacccagagcgtgttgtttcatag

SEQ ID NO: 143940 - DNA, 300 bp, Enterobacter cloacae
atgcacgctcttcgcccagcgcctgaccagcacggagcgcaggtagtcgttggcgttgacgttcagcgcggcaaactgttcggcttcctgttcaaactctgccagcacttcggtcagctgcttgttggagatctgacgcacgttggccatggccgcactgagaatttgcacttctcgctgggagaggtgtttaaacacctctgccgcgcgatcttcgccaatggtcatcagcaggatgacgcttttatcggtgcccgtaagcgtattactcatgttcgttacccatccactggcggatga

SEQ ID NO: 143941 - DNA, 1236 bp, Enterobacter cloacae
atgatcacactgcaacaactgctgatgagcgacagcgacctgtcaggcggcacgcaaacggggaaaggcaccgacggtgcacaggactttctctctctgctggcgggcgccctgtcggacgcaacgggcaagggcaaagatgcgccgctgaccctggctgacctgaaagccgccggcagtaaactgtcgaaagtggctcaggacgccaaaggggataccaccttgcaggcaaaaattgccgacctgctctcgcgccagcccgcgctgaacggcgatgaaacgtcgcccgtcacgtcgcttgatacgctggtttccgggctggtgccgctgtctaagggcgacgcgctgaagacgctcaatgtggcaaacggcaaagatgacggtaagagcgagctgagcgaagaagagctggccggattaagcgcgctaatggcgatgctgccgcaccagcagcaaactaccgcctctcgcgtggcaggcagcgagagcgtatccgccacctcaacgctgaattccgcgacgctttcgcaaaacggcgcgggccaaccgtccctgaacgcgcctccgggtagccatgataaagcgcagaactctacgccttatcagagccaggtgaaaaataacgagccggccctgcagggcaacgcgcctgctacaccggccgtggccgcggcgacagagaagcaggagctcgccagttcgtcctcttcatcatcaccaacggctactctggcaccgattatgtccagccatgcgaccagtcagacggccgccaccgtcgcccccgcgccggtgttaagccagcctctggggactcacgaatggcagcagtccctgagccagcacatcactctgttcactaagcagggccagcagacggcagagctgcgcctgcatccggaagatctgggtcaggtgcaaatttcgcttaagctggatgacaatcaggctcagctgcagatggtctctgcgcacagccatgttcgtgcagcactggaagccgcgctgccggtactgcggacctcgctggcggaaaacggcattcagcttgcgcagagcagcgtcagcagcgagagcttcgccgggcagcagcagtcctcatcccagcagcagcaccaggcttcgcgttccggcaacaccggcggttttaatgaagagagcgatgagttactgcctgttcctgccgccctgcagtccgcagcgcgcggtaacggtgccgtagacatcttcgcctaa

SEQ ID NO: 143942 - DNA, 243 bp, Enterobacter cloacae
atgggtttgaatatttgggtttcgcgagccgacaataatcgcgccgacggcaagttcatccgccagcttaataacctcatcacgaacattcccgctacggacgtggagatgaacacgctcttctggcagatttacttttttgaccagatcagacagcttttcggtaatgactccaaattattgatagtgttttatgttcagataatgcccgatgactttatcatgcagctccaccgattttga

SEQ ID NO: 143943 - DNA, 582 bp, Enterobacter cloacae
atgaatgtttttatcgaaaagatggaagtagattcatcgctctacaacaaaatcctcaatcacattttcgatagtgattcatttataaaacaaaattttaccgggcctatagatacaaataaccgcgtggtttcaacccataaataccgattatgggactgtggtaatggtcctgccatggaacatagttattttcttacttcaaatcgtataaatatagtgaacaatcgcagaatcgctttcgagggtttcttaagctatagcgaaatggatcaagagttttccacacgctatctcaaaacattggcagcgattcagctagctcttggctgtatccgaaaatatcctcagcatatcaaaacagtacattacagcatcgacagcaaacattatgaaaatattaatcaacttgagtcacagctcaggctggttcaagacaaccttgacaagcaggtcgacaactgtgctcaatccccctatatagacctctatcgtacaatgtcagacaatgctcaacaaaatggaaaaatctatcttagtgacggattatggctcgataaagacggtaatataagcgattaa

SEQ ID NO: 143944 - DNA, 240 bp, Enterobacter cloacae
atgaaaaatatagtattggctgtactgtgccttctccctagcctcgcttttgctaacggatataaagtcgtaacgaaagatggtggcaggtctttgacatactatgcaggtcaagtgacttactctcggctcgacaagcaaataaaatgtacctttaaaagttcatccaaaggcattgatcaggaagggaatgcctacaatgcagacggttttgttgcacgaaagatttatatgttgtga

SEQ ID NO: 143945 - DNA, 357 bp, Enterobacter cloacae
atgaaaaaagctctcataatcgcgctttcgttattctccttacctgtactcgcagaagaagatcaggggcctggaaaatatatttgtgacattcgcatatccagccaagacacagctaccaaaattctgtcgagagcctcgactgttcttgataatgaaaataacttcatcgtccaaatgcccaatggtgatcagttgtattcccctgaactggaaaacactgatgatggattaaaacaaaaagccgaaaaaggtggcgtgaccttcattcgccgtccaacctttggcgataggttcattgtggaagatgcaaatacagggttcttctataagatgcgcaactgtgagaagaaatga

SEQ ID NO: 143946 - DNA, 312 bp, Enterobacter cloacae
atgaacgtctttcgcatgttctgggtgagaagggatcaaatctttatatgcagggcttttaatagctttgaggtattcttcttcaaaaatacgagcatattcacccggttcacgctgtccttcttcattgaactggcggtagaaatcaaccttatcaatgaaaaacagagtaaggaccttgatttgctgattgttgagacgcagttctttatccagatgttcacggattgtacgtctaatcatatgacgctggatgagcatagggtcaatatcaccaacaacatcaccaacgttcatatagtaggtgtttga

SEQ ID NO: 143947 - DNA, 1902 bp, Enterobacter cloacae
atgaacaaactaacttctgatatgacagaactacaatcaatgaatataacggaagataatattagcaaacttaactctttgtttcccgaagcatttaatgaaggaagcattgattttgatgttttgaagcagcttttgggtgaaaatgtagacgaaaaagaagaacgctatggtctgaactggcatggtaaacgtcaggctcgccagcttgctctcaccccttcccgtggcaccttacgtccatgtaaaggtgaaagtgttgattgggataacaccaaaaacctaatgattgaaggtgataaccttgaagtattgaagcttcttcaaaaaagttatgccggaaaagttaagcttatttatatcgatccaccttacaatactggtaaagattttgtttatcctgataacttccaagataatatgaaaaattatcttgaaattactgggcagacagaagacggagcacgtttaagcacaaatacagaaaccagtgggcgttatcacacagactggttgaatatgatgtatccacgtattaaacttgcaagaaatcttctcaaagaggatgggtttatatttttaagcattgatgacaatgaagttaataacttgaaattaatgtgcgatgatatttttgggcaagaaaattttgttgccaatgtcatttggcaaaaaaaatatagcacaaaagcagattcaaaaaacttttcagagtcacatgactatattctttgctacaaaaaatcagaccaatcaaaaatactcggtttaccaagaagtaagcaacaagaatcaacatacaagaatttagataatgaccctaggggtgtatgggcttcagataatcttctcagaactgaagtcagagattatgcagtttttggtatcacatccccctcggggatggaacattatcctcccgctggtagtagttggagatttaacaaggataaaattgaagagttaatttctgataacagaatatggtttggcgaagatggtaataacaagcctcgactaaaaagatttcgctcagaggtgagagacactattcctccacaaactctttggggatttgagcatgttgggcatacagatgaaggtacaaaacagttagcagaactatttgatagcacacgttcaccatttcctaatccaaaacccgtaaggttgctacagcggattatacaaatagcgaccaaagaaaatgatattatcatggatttttttgctggaagtggtactacggggcaagcagtgtacgaattgaacgagacggataaacaagatagaaagttcattctggttcaactccctgaaacactatctaaaagcaataaggaagatctttctgcaatctacttctgcgaagagcttgataagccattgtatctatctgaattaacgaaagaacgcctccgccgtgcaggtaataaggttaaagcaattaatccagactggaatggagataccggttttcgtgtgttcaaacttgatacatccaacatccgaccgtgggaagcctctgccgaaaccctttcagaacagattgatgcctatgtaagcccaatccttgaaggccgtagtgaagaagatttgctcacagagttgatgctcaaacgtggcattgacctgagtgtaaacattgaaacccgtcagtttgatggattaaccgtttcttgtgttgacggtggcaaattgtttacctgctttaccagtcaaatcccagcctcttgtgttgaggtactaaccaaggggatcatcgactggcataagagtttaaaagctggcaaagatactgtctgctatttccttgatgacgcatttgaaaataacgttgctaaaacaaatctttgcgccattctggaacaacatggcctaactaacctgcacagcctgtaa

SEQ ID NO: 143948 - DNA, 1239 bp, Enterobacter cloacae
atgccgaaaaaagcaaaagaactcaccggactagcagttgctaagttaaaaaaagaaggctcttttgccgtcggtggcgttgacggcctgtatcttcgaaacagaggccagtcccgttcatgggtgctttgcgttgctatgggggtaagagtaaatgctctaggaagaaccgttccgagacgtttaaacatgggtcttggcccctaccctgaagtttcattagcggaagcgcgtgacaaagctcgtgagctgcgtaaacaaatccgtaatggtattgaccctcttgcagaaaagcacgcccataaagcgcatcaggaacgtctggcccacaagaacaaatcctttgctagctgtgctgaagacgttatcgcaattaagaccaaagagctaaagaaccagaaacacattgcccaatggcggtccacgctggaaacgtatgcttatcctgttatcggtcaaaaacccatcgctgagattacaaagactgacctattagcgatacttgaaccaatctggttaacaaaaaacgaaactgccagccgtctgcgtggtcgcattgaagcgatcattgattacgcaaaagcgaaagaatactttgagggcgataaccctgcttcatggaaaggtatgcttaagcccctcctgccaatgccaagcaaagttcagacccaaaaacatcatgctgcattaccctacagcgagatcggctcgttcatgaccgaattacgtaaacgagtaggcatttcagcgcgagcacttgagttttcaatacttacagtttcgcgctctggtgaagtccgtggcgctgaatggtcagaaatagatctgaagaacaaaacgtggaccatccctgccagcagaatgaaagccagcaaagagcatagggttccgctgcctgatgctgccattgccctgttaaagggtttaccacgcttcaaggacaataaccttgtttttcctgccccgcgtggaggacagctatcagatatgtcattgctggctgtattgaaacgaatggaacatagtggcttaacacagcacggcttccgttcaacctttcgtgattgggcaggcgaaaccacagaccatcaacgtgaggtcattgaacatgcgttagctcaccagttagctgataaggctgaggctgcgtatcaacgtggcaccctgtggcctaagcgggtggcgttgatggaggattggacggagtattgtatgagcaacaagcgtccagatctgtaa

SEQ ID NO: 143949 - DNA, 246 bp, Enterobacter cloacae
atgatccagacaattattgagaaatgcggagatagcccggtattcaaaataccagaagcaattatggaaaaagctggcttcagtatcggcgatgctattgatattgaagtcaaaaatggctgtatcattattggcccagcggaactggttaaatattcccttgaaaatcttattgagggaatttatgaggttaatcttcacaacagagttgacttcaggctgctaataggcaaagagttgctctga

SEQ ID NO: 143950 - DNA, 1365 bp, Enterobacter cloacae
atgacacacagcaaagaacagatctggtctgaacgccaagggagcaatacccgtaggccagatgaaataaggtcggaatacgaacgcgatctttcccgactaatccactcttccgcgttcaggcgattacagtcgaagacgcaggtgctgggtctgggcgagagcgacttctaccgcacacggctgactcactctatggaggtagcgcagattggcagcggcatcctgtcgcagctgaatatacgctatcccgttgggatagcgactgaggcggaattcctgcctcacccaagccttatgcaggctatctgtcttgcccacgatatcggccatccccccttcggtcatggcggtgaagttgcgcttaactactgcatgagagcctatggaggctttgagggtaacggacagacgctgcgtatactcacccaactggataagtacaccgagtccaacgggctggatcccacgcgcaggcttattctaggcgtgctgaaatacccggcaagctactctgaggtagtcaacgagagcgcttacggccagccacaggcaggaagccgtgaatggctgtttaaatcctccggctttaagcccccgaaatgctatctggactccgaagcggatactgtcagctttgcactccgaccttttgatgatgatgatgcgctgttattcagatccggaagaaagaccaccaagccggttgagcacagaaaaacgaaatataaagcgctggacacaacgattatggacttagctgatgagatttcctattcactccatgatcttgaggacgcgatttcgctgagaatgatcgacaaaagcatgtggatggactacttcagtgacaagtcacacctgtttgaagcatgccaacgcagctcgtttgacctgaccgctgaagacgtagccgataagctgttcggcagaagctaccttcgcaaggaatgcatcggaacgctggtccacctgatgatcacaagcgtcacgcttcaggtgcagcatcctgatttcaagtgcggaatgcttcgctataaagtggcactacctgccgaagtcgaagccctacgtgaggccattttcagtctggttgaggacaaggtgatccggcacgaaaacgttcagctactggagttcaaaggtcagaagctgattgtagaactgttcaatgtgctggcaagcgaccccacacgttttctcccggctgagacgtgcaagaagtatagagaagctgaaaaagctgacgataaaaaaatgcgggtcatcagcgactatgtttcaggtatgacggacgagtacgcgactcggctgtatgagaaaatctttgttccgcgcaaaggatcaatctttgacagactctga

SEQ ID NO: 143951 - DNA, 567 bp, Enterobacter cloacae
atgcgcaacaaacggcccgcagcccgtaatattggaatcgatattgatcaacaggttattgatgtatggcgcggcggggatattccctgcgaactcattcaggatgacgctatagcgtatctcagtacgtttccgtatcagggtagtgagctagtttacgccgacccaccctatgttcatagcacgcgtaaacgtagcaaaatctatcgtcatgaatattcagatgacgatcatcgccggctgctgcaagtgcttgccaagttgccctgcatggtcatgatatccggttacggaaatactatctatgacgaaatgctcagcggatggcgctgcgagcgatttaacgccaagactcatacgaacgtgcgtgaagaatgcgtatggatgaactttgatgttcctgacaggttgcatgacgcgcgatacatgggcagcagttatcgggaaagacagactctggcccgcagacgcactcggctttatgaccgcatagaacgaatggaacccgcagagcgcaacgaactgatcaactggctgaacgcaacttatggtctggaggctgtatga

SEQ ID NO: 143952 - DNA, 846 bp, Enterobacter cloacae
atgacacagcgcggagcggtcttcattggaccgacaattatcaatcttgactttccggctccggaacaggatatcctcccgggtgttcagtggggaagaattgaggcgttcccatcgccagcgtactgggcctatcaaatactcgcccgtcgtctggaagtcaacgccgtcaattacaagcttgggcgaacgctcaaagaggaagtgggtgcctgcctgctgggtggacacggcataccagctgcgataggccttgccgcattcaataagctgaaggattgcggtgcgtttgatgctcagccaccatctgaagccactctttacgaatggctatcagagcccattaaaactggtaaaaaatcagtacgttaccgcttcgctcggcaaaaatcgcgctatctctcggttgcgctaaacaggctggatgtagagatgccgccgacggattcgggccgtgctctcagagactggctgacctccattcccggtattggtcataaaacggcatcatggatagcacgtaactggctctgtgcggatgatgtcgctattctggacattcacatcctgagggcgggactacttgcaggttttttcccgggagaccttactgttgaacgtgactacctgaagctggaacaaatctttctgaagttcagtgaagctatgggcgtaaaagcatctgagctggatgcgcttatctggtatgaaatgcaggcctcttccagtacagtgttcagtcttatcgaaaacatgcgcggccagcctcttgcgaaattgcgcccccgttcatcgcgagccaaaaaccgccagtccggtaccagccagacgaccttccagttttaa

SEQ ID NO: 143953 - DNA, 684 bp, Enterobacter cloacae
atgtcggatatgacttggaccgttcccgctagtcctgttccccgtgaacagccactcagctatcaacccgttaactggcccgccggagatccgttttttctgccgcctccttcggagaatgcagtgcttcccggattgaatgacgtgatcgaaacccgtagaacacagcgaaacttcagccacgtcagtcaggtccagctatctcactggctatggctaaccggcagagtgatggctgtgggacattcaggctatggctttccactaactcaacgccccgtgccctccgccggggccatacatcctattcacattgttctttccctccctgaacgggatgggtggcagctgtatctgcctgacatgcatgcgctggcaccgcttcggatccctgagcagacccgattcgaaatacgcgatgagcttttgccggtaattgatatccagagcggaattattgtcagacttatcgctgagccaggaaaaacgtcagcaaaatattcagatgctgatagccttgtttggcgcgattccggtgttcttgtagggcagatggcgcttgttgccgaagcgctggaatgcaatttttgcccgctgggcattacaggccatgactggtgctccggattaaaactggaaggtcgtctggctggtaccggactggcggtttttggctcgcgatga

SEQ ID NO: 143954 - DNA, 606 bp, Enterobacter cloacae
atgaaaaccgcactcttactttctggcggaatggactccattgctattgcctggtggaaacgcccggatatagcactgacactcgactacggtcagcaagccgccaatgccgaaattaaagctgccactgccacctgtgagacccttggaattgagcatcacattatacgcattgactgccgttcgctgggatcaggagatatggctggtaccgctacggatccgaatgcaccatcgagcgattggtggccgtatcgtaaccagatgctcatctctctggcggccatgaaggcaataacgcttggcgtcacgcacctgtggatcggcacagtgaagtcagatgaaacgcatctagatggtactataggcttcatcagcagaatcagtgagcttatgtcgtttcaggaaggaggcatggttgtcgaagctccggcaattacgttatcaacctctgagctgatcagaatttcagatgttacgccaggtggcctcgcttgggcccatagctgccataaggcaaacatcccatgcggcaactgccgggggtgcaataagtattttcaggttctggatgatgtcggatatgacttggaccgttcccgctag

SEQ ID NO: 143955 - DNA, 1242 bp, Enterobacter cloacae
atgagcaacagcaaaacgttcagtacggagatcatcactattgcaggcggtacatatcatgaaattagccttcatccaggaaatcaccaggtttacggttcagcgggaagggcggcatcagcactggcaacgctcggtgtaaacgttgatttgtacacctacgctgatgaaatagtcaattcggttcttcgagaacgcgcctgttttgaaaacttcacgcttcatacgaatgaagtacgtgaatccgtcatattccattatgagcatgggctggcggaacctcgaattttcaattacccggacaccccttacccggtcattacagtgaaagcgccctgtgttctacgctatggaatgctggagggatccgctgtaatagacgcggaatacgcagtatatgacccccagaatgtgaccaacccggagccattcacagcaaacggatccagagcaaagcacctcgctttgatccttaaccgctatgaggcgaagtccctcagtggccagcgcgaattatccgacagagagcatgcagagtttctttacgaaagcggtcatgccgaagtcatcattatcaagcagggcccagctggtgcactcatctgcgataaaggtaacatatcctatatccctgcctatgagacaagtcgggtcaacaaaattggctctggtgacgcattcgtagcctatttttcccgtgagtggatgctgaacaaaaaaacagcccacgatgctgcgaattacgcctcacttgctaccgcatgttactgcgaaagtgggctttttccttcagcagaagggctggctgctttcagtcccagccccatcaagctttctcaggcgtttattgagggtggcaacagaaaagtctatctggctggccccttctttaccttggcacagctctggcttgttgagcaagcgcgacggaacctgagcgatcttgggctggacgttttttccccctatcacatggttggacacggacccgcagaagaagtagtcgaaaaggatcttgatgcgatacggcaggccgacatcgtttttgcaataggcgatgcgctcgactccggcaccatctatgaagtcggttacgcgcgggcgctaggcactccggtggtgttctatgccgagaacgaatcggaagaggatcagaaaatgatggaaggatcaggatgtatcttgagcaaagattacgtcacagcaatttataaaacgctctgggtggccgctcaaaaatga

SEQ ID NO: 143956 - DNA, 333 bp, Enterobacter cloacae
atgtcaggctctggtgggggtagctttggcggccagttcggtcaggatgattttgaagtgacctgtgaaaaacttacgattgatactcagctaagttcgcccgatccgcaggtcgtagcgcagctgtcagtcggcgtgattatggggattatgcaaatcaattcaaacggaactctgctaacggttgctatgcacaacggtttgcaggctgggggtatcgcttctccctacatccagcgcctccgtgactgtatgagtaatggtacaacctacgttgccaaagtaaccgccattaatggtggtcaggtcagggtcagtatgtacgcgatatga

SEQ ID NO: 143957 - DNA, 606 bp, Enterobacter cloacae
atgaagcggaaaaacagagtattcacctccctttcgcgccgtaaacgccgcgctaaaacccgagaaatcaaaaaccttatccaccgtgaacggcatcgctgtggtggtatattctatgacgagtgcgatatagatgaggcatttgcatgcggaaactggaagtggagcgacatacttttcttgggaagagactctgcggttttctggaatgcggagataattacggccagtgtagaatttagtgatagagtcgaatcaatcgcattcaatgaagcatggtcgatgctggatgatggcgaacggttctgtgatttgtgcaataaaccagcactctccgaattcgcagggctgacatggatggaatatattgagaagcgagaacaggaaatagcccgagaaaacccaccagtagttcacagtggttatcgtatcctacccggctatgcaaatggtattggtttgcagattatcgttgatgttgatgttttgagccgtgacgtcattgaatccgctatcgcagatttcattacgcgaggtgagcgagaatgggtctcgaatgaaccagcgtacaccaaggtatttcaagaaacttccgctgtagattag

SEQ ID NO: 143958 - DNA, 243 bp, Enterobacter cloacae
atggttcttattattgaaaaatggaggagcagcccgatggttagagtcccggagtttggtatgaaaaaatttggcttaggtgcaaatgatgttattgatattaaagaccaatatggttgcatcatcattggccatacggaactgaaaatgtattccttggatactctcttggaaggaatttccgcagttaatcttcacccaaaaattggcttcggtttaccaacaggtaaagagcagctctga

SEQ ID NO: 143959 - DNA, 147 bp, Enterobacter cloacae
atggacgaaatgacacaggaatttaaagactggtacgaaaaagaaactggatggtgtgtagaagatgcaccctcagacgatgtaacagcgcttatctggctggcatggaaagccgggaaaaaggctggtgaagactttaaggagtga

SEQ ID NO: 143960 - DNA, 252 bp, Enterobacter cloacae
atgaccaaagaaacaggcggtaccgcattcccttactcaggggtgcataagggcaaggcagaaaacatcatcgttgatagtcagggcatgacgctgcgcgattacttcgcggctaaggctatgcaggcattcatcactggagcaatgagcgacgggactgcatttaacgctaagtcaggtgaccatgatactgcagcggaagttgcatatctgatagcagacgccatgctccgcgcccgggaggcatcatga

SEQ ID NO: 143961 - DNA, 657 bp, Enterobacter cloacae
atgagcactattaccagagaacgtattgagcaattagcaaacggaaacaacatctgcaaggttacacgagaagagcgcattgaactggcgcgtatcgcgctggcatcgctcgaagcggagcctgtggcgtggctactgtcaggcggcggcgcaaaaaacaacgtcagcttcgatagtggcaatgcttatgctgacccgctgcgagaagtaacgccgctttacaccgccccgccagcaccggtggctttgacatctggatacagcgattttgaggaaatctggtcatcgtccacccatcctctcacgcaggatgacgagatgaaagacttcgcgtgggatatctggaacgcctgccgggccgccatgcttcagggtgccgaaaacgccgagacgcacaccaccatgcagaccgcgccagctctggattcttcgcaaataattgccgagtcgcccaccggcaactctccggtgcttccggatgggtgggtggcttgcagtgaacgtatgccagaaaccatggtaagcgtgctcgttactggaacctggtttcatcattctgttgcgttctgggatggtttgtcctggtgcgaccttgattttgagcaacccgtcacccactggatgccactgccagcagcaccacagcaggaggcatga

SEQ ID NO: 143962 - DNA, 456 bp, Enterobacter cloacae
atgattctcccaaaagacggcatcaagctgcatcgtggcaacctgaatgctatcaaccagcaccttcaaccacttctgaatgacgggcaatgcttccggcttcagctcaagccgtggcgtgagaaacgcagcctttcgcaaaatagccttagccacgtttggtacgaggagatcagcgcatacctgatcgcttccggccgcactgacgccaccaaggaatgggtaaagcgcaacctcaaaaaaacctttctcgggtacgaagacgttgaatacaccgacttcactaccggggagaaaacggtagaacgccagctccgccacacctccgatcttgataccggcgatatgcaccacttcatgtgtcaggtggagcggtggtgtgcgcaattcggtctcgtcctgaccatccctcaaagcagcgaattccaggtgctgcgcgataagcaggaggcctga

SEQ ID NO: 143963 - DNA, 459 bp, Enterobacter cloacae
atgaaaattattaagcattggttggtgaagctctatcagcacagtcagcaatcttcgtttatgacgataacttcaaatggggcttcagtgggtagtggagtcttaaaaaagctgatcggggaaggttattcgaaagaaaaagttactcttcctcatcgtggcggatttattgagttgctgacagacccatatgacactgagttaacagcttttcgcgccgatgtcgttgacatcattgtgtgtacgccggtttacgaagacgaagatgaagctaaagcctattctgaagaagtggaagggcgctacaactatgacaccttcaaggctgcatcaaaaccgctgatccaatggctgaacgaaaactccaaccctcacgcatcggtaattgttgattgcacgagtgcggagctccttaccggggaaattgccgtcaacacgaaagagttcctgaagggatga

SEQ ID NO: 143964 - DNA, 450 bp, Enterobacter cloacae
atggctgcattatcaccggaggttaaggcctttatagttcaggctttagcctgctttgacaccccaacgcaaattgcttctcaggtgaaacaggaattcggtctggacataagtatccagcaagtatcctcatatgatcccaccaaggcgattgcgaagaatcttggtcagaaatggatcgacctgttcaacgcgactcgcacccggttccagaccgaattaagcgacatcccgatcgccaacaaagcttatcgtcttcgcgcgctcaaccggatgatgaccagcgccgagaagatgcgaaacatggctctggctgcttctctgatggagcaggctgcgaaagagtgcggggatgcatacacgaataagcagaaggttgaacactcaggcggccttgccgtgagctcagttgcatctgtcatggacgagataggagatgaagacctgtaa

SEQ ID NO: 143965 - DNA, 273 bp, Enterobacter cloacae
atgaaaaagttaagaatcgaaaaaccgggctgctggggcgcgatagatggcgtattccagcaactgcctgtaggtcacgaattcatcgcggcatccgttccgccagcgttcgcaggccgggtgtcagttgtcggtgaagtcggtgagcaggagcttgaagtggcgacgcagggcgataatcctgcagagcaggcagagcaggcagagcaggcagagcaggcagagcaggcagagcaggcagacacctcctctaaatcgaagaaggcgaaataa

SEQ ID NO: 143966 - DNA, 357 bp, Enterobacter cloacae
atgtcagcaacggctaactggtcctacaccgccaaagccactatctggcgcaaaggtgcaggcggcaaggacgagaacggcgatcccataaacggctatgacgcgccggtagtcatcatggtcgattatgaaggcggcctgtcaaagcgcatcggcagcctgggcgctgaaagagtcgtgaaaaacaccgtctggacggagtacgcgctggccgacgccggtgattacctgctgattggtgaatctaccgaagccgatccggttgccgctggcgctgatgaggtgcggcaggtcatccgctatgccgacacgttcgatcgagtggctgacgattatgcaattttgactggagtctga

SEQ ID NO: 143967 - DNA, 369 bp, Enterobacter cloacae
atggccgggaaagtaagaggcatcactcaggcgaaagccaacctcgacaagatcatcaatgacgtgcaggggcgaaaggttgtcagggccatccagtcagcgctaatcatcggtagctcccaagcggcgctttatacgcctatcgacacgtctacgctgctgaatagccagtttcgcgacataaccgtgaacggcaatcgcgtgaccggccgcgtgggctactctgcagcatatgctacatacgtccacgatccaaatatcccccaaaactttaggcgctctacggccaaaaaggaatttcttactaaaggttttgaggatatgcgcagtcagatcgatgcggtgattaagaaggagttatccctgtga

SEQ ID NO: 143968 - DNA, 390 bp, Enterobacter cloacae
gtgacccctccgatgtataagcgttttcgcaacgttatcgttgatgccggacttactacaggctacatcgttcagtctcttttgtggtctgattccgggaaacttgccgatcggttcattgtgttccgcccaaatggagggacggcgatagaccgcgacatggcggctgattattacgtccttgttgaccttatcacgggtaagtctcttggcgacaaatcaaaagctgaggatgatgtccaggccatcatcgactacgtgaaagcaaacccgatgacaaatcgctgccttgggcaaatctcaaatatgggcggcataccatctcctgtaatgactaccgaagggcgcatggtgtggcgcctgcaatttgcctgtctgtttggcggatag

SEQ ID NO: 143969 - DNA, 690 bp, Enterobacter cloacae
atgacaccagttaaagagtttggagaatgccttattagtgtcggtgacaaggactactttttccgtccgtcactattcgcgatgtccagaattggcgatcctgtacacatcgttcagacgttttatgaactctgcaatgatgaggtgaccactctcacccaaaaggccgccgaatcctatatccactcagaatatgaccgactgccggaatatgtaattaactacatacggagcgggatactgagccgcaaggctatcatggctgcgcatacggtgctgtccgcgtgctgcgatgatgatacaggaaaccttattggctggatgcagccggggaaaagtcgaaagcgtgggtttatgtggaggcagggggtcatgccgccgcaggatatggtaattatcgctcaaagcctgatgatgcatggaattatcgggcaggcgaagttacgcaagctgcagcgccacgaatcgaacgagcccaccaatgagttcagggcatcggattacattattgccgcacgtaaccacttcaacatcagcaaagaagaagctggacagctgacgatgacagagttccagatgatgcttgccgctaaatatcctgaacagaatgggtacaccagggaagagtacgatagtgcggcagatgactactttgcgcgacgcaaacggcggcaggctaagcagaagtag

SEQ ID NO: 143970 - DNA, 435 bp, Enterobacter cloacae
atgaaaggcgcgagcttgattgcaccattcggcttacgtatgccggaagaactgaaggaaaaggtagctgagcgcgccaaaaataatggccgctccatgaacgctgagatagttcagatactccaggatgccgttgacggccggatcaacccgttagccgacgatgatgaaattgagaaggtttacgtcgaggtcatatctcttgatcccagcgaaatgagcatggaagatttcgacgctaacaacgagaagcttgactggctgattgatgccttcatgcagcgcatctctgaggacacgcagaggttccaatctgcgatccgcttcaagtctcaaaccaaagagttaatagccaaacaaattacccagcaagtgctgcagaaagctgattacccaagcccaagcaagatgtcagaaaacaataaaaaaaaataa

SEQ ID NO: 143971 - DNA, 162 bp, Enterobacter cloacae
atggaacaggttcgcaatattccaccaacaggcatccggttcccggaacacctgaaagagatcattaagaaggcagcaaaggaagagggtcgatcactgaacagcgaggttatcaagcgtattgagcggagcctgaaagaagatggctttatcaaggcgtaa

SEQ ID NO: 143972 - DNA, 678 bp, Enterobacter cloacae
atggctttatcaaggcgtaaaaacgacgaagccccaactacttgcgatagtcagggcctcttatcgaacaaatccagcgacggaaatatcgacatgaatattgtacataacaacgaattaactttccagcagacagcgttccatccggtatcacatgccggagaaacatggcttacctcctccgaactggccgctgcgctcgggtataaaaaatctgatgccgttactcagatctatagccgctatcacgatgaatttactgagaagatgtcaacgaccctcaaaatgagtgtcgttagaaagaccggggttgttgatatccctgtccgtgtgttttctctgcgcggggctcacttggttgcgatgtttgcctccacaccaacggccaaagatttccgccgctgggtgctggatattctggatcgtgaggttgcaagcggaacagtgccggtgaaattcgactttgaaatgtatgctcagaatgcaaatgcggcctgcgccatgcttgaccaggtatgggacatatttcatgacgagcttgagccagcccttcgcagtctggcatcacctgttgcgaccaaacttgttggccgaatcatagaagcaaagtcgatttcatacagtattcgtggtggtcttgttcgtgccactggaagcaaaaatggaatgatccactga

SEQ ID NO: 143973 - DNA, 498 bp, Enterobacter cloacae
atgaagaagattttggcgatcgcctttttggggttatttagcaccgtagcaaatgcagaaatggaaagctctggtgcttgggtaacgaaatctgacactaataaaatgaccgacgaaacagactttgttgccttaaacacgtcttccgatacatacaacaaagacggcctgacacgtgaaacaacgctggttctgagatgcagcagcaataaaacagatgcgtacctgtctttccgtgactttatgggatcagatgctccaaccattacaatgaggctcgacggcgggaagccaaccaaaaaatcatggggtggcggtgaaggtggtgatgcagcatttgcacctcaggctgtgtcatttatcaaagagctttccaagcataagaaagcgatatttggatttgagccttacggatcgacaatgcagattgttgaattcgatttgaccggtatagataaggttgccgagagcctttccaaagcgtgcaagtggaaataa

SEQ ID NO: 143974 - DNA, 2400 bp, Enterobacter cloacae
atggcaggcgaggaaatagcaggcagcatcgtctacgaggtaggcgcggaagttgaaccattacttcagggtggaaggcaagtaaataaggtcctcaccgaaattgagaatgctctcgatgacaatatcgctcaattcaaaaaaatggacacgcaagtatctgcaacagcacaagcggttaaccagtctgtccgcagcttcagtggcttccagaacgcccttcgccagggtggttatcaggtccaagacttcatagttcaggttcaaggcgggcaatcagctcttgtagctctaagtcagcaaggatcccagttgttgggggtgttcggcactggcggcgcagtcgcaggtgcattgttaacgctgggtaccgttattgttggctccctaatcgctggaatggataacgcaaccatttcgaccaaggcactcacggaagcacaaaagaggctttcggacattttccagatttcctcgaacggtgtcgtcgtactatcagataagtttgctaaattagctgagacaagcgaaaacgcagcccgtgcgcaattaaccatggctcttattgatgctaacaacattataaaagcctctgtgcaaagtgtgaatcaacttggtgatgcacttggtacatggaaagccccattgtcagcagcaataagccaaatggatgctctgaaagcaaggggtatggatgtaaatcgggcattaaaggagcttggcgggacatatgaagggaatataattggtctcaaccaacttaatcaggccgtaaataatatttcggagtcattcggaataagcgctgacgatgcaattaagctagtgcaagcgcttggcgctgttcgtcagaatgcaagtccagaaaccattgcggcattgcgtgatgttacagttgatctcagccaaaaatatggatatgcaaataagtctctgtctgaattcacagggaaaatcggcgaatattcattgaagtcagatcaggctaaagaatcaactaggttagccactgaaatgctgcaggggcacaaagttgcttccgaagctgatgcggaagccatagcgcaaaacacccagagactccaaacctatatccagatgataaaggatgagggggcaactatcgcgatgactgctcgccagaaggctctttacagagctgagcagttaggcgcaagcgatgaagacaaaaaggcgataaacacttcgtttgacaaaattgaagcgtttaagagtgagcaggcactacagaaagaatcagcaaaggaagcgcggaaaacagcagcggcagcatcttctcaggctaaaaaagatgtaagccagcaagagtccattgctcagaaactggataatctccgcgctcaatcagacctgaccacagagtcgattgaaaagcgtcgcattcaggaggcgggcctccgggcggagcagtctcttggtagtgccgcgactcagcagcaactagcggaagcaagggcgcttggtgaggcaaacgaaaaggcagcaatctctattcagaagcgcaaagaggctgagcagggacaaaagtatgccaagcaggagatcgcctccgcacaagccactgtagatcctgctaccggacaggcaatcgacccactggctgtggttaatttgcaggagcaacaaaagcttgaggcattagccaagtatcaggaaattgataagcaaaatactcagctgtatgaggatgcaaaaactgcaatccagcagagcgcctccatgcagaggcagcagatttccgatcaagagactgaaaggcagcggcaaaatatgtctgctcttttaggtgccacctccgacttcttcgggcaaatgtctggggcgctgggtgactatgctggtgaatcgagtgcgacttataaagccctttacgccgtaagcaaagggttcgctattgcccaggcgtcaatgaacctcattactgctatcagtaacgcatccgcacttccatggccggccaatatcccggcaatggctatagctgctgctcaaggggctaaccttgtcagccagcttcgcggttccaactatggtggtggtcgcaagaacggcggcccagtatctgcgggctcaatgtaccaggttggtgaaggcggcatgccggagatttaccgggccagtaccggtaagcagtacatgatccccggcgataacggcagggtgatcagcaacaaggatatgcagagtggtggcggtatcaacgtgtccatcaatgtccagaactacaacgggtccgcagttgatgcccaggccagttcggacggcaatggcggcgtgaccattgacatgatcgtcgctgacctgaacaacggcggcatgataagccagggcataaccagtaacttcaacgtcaagcgcacgccaagggggcaaaattaa

SEQ ID NO: 143975 - DNA, 1506 bp, Enterobacter cloacae
atggctacgcaaccgacgcaagacgctgtaccaagtgaatcacctcgcaacctgaaattcaacgctgggaaaattgacgaattcgtcacttcatttgctcagcaatacattgaccgttttggtaatgcccattacacgattgaagggcttaaacagctagtgctgcagcaaatttataatctcggatggagtcttgaaggctctttccaggatggcggcactgtgacttcagctggcgatcttctgcaggatgaaagcactaatatctggtaccgctgggatgaccttgaaaccctgccaaaaactgcaccggctggctctaccccagcgtctgctggcggagttggggaagggaagtggcagcctgtcgatgtgagtgacgtgctcaggaagcaactggcacaagacgacgggatgaagctgattgggcagaaagttaactatggtattccatcgggttcgagcttaacgagagggcttatctgggcgtttgataagattaagggctggttgcgcgtaggtggctctgatttaacaccacttgatgatgagaaaaacttttggcgcggactgccctctaaaaactcgtggggcgatcctgcaaatattggtgactattctgtttcatttggccgaaatggggcatcttttgcagtttataccgcaacatttggtcatgactgtgtcacttacggcgtggcttctttagccggtggtgcaggtagcgcaactggaaatcctgatgatatcacttctccaaacgcagaaggttattgctcgtttgcgttcggaaaaaatgtaatcgcccttggcgctaaatctgcggcattctgtgaagaaactgaagctctatcaagaggttccttctctgctggctatttaactcaggctagagaagggctttctactgatccaggaagtacagccagtgatggagtaggagctacggcatttgggatgacaaccagagctgccggagatggatctttcgccgcagggagaaatatacaagcgtatggaggttcaatcgcaattggttcaggtttaaatgatcctaatcctgcagtaaacccgcacacgaaatcggtaatgcttttttccaactccctaatccctggcttagctgttacccctggagccggggatataaataatttatctaaagttggtttccatactaagtatcccaaagaaatatgggaatgcgaaatagctgacggtaatcgtgcggcattccggattgcaagcacaggaaccggtaagattcttttgcaaggcacttcaaatactggggcttcacttgatatagcatctttagaatggacaagcacaaatgggggcagcgctgtgggcactctgaaaataaatatgaatggtggagcggcctgtatcgagttgtctaaggatggtatggttgcgcttaagaacgttaaaacattggcggaaatatctggtgcccctgcgggcaccatctataaagaaaatggcttcctcaagattgtttaa

SEQ ID NO: 143976 - DNA, 795 bp, Enterobacter cloacae
atgatgatctcatatcaggaacttgttcgcaccttccctagaccagaaggagatagtgactttaatattaaagtaacaccggcttacatggattatcaggtagcattttcgtataagaaatctgacaaactatctttgcgtttagatggaaatgtggatgacctaagaaattacattaaaaacttgaaagacatgaaggttacattttatggcgacagcataacttacggctccaacgccagtgatatttatgcagaacctcatcagcctccatttgtaggattagttgccgcatacatgacaatgattaaagtaggaaaatatcactcatataatgcagcagtgccgggttggtcatcagacaatgcttactataatactgacggcagacttacgaagatggactctgatgtatatgtgctgtcgttcgggatgaatgattctaacagcctcccacctaaagattacgcattcaacattgatgctcttattgcaaacatacgaagcaaaaacccaaactctcggattgttttactttcgtcaacgctccctaacccagagtggaatactcccaagaaagaatactttcctctctacagcgaagagctttcaaagctttcacataaatatcagcacgtaacttttgttgatatcactgatgtatggacgcaaatattgaaaaggaaaaacatttactcaatcacgggaaacggggcgaatcaccctaacgatttcggccatagagtgattgccgaagcattacttactgccttccttggcgatgacttctcttaa

SEQ ID NO: 143977 - DNA, 1281 bp, Enterobacter cloacae
atggatagaaaaactgcagttgcaagatgtcatgaaatccaactggctattcgagataaagaagttatcaagtttgaaaaaatacccgaaatcggaatggctgttcaattagcactacacataaggggcctgcccattattgaataccagcttctaaaaatggtcgctacctctctaattggaatacctcggttagctgttgataggatcgtatttcttttggctgaaattggatttgttaaaattcactctgaagggaaaagtattaaagccgtactaccaagtgttccttattttgaagacctttatgatggaatcggtgaatattatgaaaatcagtctaaccctgatgagttcgaaaagttgtcccttataatcgtagattcattggcaggctcaccttttaatatcgattctttagccgataaattaggtgctgatagaaaagactttgatcaaagcattgagatcggagaaagaggaaattatatttactctagaagatgccgatctaaaaaaatacttttaaatcctacgtatttttccgaaaatgcagatatttttgccgatcatgtagcaaaagctggggccaaaacagttcaaaaaacgctccatcttttagagaaagcccaaggttggcctttatctctaatcttaaaaaggaaagaaattgctggccactctctttctgatgatgagactagtttgataaaaagacttgcacaagacggtatggtaaaacctccttctattatcacttcttattctggagataattctttcatatttactccaacaccaaattttgtaaatataagtccattcaaaagagagcaatatgaacgagctttagcgatagtttctgctatacggcaaggggaattgttgccaaataaatacagaattagaagccctggagctgtgttgtataaattgaaaactgagcttaagctttcacccacaagtgattatgctgagcaatatcaaaatcttcaacacttgcgcatagcaaaactagtcaaacttcataatggctataatcaactcgagattattgatacaccagaaaatagagagtccttaaaaattgcatatcagttagtccaaggtgataagatacccgaattagtagttgataatgatgtaatgaaagcgatggcaggtactcgtgactatgtagaatctttggtaagttccaaattaatgcgtgaaaaggaaaatatatcgctttcggaagaaacagagaatgaactaactcagttgcttttggagaaaatttaa

SEQ ID NO: 143978 - DNA, 1113 bp, Enterobacter cloacae
atgttaaaagatagagcccaaaaagcattagctttgaaattttgtatatctaaacgctggttgccacaactcgaagtaaatatagagtcgagcaagcggcttgaaaagcaaaatttactgcttactgatttagatgtccttgctgttgccttatctcctgtcggcgaacaggttaaatttattttcgattgtaaaagtggaaacagagaatcaccgatagggcgtgttttttggttaaaaggagtaatggaaaaaacacactcatcgcacggttttatcctgatgaattcgaaaatgaatattggaaaagatcacaggttaacagcagcagatctaaatatttcattacttaaagaaaatgaattcgaaagtttatctatcgggactggtggaagcacatcgataaatacagaatattcagtagcggcagatattacagcatgggaaaaattgtctgaacttaacaaaaaatatcctaacatgtcagaatatctttcattttcaaattcatctttttggatgatcaatgaacctggagagcagtgtaggaaggttgttgctaaactgagaagaataagatcagagttagatccatctaagaatgagcatttatgtatatttggtgatgcactttcattatttttgatgacaatttcaaacatagcgaataaattactactcgtattaatttcgccaactgagaaagatgatttttcttctcttgtattagcatatctatatggtggttatgagaaccttaacgcggcgattaagatccgcagcttagcaacaggtcaaaatgaaggtgatgcattaagcatttttccagaaacaaataaatttgaacatttgattagagaaataatgcaagccccacagcaagctatggctgctgctttattagctcgagagttatctctatgtatgctaactaattctgagcagaccaaattacaattagatattgcaaatgaaaatccatatgcaacgaaattcattttacttgcttctgaatatctgcagcaagctataaaattgccgcctgaattttttgatatttattctaaaatatcctttggaataacaactgaaaattccaaaagaaaaaaatag

SEQ ID NO: 143979 - DNA, 1029 bp, Enterobacter cloacae
atgtcccgcattttatttccctctacatgtaatcctgaaagaatattcgatttctgtaatgaaattgagaagcattctaataatcaacaaataactatagacttctcaaacatgggaagaattgaaccgtttgcaatggtttatgttgctaaacatattcgagattttcatagaaaacagaaaaagaatatagagggatttaaaattttttgtagtggatacgaaaataaagactatgcttcaaatatggctttctttagggctttcggattaaaacatggtcgtgagcccggatgtacggatggaaataataatttcgtgcctttcaccattcttcgtgttcaaaccgtaattgatgaagctaatgataaatatactgaagtacaagagatagttgaggcacgctccggaagattagcaaagatacttgctcgccaagaagaaggtgatcttattgatgctttgacattttctattagggaaataatgcgtaatgttgttgaacatagtgactcaaaggtaattgagtattgtgctcagtattggccctcttatgattgtgtcgaaataacaatttcagataatggcatgggcatgagaagttccctatcgaaaaacccctacatagaagctgataatgattctgaagccattcagttagcattaatgccatctatttctagtaaaaattacaaaggtgcaagggttaatacaaaaaacccatggcataattcagggtttggactttatatgattagccgcatctgtaaacttggcggtagctttcttatttgtagcggtgaccatgctatttatctcgatgaacaaggaaagaagcatataactttaggtcattatcatgaaggaactgtagttagaatggttttgaatactaggaaacttggttctttaagctcaatgcttgcgcaatttagagatgatggttacaaaatagcagctgaaataaaacatgctggtatttatacagcttcagctgcttcgcaaatgctttcacgggattttaagtaa

SEQ ID NO: 143980 - DNA, 1683 bp, Enterobacter cloacae
atgaatgagaaaaatgcacgacatctgaatgccatcaaagcacgccgattacagcgcctgccacaactaacccccgtagcttctttaacggtggtggcgcggcacttggccggggagccggacattgcattagtacaggcctgtaaggtcagtgaattttaccgctcctccgtcgaaggcatggatcttgcggtcaacagggctgatgctttggcccgtcttgaacacctctccacgggcagtgccatcgatactattctggagcccgtcttcctgagcctgctcgatgggacgatgcgggcgtgtaacatcggcattcgtcagggaattacgccttcgcgtctgtaccaggaatgccggaccttccagtatgaggccatcaacagcagcaactttaggctcgacagctacagtgagcagctgattgaacgccaaaatattcagcatttggctgataaaaccgtctataacagcggtacgatgacgcgtgatggcgtgaccgttcagatgcgcaacggtaagaaaatggagaaacataaggacgcccacttcggcaacagtcagcgatcccatgatgagtacgacggacaggtcgtctacagaaacaagcggcacgctaacagtgaagggacaccggagcgagcagcacaggttgaccatgccatttcttgtgctgaagtgtgtaacaacctgaaaggtaacaaggccctgaacctcgatgacatcaaggctatagccaacattgacgaaaactataaagtgacgtcacaggccaataacagtggcaaggattttggaaaattcgacaagacgagcgcggagcttcagcaggaagtgaagcaggggtatgtgatcgtcaaaaaaaggggcaaggaggtcaaaaagccactcactgaggagcaaatccaggcccgtcagcagatgatagacgagatgaaagtggctaagaaagccattgacgacaaaaccaatgaaactgtgtggtccaatatcagtaaagaccggagtgtccaaaaagttctggccaaagatgccggtcaggcagccggtcaccagtcgctcggcgatctggttctgttcgtcattaagccgctttactacgagctccgtaccagcctgtcggatggtctggacaccggcgtaggggtcagtggctatactgaggcattgaaacttcgcctcagccgcatgaagacatacgttctcactaatgcgtcaaccttgctgaaggacttggcggaaggctttgtaaaaaacttcctctcaatgctgctggaaggaattgttaactgttttgtgggcatattcaaaaacctcatgcggatggtcaaggaaggctttaaggtgttgatgcagtcagtcaccatcctgcgtgataaaagcagcaaccaggcccaaaaaggggatgccattctaaaactggtggtcggttccttatccatttttgcctcgcttggcctcgagacgtggctgaacagtctgggtctgccgggtccgttacctatccttctgtcctcggtcctgaccgccgttattacagccctgctgatgtatgccctagataagctggacctgttcggtacaaatcacgatctaaagatgaaacggatcgatgaattacttacaaatgaaatcgccgaaactgaacactctatgatgacaatggttaatcagcttcgttaa

SEQ ID NO: 143981 - DNA, 183 bp, Enterobacter cloacae
atgattgtcagcccacctaatctttctacgatctggctgatgattgccgagtatcagcttaacgatcccaaaacgctttcaacactggaagagctggtgacaatgctgatgcagttggatgagacaaaaccgcaagaggcacgcgattttatgacctcctggtatgaactggttgctgcctaa

SEQ ID NO: 143982 - DNA, 2652 bp, Enterobacter cloacae
atgagcaatgaaaagggatgtaagttctgccagcgcgacggtttacccgtcctgccggttcgtccggcaatcatggaaaaaggtgacgcgttaccggctttatccggcagtatcaccgtaccggtaacggccgaaggaggtgcagactataccgcccgtctgctgaggcagggctttttatacatctgggcggaacgttcacaacgctggattaactattatgctaccggcgacggctatttttatcctcttccagaggacggcatcgtgcccccgcgcgtggaaagcggagacattaccccctgtattacccgaccagatgaactggcaaccgcttccctggtgacactgccggtaaagcccgccggaatcgttaacggggtgtactggtttgcgtggtctgaagagtcgtggacacctgtggtacgcaaacagcatgaagatgccgcctggcggtgccagtatatgcagaaatttgatatggatgcgtggcttgccagccacaacggtcagcaggccctgcccttcagtcagctcgttaattgcgtggctgaatacagtccaggactacgcaacagcactcttaaagcctggactccctctcccctcaaagcggtcagtagtcattctgcggccgctttacgacaggcggcagataatctgaacgcgggcaacggtgcgattctgatgttgtctgacccggttggggtggcgacggagatttcggccctggtgcgttaccggatgcagcaggccatagccatgaatccggcgctgagccgtggtaccgcattgctgaccatgctcggcagcgtcgaactggcaatgcgtaattatttttacctgcaggcagaagccggggatgaaagctatgagcgccagatgcgctacggcagggacacgccagcaggaccgagatttccggctccggacatggccgaccggatgcatgtcctgaatgaggccagccggaaggaccgggtggatgaggcatggcagaccggctacgaaaaatacatcgaccgggcgaagacacaggcattcagtcagacactgaaagactggctgactgaatatgacaacagttcagtcattcccatcacccggatgtatctggcctggctgcaggagccggtgatggcgaattactttgtgcagcactttgatccgacctgtgcgcacagtggcggacgctatatccagacagtgacaaaagtactggcaggaatgaacgacaaaggcggagtgattacccacatcgatcagcagctgaatcaggccccgctgacgccggaaaactttcttcagcgggcggccttctttaatcatgacggctggattgcagaggtgaacgcacagctgaaaagcggcggaccagactggtggctgggcataagctgggaccgtctggcggacggcgcgaaggagtacagcggcagctacgccagtgcgatcctgaccgggctggaaaagctcagcatgctctggtctgacacgatgatgaaatcggtggatctgatggtgaaagggacgccggtgcgctttgctgtcgggatactggcgatgcagggtaaggcgttctcagccgtcagcgtggtgccggggacgaaaaactatgtcggggcgatgacccggggaatggccgggatgctggaaatgagtggacgcagcggcgggcaattatataccgcgatgcaaaagctgaccgaccgactggtgaaggagctaccggagcgctcgctggagaaaatatctctgtcgcggattattgacgtgcaggaggcgaaggcactggccgccctgccggttaaagagcggctggcgaagctcagtacggcaatgctcacggaggacgagctggcgcgaatgctgttcccgaaatcgctgggctcatcggtggcgcaactgagcgggatgaaacccggcacgctggcgacggagatggcggcgaaaggcatgacgtttggcgggacggtgttctcagcgtactttcagtggatggtgctggggtacggtatgaaagagagcggcctgccgtccgatggtaaagcaacgacggtgttcggcgccaatgccagtatggcggtggcgtcaacggcggaagcgctgaagctggcgatgacgccactgatgaggctggagctgccatcgactgtgtcgatgataagaaacgtaatgatgaaggttgtcggggcggagatttggggatggttaggattcggaggggggatggtttataccctgacagaggttctaagtggacgggaggcattagaaaacggaaagacaggtatcggtattgcacatttgattaacgccctcggtgtcgggatgatgactgtcggggccggtagcgagatatcggttgcaatccttgcccgttttggtttgtcagcaacaatccttgaaagttcagaactggcggcgtttttcctggggccggcggggatatttatcgggatgctgctggttctgggtgcgggagcctggctgttaagtcagacccgaaacgatatccagacctggctactcagcatgcaatggcggcgggttccgccgggtgagagcgatatcccggcgacctggccaaatgcgcgtatggaaaaggagggctatatggctctgaccgaccaaggaggcgcgcatgtttaa

SEQ ID NO: 143983 - DNA, 1089 bp, Enterobacter cloacae
atgtttaatccctttaaacgattccctgccgacccgacaaaacggttctataagggatttctccgcctcagtgatgaacgtgtttttaaaatttattcgcagaaaacaggcaattcgaatgttcaaggggtctccgggtttgacagtgtggtgcgcctgaactcgacctatctggagctggttgaccgtttttacaactggcgcggaacatggacgctggccggatttttctttttttgtctgtctttttatgtgtttttacagccgttaatcacgttgttgcaagatggttttcatagtgcagctctctggattgttgacatcattatctgggggattacgctgccgctctgtttggggttataccggatgatgacctccgaggtatttttcagcacctactatccgatccgctttaaccgtaaaaacaggatggtttatgtctaccagtccggcggaacggtgttgtccgttccttggcaggagcttacttttgtcctgtatccaacgaagggacgactctcaacgcagtggaccattgtgggatgtcttacgggtgatgacggagatactgtcacgggggcgattcctctcccgattaatgtgaactgggacccggaagacctgaccatgtactgggaatttatccgctgctatatggaagagggagatgagtatctcccggacctcgcggactccatagcctggtgcccgccggttgaaaagcagaaagagggctggctgttcggactgttctatctcagtaagcagtggttcgggcgactcggtctgatggttaatgcgctgcagcttcctgtgtttttcgttctcagttttccgcgctggctggtcatgctgacctgcaaaataccggaatggcctgcggaggtagctgcggcctgtcagccggacgagaatgaccctgtcaataaaggcgctgagcataatccaccgcaggtctggcgaccgatgctgggcttgcagggtaaggagcgttacgcccgcacgtttgcaaaagagcgcggagcaatggaccggatcgttgcccgactgaaagccaaatatggcgggcagatccatgcggactga

SEQ ID NO: 143984 - DNA, 237 bp, Enterobacter cloacae
atgcggactgaggggattatcggtctggcgggaatatttgtcgggatgctgctggttctgggggcgggagcctggctgttaagccatacccgtaacgacatacagacctggctgctcagcacacagtggcgtcgggtgccgccgggcgagagtgacatcccggctatctgcccggatgcacaaatagaaaagaagggctatatggctttgacggctcaaggaggcgcgcatgtttaa

SEQ ID NO: 143985 - DNA, 1221 bp, Enterobacter cloacae; identical to SEQ ID NO: 40278

SEQ ID NO: 143986 - DNA, 777 bp, Enterobacter cloacae
atgaatgcgcaccggcacgcgctgcgcaagccgcacccagctgaaggtgggctcgacgtcgggcaggcccagcccgcccgtttcgtcgttgctgtccccaatcccatgcccgatgctctccacgtgccccgtgatgacaggctcgtaccccatcagcaccacctgcgcggcatccccgacgcgaatatggcgcagcttggtctcctcaaagtaccctaccacccagaagctgtgcgcatcgacgatggcgacctttgtctcccccgccgtcgcgtagtctccggggcgaagccgcaggtgcgtgacgtatcccgagaccggcgcgcgcacggtggcgtgcgccagattcagctctgcaagatccagcgcggccagcgcgccgtgataattggccgccgcgacgtttgccgcgctgccggtttgctgcaaatcctcgctcgagatggcgtttttaatcagggtacggcgatgggccgcgtcctggcgcatcagcatctcatggcgtttcgactcgacgtccgcctgcgcgctgaccaccgccagcttaagccagcgcggatcgatggtgtaaagcacatcgccccggttcacccactgattgtcccccacggccacgctgatgaccggcccggagacgtccggcgcaatctgcaccacgtccgcccgcacgcggccgtcgcgggtccacggcgtttgcgcgtagtgtttccacatcataaacgccagaagcgtggccgccgcgacgacgctcagcgtcagcgcatagcgagccagtaa

SEQ ID NO: 143987 - DNA, 1485 bp, Enterobacter cloacae
atggaaatccaagattttgtaggtcattataaaaatcatccagtgcttttcatcggcaccggttttagtcttaggtatcttcaaaactcttttggctggaatgaattacttgagtttatatccaatgaactcacgggtaatgaggagttttactatgaccttaaagcagaatcaatggagaatggtgaatatagttatgaccttttggcaacaaggcttgagatagaattcaacaaatgtcttgcaactgatcggaatggcaaattcgaagccattaacgatattttttataaaaacatgaaagaaggcaagaaactgagccgttttaaaatttatataacagaaatacttaacggcttattgataagacccgaaaaaagcaatgaaattgacgctctaattagagcacgtaaaaacattggttccgtcataaccacgaattacgatcgtttatgtgaaaaagtttttgagttcaacccgttaatagggaatgatattcttcttagcaacccctatggctcagtttacaaaatacatggttgtgtaaccgactcagacaacataattataacaagagacgactataataacttcaataataaatacgaattaatcagggcccaactcctttctattttcatacacaaccctattatatttattggctatagcataagtgattcaaacattaagtccctgttaaaaactattttttcatatgtaaatgtcaacactgaactagcaaagaagattcgcgataacttcctgctagttgaatatgcacctggtgatcatacgacagaaataaccgagcatgatattgatattgagagcatggcaactatccgcatcaataaaatcaaaacagataactatactgctatatatgatgcactttcaaaactagtccttccagtttccgcgatggacatcaggaaagtgcaaaaagtttggaatactattaaaagcggcggagaaataaaggtaaatataacagaaaacatcgatgaactaaaaaatgaagatatggttttagccgttggttcagaacggactgttaaatatgaattccaaaccaaaactgaaatgattcaaaattatttcaaaatagttgatgaagcaaactcacaacttatatcattactgaataagcaagtcatatcaactcgtgaaaggttcccggttttcgcattcagttcaatttgtgagaatctcattaatgaagaaaaatataaaaatcgccaagttgataaaattatcgctgacttaaagggttatgttaaagaatgcggaaatgaatactcaacaataactgacataacggataacttacctgactggaaagtcatcggtggaatcatgtattctgttatggatgataatatatcaatagaagaattaaagaattatcttgaagaacactccggacggtgtgacacggatttcagaaaattattatgtctttatgattacttagcattttaa

SEQ ID NO: 143988 - DNA, 1167 bp, Enterobacter cloacae
atgagtattgccaactgcgctatcggcccactttatgatgagcaaataaaaaaaacacttatgtatgctgaccataaattcaagcggctaatgaatacacgaatgtcgttactcgaacatttatcaccccactatgacttatcttccatgttcagctatgagttggagggaagagttttccggattaaattgatcaagcctgagattaaattatctcgccagcagttgatcttctcctcactctttttagagcaagattttctaaaagaatataaaaaacacatctcaaatactctacaaaaaacaatcaaacagtgcattaaaaaatacaaacaaaaaatcaaaatcgagccttctgttttagattacatatcaacgtcaccccgcaatacgtcgagttatgtattacatgagatagtttctcaatgtgaacattgcgatgaaattcgcaatattaaaaatgatatactgcttgatgaactaacgttgaatggtcggatcactaacatttcaaaatacattaaaaacagtcaagataaaatcgtcgaacatatagagttctgcactcataaacttgtcaatataagtcgtaagaatcgtcacattttcaacagcaccacaatctctggcagaaaacccaacatcactggtgttttactttgcctttcagaattgataagcaatctgcatatttacccaactgcaattaataatataagtaacgccataattataagcattgtatactctgtacttcaacatcttcaatccggaagagaaacagaaaaaaccaaaacctctccagcactggattttatccccaccatcatcgcacctcatgttttctacctggcgaaacgcgaaaaatcctctcaatataaatacattgaaaaagaatatcttctcggccagttacttatatttttgatgtataaaacagtttactactcgattcataacatcagggtaagccataagcacttctataacgatataaaaccaaatttaatggcattaaaaaaagaaagcttattaagcaccaatttcatgaaaaatcgaagtgagattagaggtgaagtctttggtgatgttggtagtattgaggctgatttgagggaaatcagcacactgattcatcggcggaaggcattatttatttccttttaa

SEQ ID NO: 143989 - DNA, 447 bp, Enterobacter cloacae
atgcctattctggatctgcgtttcagcaataaatcaattcaccaacttccacatcccctcacgggttgtcaggaataccgtgatattcactgccaaaacctgcgtgctctggtgtatcccaatcggatcacgctggcctttcgtgccactataaacaatcagcgtatatatgaaaccctgggtcagttccctcagctctgcgttgaggatgcccgtcagcatgtgatgaaactgcttgctgataaaaatcgtcttgcggttcagtcccgtcgattcactgtggaacaggccatcaatgacctgtggctaccggatttgcagttgtataaaaagagtcctcagtcagagttgtcaaaactcaacctctacgttcgcccgttctggggcaagcggcaacttcgcgacatcacggcaggagaactagggaaggtgcgaacaagttcctga

SEQ ID NO: 143990 - DNA, 861 bp, Enterobacter cloacae
atgattaattacctggagcagccttttcaactggcggaccatcaatatgcaataattgaccgtatgcgggtgccagaactgccggaaagctggccgcatatcgaactggtttcgccgatgctggtaccacaggcccatctttacccgtggctgataccgttgcatgagcttccacctggcgagtggagaacatttatggcagacctttcacggtgtgcagacccaacttcaccgccgaattgtccccttttactgtccagtccacgtccggttaagattgtacgcaatttgctggttaatgccctgtttttaagggatgcaaaccaaaggggacatatcttgcgttattacgatccgcgagtgttgtttcatctgcactggatgttgagcccatggcaattgtttaaccagctacccgcccaggaaataccgtactggacattctggctggagggagagtggcacacactggcgttcccggctcgagtttcttgcctgcccggagaccaaacagaaattccgctggcgcaattacagcgttgtgggcagataaaccttgtcctggaaaaactgccacgcaatgccaatatggcgcagcgccagcaaagtagtcgaaaaatagatgcattgcttgtgcaggcaatgacatgtggactgcccactcaggaagatcgtattgcatttgcgctgcatggattaatgcagccagaaggtttctggatcgctccgaagatggcggcatttctggcacagtcccgacaggctcctgactattatcgtgatgtaaccagtaactgggatgaacatctctggcaggagatgacccaaatgcagccttataataatgcatggaacaattaa

SEQ ID NO: 143991 - DNA, 1116 bp, Enterobacter cloacae
atgttccgactctaccggtcacatgatttaacacggcaattaaaccctgaagattttcaatacattctgacgccagcgggctcgctgagagaggcgtgtattcattacgatctctcttatgaagtgaacggtcacagtctcacttttggtcttccccaaaaaaaatatagcgtatctccacatcaaagaccctatgaacgaaagcatcgcagctacgcagatcccatttatgatgaagtagaacgcgagctgcaaattggttggcttgttggtgtggataccaccaggcgctggagcagcgaccggaacccgttttatatcgacaataacggcgagctaattttcacccctacttcctcttcgtggcatgcatggtataaggatgaaatcatgagcgcttaccggcacgttattgccgatcggcaaggcaggaagcctgctcccactcaacggatgcattctgactatttcgggccaacaacttcaccgtcggggaaaacgctgaacagtaaagctgttggtcgactgctcgccgctggtggtgtgtataacggcaatattgaaggttttcatgaaaccgcacagcagcttgggggggatgctccagcgggctacgatcaaatcatgaacaataaagggttagtgattgcaggtgcctcgattgcagcaggattaacaatgggtaggttgaaccctttaagcgaaatagatgaaatatcgggtctcagtaaaataccagcacttgaaaacccatatataaaaggtttcacctctgagaatggaacattagtgaatgctgaacacgccgttatcgaccccaaaaaactcgcggcttatgctttagattcaacacatcctacaggggggcacaaagccagggtgtttgagtcagcgctgggatacaacccaactaatgcagatgttttagccgcaagaattcaggaaggcgtattatcggccccagcaaaagtgttgccggcaaataattacggccaaacaatggctgtcgatatgtccattttaggcgtcaataatgaaacagcgatcgtgcgtacaggttggatgtatgaaacagacgcgttagttcctcgcctgacaaccatattcgttaaatga

SEQ ID NO: 143992 - DNA, 684 bp, Enterobacter cloacae
atgaaaagagccgaattagacgtagtggttttaggcgaggatttaccgaatgaaggactggtaaagggaactattggtacgattgttatggttttcgacacccctacgcggggctatcttgtcgagttttgcgatgaggaaggaagaacaatcgcaatgcctgctttgcttcccgctcaattaaagagttattttactccaggtatccttaaaacactgctggttgacaataatttcccggtagccaacccagtagatcctgacgtaatggcagacttgatgcacaaagccgcccctgctgtatgggatgctcagaagagaagagtttacgacgatatccaacacctgatcattaaccggctggactactctggtatgttcgaaatcatggatggacttgagtataacggtttgacgctgtacagcctggtgcaggcggagaacggtgaacccgtatggtcgaatatctacattcgtaactttgaaatacgtgacaacgaaagctatgttgatccgaaccttactgacaaggtactcatcggtgaagatggtatgtccgtgtttgcctacaacttcacagatgactgtttcgagatccgtgataaagcatcgacggattatgccattgaaacacatgttaacttcagcgaattgttgtccgcgctgattgatacggtgaactga

SEQ ID NO: 143993 - DNA, 2946 bp, Enterobacter cloacae
atgtccgtaaaacagtatgaaacctatctggcagaaacctttattgaatgggtaggtggcatcattcagcctggcgagcgctaccagttcaaatctcccgatcccgataatgccctaaaactctgggaagcattcgtctctctggcgaacggaaatcggctggaaattgcgtcagggcaatatattgattgcctcccctgcaatggtgttcagcttattcctgtactgcatggtgctgaggctccagcattcacagaaaactacatttctcatttgcgcgatgaagttgcagggcgcagcggcatttttgcccaaacagcgctgttgattattcacaacagtatgctcgataccctgattaacagcacgaaagacgtggcggcaccggatgctatctggtacccgcaaactttcagtcatcaactggaaaagctcattaccaccgacagtaaccgttcggaattgtcccgttgtttgctggaggatcaactggcgacggtactggatgaaggtgcgaccgtatttggtttttcgtcgctgtatcgcctgctggatgatggcaatctggatttctccgagcttcatctgtttaaagatgatgaactactgaactatagccagaagcagctacgcacccgactgaatgaaaaccggaaattatatcgccagatagaagatagtgttgaacgctacagtggacagctggagaatgtgctgcctgagtttagttcaaaattcattcaggagcatttttacgataaagatgactggcgtgaactcgatttctccgactacaggaaagagaaagaacagaatagtgaacaaaaactggtgctggaaaacgtctccgtcgaaaacggcgaggtttggcaacgcgcgaaaagtgccagtaaggcaggcaaacgtgacatcagcctgctggtgcaggtgcagccaggacaatcaaaagctgagctggagttcagttttcagggtaacgatcttcaggataaccagataaagattgcccataatcgtcagttaaagaatgcacctttctggcgcaccagccgggcgggcggcaagacttcccgcattctggcgtcggtgccttttgatgggcatccctgcttctttagtctcgaactgaccaaccgcaataattcagccgaagagtataaatttcgcctgttgttggtcgagcagggacaattctggctaaacgatattcagcactgttaccgtatcgagccaggtaaagatcaaataaccctgcaactggaagataacacactgcgtattgcagagtctggcaacttgatatttacgttggatgacgagagcgaagacatcgactgccagtattatgctcaggtgaattttgagacgctggcaaatcaaagtgacttggttcagtttgcgctcgtttccggtgattcccgtctgtcgtttaacatcgaggggcctggagcagaagaagggctaacgttaccgttactttttgaccaaagtcgtttcaataagttgttcaaagaagagggcaatgcaacctggaaccgactaaaagggcgcatcatactcgataatactgaacacaaggtcgtaggtgtacgccagcagttgttgatactggaagcctcattaattgagcaacgtctgctaggtacgggaagtgacgatagtgagtttgcgctggatgaacttcttgccagctaccccgatctccataacgcctatgagcagttatttgcctactatcatcgtcgtaacaccctaccgagtctggtgtcgtggtcagcagaatatcgcacactggtcagctacattgttactacgtttgaacagtcactccagcaaatcggcctgagcagagcgctgacagcgcaggagaaacgtcttctccatctggggatctgccgcaatgatagccatgagcgtctctcaccactgcacccattagtgctggcctaccatctacaactggcagaagctatcgttgcagagtcggaacagaacgattcggcttcatttgctacactaccgccgatcactcttgatcgcctgatggtttccggattaatgccgtttgtttaccacagtgagcatgaatacgcgcaactacagccggtggaagaaaaccgcttctggattgacgcggttccccagcggcaggtcagccatgactacgttaaacgtctggtaaaagacaaactcaatgagttcacggacgcttacgcccggttgttccagagcgctgaaaacagtgcgttgattatcaatgccattaatcaagggaatgccaaagaactgtttctgggattagtagaatattttaagcaagaaaaagagcacgctatttcggtgcatgtgaactgctacgatgaacgtttgctgccgaatatgttcgatcactttgccgaaagtggtagctatgagcagcttaaaaacgatctcgatctgaacagcggcgtatggcgggcagaagccgatatgctgattgacctgctgcgtagccggttaacgttcagcaagtttgtcctgccgtcagaaagcgacaagctggcctatgcgcatctagcatttttcaccaatacagcacctgtagattgccgccagatccgcattgaagatgcatcaagcggggtattgtgtcatgggttgatcgctggggaaggtgccgaaacgcagggggatgcttactttaccgcctttggactgcgagatgtggatactgagtcttattgcgccctgcgtcttgccagactaatcggctgcctgtggcaacccgcacgtcaaagcaacagccagtatcatggacaagggatcggcctggccgtgagtggcaattttaaacagctgctcaattactcttacagtagcgcgctctggaccaccatcattgatcctaaagtcaccctcgactttttcaccagtcagaaagatgttgacctgctccccgttgattag

SEQ ID NO: 143994 - DNA, 1326 bp, Enterobacter cloacae
atgtaccctatcgcaaacgagttaaaagtgggcaacaatcaactggatagttacctgcctgtgcgcaataaaaataacgatattagctggcaattcgtcaccggtctggtccttagctacgccctgaaacgtaaaatcgaagcttacgatcccgaacaattccgtgaagattgtaaaacacatctgcaggagctgcttgatgagcctgcattctggtccgtgctggaacggatgtatttttccagtcaggatattttccgtatctccccactttttttactgttccacgcccagtttaatggtgaaaaaattagtgcgggttctacggcagataaacgacttggtacgctgtttgccaatttgatgggagatttcagccttagttatcccatacaggacagactgaacttcatcgagcagcaaatgctgaataagctcaatgaaaaaataaagctgttggggaaaggaccgtttgccgaagagcaaccgtatcttccgtatatggtaacgtgttttcagtctgatctggcatttctggctgaacatccacagtaccttttacaggaattgaccaacaccctacgtttgtacgcttttagctggtgcgctcaactagcgctcaatctggacaactggcaggatggcgaaccacaaagcaaatcactgttttttattcttgatagcgaaaaagccagctccgaacgggaaaaggtgaaacgttatggctataggttatttgccagccagagagaaaaattgttcccgatactttccgcgttggaggtgttgcaggtaaaaggggcgaaaaaacgccctctctggcaggtatatcaggattgtttgagttattcaggcaccccaaatcaagtgttagatgagcttaatgattacatacaaaaatttattagtaaggaagaacgagatcttccagctcgtgaacgcgctacaaatctggaaagtgctttcaaacagctattatccgttgctatagagcaattccaggataaaaaaactaaccgcgcggatataaataagaactacattaacgagctggaaaaccagatttgcactgatttcattcaggtccgtggtcgggcagggaaagtgctggtgctgaatcaggatcgtctgctgttactgaccaatctcactgtgggcaaaaatgacaaactccgcctgcatgaactgctgcgtggttttgaacagcgcggtttttatctggacaaccagtcggcgcaaacgctggtggcgttttatgaacgcatgggaaatgtagagcgaatgagtgatagtggagacgccgtgtatgtccgtaaaacagtatga

SEQ ID NO: 143995 - DNA, 1650 bp, Enterobacter cloacae
atgagcgcaatcacattacgtaaagcgttgggtgtacttgcgaagtcatcttcgttttccgtcaccaccgtgacacaccgtcagaaggatgagttcgatcagttaaaggaacaactctttgttaaacaagagattgaaactgaattgcaacgctatctggatgttgctagacccggtgaaatcatttttttgtgtggtagtagcggggacggaaagtccgaaattttaacccgctgtcagtcagatccgcgttatcagcggcgatttattttccatctggatgccactcatagttttgcacctcgacaatcagctattgatgctttgaatgagttatttgctaatcatcatcagcagtcatctccattgctcattggcatcaacaccggaatgcttgccaactttgcccgagaaggtgctgaatgccataaggtgatccggtctgcaattgactcatttttatcagggcagcaggatgcaagccgtccttatcgtaacgagaattgttctttttttgattttgaacactatcctaaattccagtttaacgaaaataaaaactattcatcatttattaaagccttattagataacttaactcgagacgatgataacaatttatttcagtttatctttcggcgcgatgagttaattaatccagatctaaaagaggtcgcaaactttaaattgctttgcatgcctggcgtgcagaatgtattaattacgcagctctttaaagcgcggttgattaaagaccagtttgtcacgacccgaacgctgctggactttctgcatcatctgttgatggggcctggctacttatttgataatctcttcatcggtgcagaaaatgatctgattaaaaaagtttccgattttgatcccgccagattgcacacctatgaacttgatcagtttgttttgcgctatgaactgggactggttgacgctgatctcgatgattttttagccgcacttgagccgttgcacattaagtttgatcgccagagcgttaagcccggtgacgcaacctccttgatccggcttttctggctgttgcagtacgagtcgttgggtaatgattatcatcggagattttccgcgttctttaacgaatcgttgtttgaacgttactcagaaatctggcatttgcatagaaattacacagcagatccggagcaaaaaagatcactgaatcgcttctatgcttttgagcttatcgcgggtatccagcgctatgctaaccgcaaagcacctgaattaagtatgcaaaaagaagagttctttttgggtgagtttggtggggtaaaaataaccgcaccggtagaggtgaagcctgattgggatgctatccgtaataaacatacggctcatccaactggcttcgatgtctatttaaaggtggggcgaaatccactgccgcatatccatatcgggcttaatttgttcgaattactggacaagttgaataatggctatcgtccgaataaatacgataaaaatgccatcgtgttactggatgaaattgttgagttgatcgcggagcaggctaaatccagcagcgaaatcaaattttatgatggcagacaacgggtttatcgtgcaaaggcggatgacgatatgatcactattagcggtatggagggttag

SEQ ID NO: 143996 - DNA, 1266 bp, Enterobacter cloacae
atggccctaacggatactaaagttcgttctgctaaacctgaggagaaagagtattcacttgttgacggtgacggcatgttcttacttgtaaaacctaacggttccaagtattggcgatttcgtttccgttttggcggtaaacagcatttgatggcgttcggtgtctatcctgaaatttcactggcggatgccaggaagaaaagggaagaggccagaaggttggtagctgctagtatcgatcctcgtgagcataaacgtgctgtgaaagaagagcaggcgaaagaaattattactttcgagaaggttgccagagagtggctcgtgaccaaccaaaaatggtcggaagatcatgctaatcgcgtaaaaaagagtatagaggacaatatcttcccggcaattggtgctcgcaatattgctgaattgggtacccgcgatctgttaattcccattaaagccgtcgagacatctggacgtcttgaagtggcttcccgtcttcaacagcgcactacggcaatcatgcgttatgcagtgcaaagcgggttaattgattacaacccggcgcaagagatggcgggggcggttgcttccagtaatcggcagcatcgtccggcgctggagttaaagcgcatccctgaattactccagaaaatagatgactataccggcaggccactaacccgttgggcaacggaactcactctgcttatctttattcgctccagtgagttgcgttttgctcgctggtcagagatcgattttgaaacgtcaatgtggaccatcccgcctgagcgagagcctattcctggcgtgaaacattctcaacgaggatcaaagatgcgtacacctcatctggtgccgctttcaaagcaggcgctggcgatcctaaagcagataaaacagttctgtggcgaacatgagctgatttttattggcgatcacgatccgcgtaaacccatgagcgaaaacacggtgaacagtgcattgcgggtgatgggctatgacacaaaggttgaagtttgcggccatggattccgcacaatggcttgtagttcgttaattgagtcagggctatggtcgaaggatgcggtggagcgccagatgagccatatggagcgcaattcggtgcgggcggcgtatatccataaagcggaacatctggatgagcgcaaactgatgttgcagtggtgggcggattttctggatgcgaaccgggaaagagcgattacgccgtttgattatgcgaagatcaaccggggtaatatttag

SEQ ID NO: 143997 - DNA, 1251 bp, Enterobacter cloacae
atgatttacaagagagatcgttacttagttttagatccttgcggaaactatctggtgaggatcgccataccaaagtacatgcgtcacctattcggaggacggcacagctacgtgaagagcacaggcacacgcgatgtgcgcgaagcccgtctctttcgtgatacggtggccctggaatggatcaagatacgtagccagctaaagcctgagcgtgatcgcggctcgaaggtggagcaaatcctgaatgagctacgccggatcgggacgtatgcacatgaagcaccagaaccactaagcgcccctgtaatgagttgcccttccctcttgaggatgcgggatcagtacattctccagtttagcgagaagcgcaagctcaccacactatcgaagactaataaggccgtagaagtgctcttagaacatctgaaaaagcgcgatgttcagcttcgtgacattaaccgaaccaccgttacaggctggcttgataagctcaagacggagaaagcaccacagaccatacaaaattacgtcagcgcactggctcaaatctgggatctggctcgtaaccgctaccacgatgcaccgcaagaaaacatctggcgcggtcatggtctcgaaagtaaaagtagcaaggtgagctacgaaatttttgagcctggcgaattggcgaaagtgtttgcggtaatggcagatgatgaagagatgcagaacgtaacgctgatcggcatgtacagcggtatgcgattaaatgaaatctgttcgctacgtgcagccaacatcaaggagatcgagggggtattatgtttcgaagtgacggaagggaagaccaaatcagccgcgcgtatcatcccatgccacagcctgatcactccgttggtgttgtcgttgcgtgagaagccccacaacggctttttattctatcgtgcgtcaatgattgaccgtgcagacgggaagcgctcaacgtggcattcacagcgttttacgagggctaaacgtaaggcattgggggaagtgggatcagagttgaaagtttttcactcgttacgtcaccaggtggcccgaattttggacaggggcggggttggtcgaggtaagttaaagccagttccagaagaccgcattgctttgctactcggtcatgagcgcgggtctacggaaagttttaaaacgtactccaaaaatgccgcttctcccgttgagctacaacaatacatcgaattactacgttatccagagatagagaaccaataa

SEQ ID NO: 143998 - DNA, 1863 bp, Enterobacter cloacae
atgtcaggtggactatcgatcaacatcgcagaaataaaatcgaccgtttcctttgtggtggacagaaacagcatgaagacagcccttgatgcttttgaccagattcagaagaaagcgaaaggtattaaagaccccacaataaacatgaagagattcagccaagggcttaaatctgctgaaagagaattagataagctgaataagaaagcctctaagccacgtaatagcgatgaacgagaaaaggcaagggcagctaaggcgcaagcccgtgtagaggctcaagcagcgaaagaggccgcgagaaacgcacagcgccgtgaacgagcagagctaaaattgctcgacaccgccagcagctttaaatcaatgcaacacttaaccaatgttgaactaacacaggccgcgcttgcagcgtcacggatcaccaaagcctatgccagcggcacgatctccctacagcgtcagaacagcgagattaagcgcttacagcagggttatcgcaggctcaatgcttcacgtagggaagcagctaaacgaggcgctacggctcctgtaggtggctctggagcgattacaggcgggcttatggggttaggcactggtgctcttgctggcgctggtatcggtgcggcggcttatggcgcttattcttggggtaaagatgctgtaaccgcacaggaagagcgcagcgagattgtgcaacgtgccagattgggcggtgtggattacaactttctgcaatcgttaggccagtttgcacaagctaacgggattgattccggtatcggtacgcagggagccagaaaaaacttggatgttgcaaaagatgtgtccgagaaactcgcagacggtgcgctgaatgcgaaacgtaataaacagggtgaatggacaggagcaccaacaggcattaacactgctttgaacatggggtatacgcctaaacagcttaaagaatgggctaaaaatccgtttggttttgtctcttcatacaccaacacaatgcaatctaagggattgagtgaacaggaaattttgcacaatctcgaagacctcggggatgatctcgggctttacgccaaagcctttatgaacggcgggaaggcactcactgatcaggtggacgtgctcaagcgtaacgggcagtggctggatgaagcacagcaggatcagcttgttcaataccgtaagtttaaccaggagcttagcattctctccgatagccagaagctggccttcttcgaaggttttatgtcagagattgaccctgaaaccatgcgagagtttaaggaagctatgcaggaggcgttacccttcttcaagggggcaggggcagcagccggtgatcttgtatccggcttgattaagctaaccaactggatcactggtaagctgaatcttctgaacggtgacaacactactaaagaggcggtgagccagcattacggcacaacgtcagcacctgcactgcctgggagtaatccagtggctaacgcctacggagccagccagcctaaagcagacggcacacatgagcataatgtattcgacacaatgcgtgaatggtggaacggtacaagcggggcgcaggatgttagcagttacgctcagagcgccaacggtgattattctcctgtttctatgttgaaacaatccgcagcggctacagcaacaccgccaggtaataatacagtggtgcagccagtggtattacaaaataatctaccggaaggcatgatctctctcactattgcccctgatccgacattcggaaacatgctaaatgcgagcgtagatcagcgtattaatcagaacaatcagcgcatggtgctggctgtttcatctggacaagggacggggggctaa

SEQ ID NO: 143999 - DNA, 378 bp, Enterobacter cloacae
atgcaatttggaacattcacaccgtcaaacggtgaaaacgctttttcacgttataaggtaattgcttatgcaagcgatgccgtattacaggacaaacgaattaatttagccgcaggaatccctgattcccttatcgtaggtgatcttgttagcacatcaggtgctaaagctggaaacgctgcgagtattgctttcgtcgtggttgaacccgcgcaatctggctctaaatcaattgttgttgcatctccatcacatgtaattatctctaaattagggattgaatttaacgggcttgatgaaaccgcagttgaggcgcaactttccgcgcttggattcactttctcagactacgacaccgtagctctacgcactacataa

SEQ ID NO: 144000 - DNA, 225 bp, Enterobacter cloacae
atgtttctgatgaattatgaccgtgtaatcactcacaaaggcgcttctcttattctctctgaaaagatgattaaacaagcggctgatgttctcaatgtggacgttgagactattcgagaggctacagagaaattctggcctacagccacgatcacaaaatcaaatacccctcacccatcatcagggcttgaggaacgattaaaactattagcaaaaggaaaataa

SEQ ID NO: 144001 - DNA, 390 bp, Enterobacter cloacae
atgggaagaaaagaacgcagtaacattgtcaggattgaaaaagcagtacgagcaacaaaacgtaaatacagccataagctaaaagattattcaaaagaatctattccaggtgagctaataacgacaatcatagaacaccctccaacggttcccgtaggggcagagtttgaactattgcaggatgttctatcgtcaacagataacgtttattacaagccacgctcccgccgtgaataccacattgattcatccagcctcaaaaaattccaaattctcggatttgagcactacgccgattatgtcgggtatttgggaactaatgccctcagcaatcacactgccgatttagattttttatttaatgacgataaggaaaattataatgactaa

SEQ ID NO: 144002 - DNA, 843 bp, Enterobacter cloacae
atggcaaagaacaactttatcgacggggaagtatacaaatacgcctcaatcgaagaagcattattatcagcaacccgaattacaaatctcaaaacaggcgagtcagtaaagctaatcggtaatgccaaattagcatacatgatcctgcgaaagagattccatttattcaccgaccaatcaacagacaacaagtattatacgactggtaagcactacgacactatagaaagtatcactgcggcaataggtgtttctgacgttgatacagtgagcagggcaatcggcagattggaagccgccggactactgaccaaaaaagagtttggcaaaacttacgaatggacagttatcgatctcactccagaattattccttctcgaacgtaacaccgggacgccaaaaaatcctgtctgggtggattgtctaaaacatccagtgtttggcagtaccaaagaagacataacgccagaagtgcaggaagaaaagcaacctgtcccagaagccgatccgatgtgcgagtttgacgaaacaccggaagaagaagcgccagcgccggaaaaagtaaagccaacacttaagcccacgaagaagacagcggcaaggaaagcacctaccaaacagcaaaccgtttccccattcgagtttaaaaagccacgagatgaacgttttgacgggataacttttaaaaggttaaacgacgcatctgatcacttcttggtattccaggattacgatctgccatacctcgtgttattcgaagatcaggggaaactaaccaacccagccgcaatagaacatttgaaaatgaagaggaatctcttcgaaagaacagggcgcttgtag

SEQ ID NO: 144003 - DNA, 687 bp, Enterobacter cloacae
atgctaaaggttattgcttcaatctccgtttttataatttttaccgttattggctccctgttttctggatgtaatgatggttggatgtctgcatcaataggaagtagaggagcttgttcccatcatggtggtgtaagcggtatgcccggattgtttatgtttgtcgggtttgtagcaggtgtgtttctattccttaaattatcatcaaaaaatagtattcatcacgacgatagtaatgccattgatactagtattagaaatgttgagaatgttaatagtagagggctaataaaaaccactataaaaaatgatgaaaaaaaagagcttatcgcatcatttgaaaagtattccgaaaaaaataaaaatccgctattgaaagtctttgtttactctaacggtctattgctgtgtgagttaataaataaaaataatggttatgactgtttcacaaggaaattaaacatgacaagaatgaatgaccttcaaactacattggagaatgtttttctgcatgatggtaatgaatttttaacgggcgtaaatctgcggtattttaagttaagatttttcagtgacaatgctcgaaggcactctgaaatcgtgattggaaattttaatgagccaaaacttctaagattaaaaaacataataattgatgcctttcctgttgtagcgagaaaaatgtaa

SEQ ID NO: 144004 - DNA, 162 bp, Enterobacter cloacae
atgagctgttcaattaaccagcaatggtcatatcttatttccgaattacgttattttgcttttgtgacgccgacgatatatctcaactacttgtttatattgataaataaaaaaatggcaaagccgtccgcggaatatttcccgcagacggttttatcttag

SEQ ID NO: 144005 - DNA, 123 bp, Enterobacter cloacae
atgtgggaggccttgttgttcgtcttcgcattctttatcacacgactaaacgcctcccagtcaggggaaggtaaaaaagaatgcgaagaagaacggcgtaagtttcataaagtcatcctgtga

SEQ ID NO: 144006 - DNA, 297 bp, Enterobacter cloacae
atggacagtaaatcatatacgccgggcagccgggatattctgtacaagaaaatattcctttcaatttccgaaatgaaataccttgaaagggaaataaaaaagttcaactggctagaacgtacttttttaaggaaaaaagagttctataaaatgcaatatcacaaaagcaaatgtgacagcaatttctttagatttatcaacagcggacaggacaaccagaatacgttaattcatatccttgaacaattacctgaaaatcatcctgacagaacatggctgacgggcttcctgatttga

SEQ ID NO: 144007 - DNA, 1191 bp, Enterobacter cloacae
atggtggtggatcgttcttctggccttcccctgtattaccccactctgtttctaacaactcaaatccgcaatagaggggatgctttttcaacgatgttggcggcggctagcaaccttgttatgttgttaagctttgtagagagtcgagacattgaccttgagcagcggtttttgaccaaggacttcttcagaccacatgagctggacgatctgcgagattttgctcagtgcaaacaaggaaagaggccattaatagcgtcctctaccccttggttggcagatgtgatgaccgataccgttgataacgggacacagcattcccggctgacaacgtttgccaactatttacactggtatgcgatgcatatcttaaagacggcagaactggaagttgtcgaacagatcaatgctatggcgcagcaaataaagacgcgccgaccgtctaaaaagcacagaagcagtgagttgcaagacaggtcattgagtgatgttcaattggattcgctatttgaagtcatccagcctggatcggagtcaaatcctttctcaatagatgtgcagcgccggaatcggctgatgatcttgcttctgttttatcttggtattcgaggtggtgaattattgaatatcagaatacaggatgttgattttagtactaacaggatccgtatcgttaggcgagcagatgagcgggttgactctagaaccaatcagcctaatgctaaaaccagagaacggctcttaccgttggctgaatccttagttcaagaactgcatagttatatcattcaagaccgccggaaagtccgaaatgcgaagaaaaatgactacctgtttgtaacttacaagccagggccaactgtgggaaatcctatctccaaagggggataccacaaaattttttctgtggtcaggactgtatcaccgcagttgtatgcagcgacagggcactcgctccgtcacacctggaatcgcaagttttcagaaagaatggatgccatggatgagcaagtcagcgaggaacgccaagaacaactccgttcgtatttaatgggctggagggatggctcaggaaccgcagcgacttacaacaaacgcttcattcggcaaaaaggttttgaggccgctctggcattacaagaaggtagcggcacccgcttgccagaggacatgaagaatgatgacgaataa

SEQ ID NO: 144008 - DNA, 2034 bp, Enterobacter cloacae
atggctgagcttttcctgttcaagccaaaggctacactggcagcagcagaaaaccttgaagcattcatatccaagtgccgagatcaattgactgtattcggttctgatctaaattgggaagatgctgtttggccaaacataactgtgttttccaagttaggtattattacgcgaaagcccatgcagggagaggtacaaaaccctgagttcattgatttcgccaaagcctatttccgttaccagcaggggcatcatcccacggggacaaagaatgaaagtaaggctctccgttcggtcgaagcggctttgcttcaagtaaacgggaacgcaaatattgatggcatatcgatttctgtcctggacgaagcagctgaattggcaaggcagcactactccgatggttcagcatatcattgcggccgtgagattgagcggctggctaagtttttaactgaaaaccagcttgtatcaagtgctatgcaaaattgggtcaatccaattaagcgtgtagaggacaagaacaaaacaggccgagaggcgaagaaaaatagggaagagaaacttccgagtgatattgctcttaatgcgttggcggaaatttttgccaatgacccaattcatgagcgagacatatttacaacatcggtttttgccatgttgatgtcagcaccttcacgcattactgaagtgttagctctgcctgtggattgcgaggtgtgtgaaacggatcgtgaagggatagaacgctatggctggcgttttttctcaggaaaaggctacgagggcgatatcaaatggataccaacggtgatggtctcagttgctaaaacagccatcgccagagcgaaaaagttgtcagaggatgcccgtcagctggccaagtggattgagaaacacccgaataagttttaccgacatgctagctgccccgatatcgctgatgatgagccattgacgatggagcaggcttgtatggcgctaggtttcgcacatgactcaaaaaagacgtgtaggtcgtctcttggtaatcgacgtttagctaaagaagattatgtacatacgttaaacagcctgtggcagcatactatggcgcgtttgcccgttgactttccgtggtttgataaagacaaggaaattaagtacagcaatgccttgtttgcactaaatgctaatcagctccacggaaaccgaggatgcctaccggttgaattacataagccaaccaataacttctgcaacaatgatctggtgcctcgtgaggctctggatggaaaacatgccagcatctttgatcgccatggttatcgtgctgaaaacggagaacgggttaaaatgacctcgcatcaggcacggcacctgctcaacaccattgcccagcgcggcggactgtcaaacctggaaattgccaagtggtcagggcgggccgatgttaagcagaatcgaacttacaaccacatgaccgaatacgagctggttggtatggctgaacgcctagaccccacaaaagcgctatttgggcctgtcggcgaggtggcaaagcatttgcccgtgactatgcaggaattcaatacattagagcattcctcagtccatgtgacggagtatggctactgtgtacatgactacaccatgagcccctgtgagaagttccgagattgcgtcaattgtattgagcaggtttgtatcaagggcgatgatacagaaaaattagatcgaattaaaagacggctggtgaagtcggaacgattgttttcgcttgccgaaacggctgtggcaagcggcgagatgggggctgatcgctggtatcagtaccacaagaaaaccgtcaccagacttcgggagttagtcgctattttagaagagccagatattgaaaatggtgcgcagattaagcttcggggcaatgatttcagtcagcttcggcgtgttgcagaaaagaagtccattgagtccattgagcagaaaggaaaagcaagcgaagaagctgtgatgttagatgatttgacaacttttctaggaggtggttttggctaa

SEQ ID NO: 144009 - DNA, 1692 bp, Enterobacter cloacae
atggacgatgaaaaaaaagaattattaaagatcaaaaaaaatctttttgtctctgcttgcccaggcgcagggaaaactaagtttcttttgggtatgcttggcgataatattaggtgtgactcagggtttaagtggcatatagttcttacacatactaatgctgccgccgatgaaataaatttacgattagataaccaaaacattctaaatgatagagtttggtgtggaacaatacattcatttttactcgagtgggtggtaagaaaatatgcgggggcaatggctagaacaaaagatggagtaaggttaatatctgagcgtgaacatcgtgacttaatacgtaagattgagaaggaaaaattccccagtacaagattaaaatttaaatgggatgaatatggtgatcctcatgttgagccattttgtttattaaatgagcctgaaaaaataattgatgctcaaaaaaacgaggcaatagtgtgtgaggaatatgaaaaaaataagatagatgcaagcctcatagattttaacgacatattaactcttagcctggaatttttgactcaaaacgagaagatcgcagagtatttatcgaaacttataggttatatttacttggatgagtctcaggacactagttatatccagttggaagttctttcatttattacaagatataataaaacaatagttcttgttgtgggtgataatgatcaagctatatatcaagatcttggtgtgtctataaaagatgaagttagtattaagaaaatactcaaactcgatgagttggaggtaaggcaacttacgggatgttacagatctacaaaatcattagtagattactataaaaaatattcttattcgaaatcgaatatagaatctatccgtgaggatttaggtaagtcacctattattagacacacgttgcaaactgatttggccggtagggtgatgaatcttattgaggcatataataagtctaaaggtagtgttgagagtttggctataataggtccgaatagatattacttaaatgatcttatcaatagtatttatgaacgttcaaatgagtttgtatttgatttttattcaaccaatcctttgtatacattgaaagataccatttataatgatcttgttcgtcttgtgttgcttgatgtgtcagttaataattacagagccagacatgcgttatgcatttctataaaagacaaacttcctgaatttgatggtttatcttgtagtgacttgaaaaaagcagtaaagcaattcaatacaaagcgaactgtttttattctttggttaaaagatttttatgagttccttttatctgctttacctcattctccaaaaataaattctgattatttgatctgtcagtccaatctttcagcttttccagtaaaggctgacataatttcaatacgaaaaataataaataaagaggctaacgttgtgaaagtgacaacaatacatggttgtaagggtgaagaatacgattatgtaatatctattggatatcatgatcaagttgttccccattcttcggcggttgaaaagggtgctgaatactcagaaagcatcgcaaaaagattaatgttcgttgcattttcgcgcgctaaaaatcacatgaatatatatatcgatgaccggagagttgttagcccttattttatagctgatacttga

SEQ ID NO: 144010 - DNA, 2127 bp, Enterobacter cloacae
atgtatattaaaaacttatcaatacgtaattttagaaattttcaaagtacgaagttgaactttaagaaggaatgtgtgaatacgatagttggagagaactcatcaggtaaaacaaatgtttttgaggctatgagattaatactagatgattctctcccatattataaaagattccttactgaaagagattttcacagaggatgtttgccggtttttggtcaatggatattaatcagtttggagttaggtgacatttctggagatgaggagtctgaaattttatgtcaattaaatacgacagttgatgcgggtggtacaggtcgagtaacatacatatatcgacctcaattccatattagagagaaactttttaatttatcatctattgcagacttgcaaaaaaggagagaggcatatgataagttgctaaaggaatatattattgataaaacgacctacgaggcctggactgtttatcaaggaacctgtgatttctccgatgaaaatgaatatgtcaggattgctggtgatttttcaaacttcattttcccaaatccttctgtagaatatatagatttattaggaaataggcagcgtggatataatttactagaccatattagttgcacatacgcaagggcgctgagggatgttgttagtgagttaaaaaataatagattcaatccattccaaaaactattggatttcatctctaaagatatttcaaatgatgaagagctcacaagtaatattatagacgtaaataataagatatcaacaatatcagaggttagaaagctttctacaggtattctaacatccattactaatgctgtcggctctacttattcccccttagtaaatatttcatcagaacttcctagtgacgtcaaagatcttgtgaaggttttacagctcaaagcaggagattcgttgagtgatgggtacacggctgatttatccgaaatgagcttgggtggagctaatttaatatatcttgctcttaaattgtatgagtatgaagaaggggtgagtaagaatctattgtcaaacttcctgatcatagaagaacctgaatcgcatattcatactcatattcaaaaaacacttttcagtaatttaaaaaacaaaaaaactcaagtttttatttccacgcattcaacacacatctcatcagtctctaatatatcatcaactaatgttttggtgaaaaaacttggatacactcaagcttgttctccttcctcaggcctcgatgaaccaacgatcaataagatagagcgttttcttgatgcgatacgtacagatattttatttgctaaaaatgtgatattaattgagggggatgcagaggaaattctaatacctcatttagtaaaaaactctttcggtgtaacactggatgagttaggagtatctcttatttctgtgagaggaaccgggtttgaattactctcatcgctttttcatccatcgagaataactaaaaaatgcgcaatactcacggatgatgatattaatatctataacgaagataaaccggagtacatcactcaggtaatgtatgatgatgccatttcctcagaaaaatcagggaaagagagagttgaggcgttaaagttattaactgcaaataataatcttctcaaagcatattttacaaaacatacctttgaaattgatttagctctaagcggttcaaaaaaatattttgagataatagcacgagaatcgttcgaaaaagatttttatttaactccttacttagatgctttccaatcttctgacgatacgaaaattggttcctttgctttaaaattggcaaataaacataagaaaggttggtttgcaatgaaagttgttgagaaacttgaccacaatttccctatccctatggctttgtgtaaagcacttggatttaccagcgattttaataagttaactctcgcaagagtgattaaatataggtgtgattattacactaaaactttaggtgataatataatcgaagtggctttctcagatgatagccttgaatatattgttgacaatatagaaccagttttggatattttcaaaggacactatagcaatgatcctttagtgcatcttttaatggaggcgtaa

SEQ ID NO: 144011 - DNA, 426 bp, Enterobacter cloacae
atgtacatgcctcctccgaatagcgaggatgtggctaagattcgcctcattggcccgccgatgagttatggcatctatcagtatgataaaacaggtaaagaaattggtggatgggtacttaagcacaatcgttatctgaaccctttccttgggtcgacaaaagatattggtctccctaaagtgacgggcaagaaatatgataaagactattttgaaacgctgattgtgccagacgaaaaaacgactgttcagcacgctttataccagggatgtaatgtctcgctcacctttacgccagaaaagaaaaagatttacgaagggcatattagctatagcgataaaacgggatattgcgtgctttatatgaaagaagtcgcgctggataccgtcaatggtatttatattgaaaaggattttgtacagtga

SEQ ID NO: 144012 - DNA, 348 bp, Enterobacter cloacae
gtgagaaccatgaatgtcttaggcgtggcgctagtctgtctcctgagcacctcttgtgcatcaaactacgatggaactaaggcaacaagcctggcgcagtattctgaaaaagagataaagcagaagctgatcccggaggtcacgacccgcaaagatgtactgattgcttttggcgtgcctgccaatacggctgactacaataatacgcgccactgggaatatacgtcgcagatcctcgaccgtcgtatctatctcatcattccacttaatctggaccgcaagcagcagctgtccgttgatttttctgacaaaggaattctgacttcatacaactacatcgaaaaataa

SEQ ID NO: 144013 - DNA, 609 bp, Enterobacter cloacae
atgagtgaaaggctattacccgttgggtcatcaccgctggaagtcgccgctgccgcagcgctctcgaatattgaacgagtgccggtaccgctacgcaccttatggaaccccagcgcgtgcccggtgaatttacttccctacctggcatgggcgctgtcggtagaccgttgggatgaggcgtggccggagagcacaaagcgcagcgtcattatgtcctcgtttttcgtccatcagcacaaaggaaccatcagcgcattgcgtcgtgtggtggaaccgcttggtttcttgattgaggtgcgcgagtggtggcagctcggtgaggagccaggcacgttccgtctggttgtcggtgtgcttgataacggcatcactgacgaaatgtatcaggagcttgaacggctcattgaggatgccaaaccggcaagtagacacatgaccgggctggctatcagcctgagctcaacgggagagttttatgttggcgcaggatgctatcacggcgatgcgctggctgtttacccctataccaccgaggaacttattgtcggtggtgattattacccggcctcggccatccatttgattgataacctgagagtgaacgcatga

SEQ ID NO: 144014 - DNA, 297 bp, Enterobacter cloacae
atggctactatcagtaacctcgggataggttctgcaggactcggggatttatataatcagttggaagcggcagagaaaacgaagctgacgacgattacttcccagcaatcaacgtataacgcacagttaagcgcttacggcaaactgcagagcgccatgacatcgctgcagactgccaccgctgcactgggtaaagcaaccacctggaactcaacgtccgttagcagcaccaacacggcctttaccgccacgacaacggctgacgcgtccgtgggggtgatgctgccaacttactga

SEQ ID NO: 144015 - DNA, 315 bp, Enterobacter cloacae
atgagtctgttgaaaacagagctggtactcccatttgaagatgaatactctgcaatgagtttctgggatgaagtcggggtgacattaatatatgtcgagcccgatgatgtacctgaagatattaaagcgcaggtattaaatgtgattcatcagttaatttcaaatccagaatttgtagtccgtctgacagatgactattacctgatgctttctgttacggaagataacgggaacggtatttatctgttatttcaccccgattgccctctgaagggtattgatttattaatttctatggccgaatcacgctattaa

SEQ ID NO: 144016 - DNA, 534 bp, Enterobacter cloacae
atgagtaaatcaaaattagttaaaaataatgttgagtcagtttcgaaggagattaaaaatgaggcagaggttattcatgaaaatctcagtgcagatgaacaaacattatctgatgtaaaagactatcagttgctcattgaaacaggccaggcagaaaaaatcagtcctaaggcaagtggtatgctgacatggcaactggcgatatcagaggtggacaatgaactttatcttcgtctggtggcaaatggctgtggagggttgttctctaaggactggatctcactttcaaagattgcaactgttctggaaacacaacctgctaccggcttctcatccggagtattcaggccgctattcaaaggggcaagcgccaacaatgcaggttttctggctgctgttttacgctccccggatatatgtctgctggaggcacatccagagaagttatttactcatgtattatacccggactggagggagcggttgaataaacttaatacgatcagtagccaggaaaagattacagaggattaa

SEQ ID NO: 144017 - DNA, 990 bp, Enterobacter cloacae
atgaaactcgcggtatatagcacaaagcagtacgacaaaaagtatctgcaacatgttaacgaggcttacgggtttgagcttgaatttttcgactttctgctgtccgaaaaaaccgctaaaacggcgcacggctgtgaaggcgtctgtatttttgttaacgacgacggcagtcgtccggtactggaagagttgaaaaaacagggcgtgaagtatatcgccctgcgctgcgcgggctttaataacgtggatctcgacgcggccaaagagctgggtcttagggtggtacgcgtcccggcgtactccccggaagcggtcgcggaacatgcgattggcatgatgatgtcgctcaaccgtcgtattcaccgcgcttatcagcgtacccgtgacgccaacttctcgctggaggggctgaccggctttaccatgtacggcaaaaccgcgggcgtgatcggcaccggtaaaatcggcatcgccgccctgcgcattctgaaaggcttcggcatgcgtctgctggcgttcgatccgtacccgagcgccgctgcgctggagctgggcgtggaatacgtcgacctgccgaccctgttctcccagtctgacgtgatctccctgcactgcccgctgacgccggaaaactaccacctgcttaaccaggcggcgtttgaccagatgaaagatggcgtgatgatcatcaacaccagccgcggcgggctggttgactctcaggccgctatcgaagcgctgaaaacccaaaaaattggcgcgctggggatggatgtgtacgagaacgaacgcgatctgttctttgaggacaagtcgaatgatgtgatccaggacgacgtgttccgccgcctgtctgcctgtcacaacgtgctgtttacaggacaccaggcgtttctgactgccgaagcgctgatcagcatttcagaaaccacgctgggtaacctgcagcagctggaaaagggcgaagcgtgccctaacgaactggcataa

SEQ ID NO: 144018 - DNA, 456 bp, Enterobacter cloacae
atgatgaacaacattgatgttgcgctgttgaagacgatcccggaagtctgcccggggtttcaggcgcgcgctgtcgcaagggctattacgcgctattacaatgcctgcttcagaccgtttgagctgaccgccgagcagttcagccttttggttggcatcgggggttccccaaatgaaaccgttgcggaactcgccgccagagcgggggtggatgcgaccacgctgagtcgaaatatccgcagtctggaatcgcgcggcattatcgattcggctggaggccgtggacgtgcagggaaacgactcacgctgacagctgagggctggcgtctgctcgaggagctcatcccggtctggcaatccgctaaggagaaattatctcatcttatgggcagcgagcagctcggcctgacgacggagatgatgaaacgcctggctaaaatcagcacagctttatga

SEQ ID NO: 144019 - DNA, 1023 bp, Enterobacter cloacae
atgcttctcctcggcaacaccagccagcaagaccagattgaggaggtgtgtcgtcgcatcgtgcaagaacttaaccgtcctttcgccattgagggcaatgatgtggcgataggcgtaagcatgggcattgcgctggctccccgggatagcagcagcgcaaacgatcttctacgctacgcggatattgcgctgtatcaggcgaaacaatccggcagaaaccgatgggtctattatcgcccggatatgtcggaaaagttgaccgaacgcaggaaactggaattagaactcaagaccgcaattcgcgaagaacagctctacctggtttaccagccgcgttataacctccggtattctactattgatgccgtcgaagcgctggtacgctggcagcacccggctcgggggaccataatgcccgatcagtttatcccgctggcagaagaaaccgggctgattattagcctgagcaactgggtcatacgcaaagcctgtgcggagacgaaagataaattgccgggattatcggtctccgtcaatatttctgctatcgaattccaggcaagcgatcttgccgaaaggataaaagagatccttcgcgaaacagggcttgaacccaaccggctggaaattgaagtcactgaaaacgttacgctttccgatcctgaaaaaaccttgcagaccatgaagtctctcaaaaaaatgggcgtccgcattctgattgacgatttcggtaccggctacgcctcactgagctatctgcggaagtttcagtttgacgggcttaagctcgacaagagctttatttttaccctcggtgactcgccgcagaaccagtcagtcgtggagaaaattatcggcctggggaaagcctattccatggcggtaaccgcagaaggggtggagaccgcggaacagctgtcttttctgaaaaaaaataaatgtgatgaagtccagggctacttgcttggaaaaccggccgccattacggacttaaatttaaacgccaacagagtaaatatctaa

SEQ ID NO: 144020 - DNA, 519 bp, Enterobacter cloacae
atgaaaattacactgactcctcaacagaaactgcaactcgaacaaatgcacgatattgaacgtgatagtcgagtttgcgaccgtattaaggctgttttgctggcttctgaaggctggagtcagaccatgatttctattgatgattatgagagcattaacagtgaaacgatagttcgctttttctgtaagttaagagagagttatccgttagctcataagcttcatatcattttagatggtgcgggatatcaccgtagtgacttggtcagagatgcggcatttgtccttaatatcgagctgcattatcttccaccttacagcccaaacctcaatccaatagagcggctttggaaagtaatgaatgagaagtcgaggaacaacgtttacttcaaaagtaaacgggacttcaaggcggcaatagaccaattttttactgtgactcttccagagatcgcaggctctttggcatctcgaattaatgataattttcaggttctcaagcctgcatcttcaagttga

SEQ ID NO: 144021 - DNA, 429 bp, Enterobacter cloacae
atgcgaagtctcctgactaaaggaatttgtcttgcgttagcgctatccgccaccgtgacggctcaggccgctcagaaagagagccatgacgacaagctcaccgggataaccattttcgctcaaaaagagtctcagggaagccaatgggacagtacaacgggcgaagcaaaatatatggttagctataaggttacgctggataacgcgtcgggtaaaagtattgagccgggcaaagataataagatttgtttcttcctgtttgataaaaagggaaaaacatttatgagcaccggcattgaacttgagatgttgaaaaaatataaaccgcgggacaaaagaacaggattggtctatttttccagctcaaaccctgacgttttaaatatgccatttgtccgtttcggcatcgggaaagactgcataaattga

SEQ ID NO: 144022 - DNA, 948 bp, Enterobacter cloacae
atgccccaccacaaaaaaggtgtccgtaataattgctttcatcaaaattatactcatgacgtattgtttcccggtgcaacattcagaacccgacataatggagaatgcgccattcttggtcgctctgatgataaatcaaggcgaggctattatgtcgtggaattcaaagacagtggcatcatcaaggaagcctatggctcgcatattaaaactggttctgtatcagacgaagcttttccatcatcggaggaagaacgacgaaagttactgatgacaccaaaatattacggcgtcggatatattggcaatggatgtcattcaaccattgaaaacacccgaacacaccaaagaacgagagcattcatactctggcataacatgctggcaaggtgctacatgacaaccaaaggaaagcagtattttaaaggctacaaaggtgtcactgtatgcgagcgatggcataactttcagaacttctgcaatgaccttccaaaattacatggctacaacaaatggaaggataatccgggagagtatgagctcgataaggattactcacatcgccgaatttattctgctgacacggtggcatttatcagcacagaagaaaatgccagggaagctggattacgacgcgttgccatgaagattccttccgggtattatcatgaaataaataaaattcgagatgagatattaacggaggctgaagatgaattaaaaaacaatcaaattaattatgaagttgttcttaacgggaatatgaaagcaatcctgtctgaaaccccttatggcacagtgttgttctggcctctcacgaaaaagattcagcgtaattgctacatgattgatggtgatgtacaggtttatgttcattacctgcgctggctcatacttcagtgggaaaacagaaatcccgacataaactgtgttgccacaacctgttga

SEQ ID NO: 144023 - DNA, 360 bp, Enterobacter cloacae
atgaattcttcatttttaacaaaatacctgtcaaagttgacgctcaccattaacataattctgaccgtgatgacatggttctatctaatcggaactgacaacccgatatggtattcgataattcagagttatgttttcatcagtttcgatacggcgaaaatcatcatcactgttatctgtattgtctggatagtcagaagcattacggactatgaactgaaaacggtgttatttactcaggctgatattcaaaaggaaattcttaaagagttgcgggcattaagaaacagcaaggaaatgcataatgcggatacagcgggagataacttcaggatagactttgacaaagtagattactga

SEQ ID NO: 144024 - DNA, 939 bp, Enterobacter cloacae
atgaaacgattaatactgttatctgttatggttgcgacgctcccgccttacgctatatccgctgaagatatttcccccgaatctctttcgggaaagcccagttctgagttgggtgattttgtttattcagcaatgccggatgctggtcacggcttgtcgtgggactggcagtcaaactcagatattgtttgggctgacggtgttacgcaaacagcttccggaatgtcactccgcactggatttgctcgcatcaatgttatgggcgttaaatcaacagtgctggagaaaaggaaaaaagaattaggctgggaggtttcccttggaacgtcaatgccagccaagttcggccctgaatatatatcaatggcaccatcaaaatgtggtggatatctgaatgagaattgtacattcaatcctgcctcatcactcacgaagagaggcattgagcttcataaaatctgctcaaccatagcgggtggcccgaatactacggatgtgtacgtcgtcagggtagtcaaaaaagaaagcatgttaatgacatgggtgaatagcgccggttcgagtgcaagctcaagctggctggaactgagaatgtactcacctgaaagtgcagcattatattgtgatgaaactgtaaagaaagaatactcattcgccactcaggatggacgaagcaagaaggaattggtgcatgacactaaaataattacggatgcattatcaaaagccatttccggaatcgatggtgctaatgatgcggtgtgtcatgccaggatattcgcagacggttatggtggcatatctgcatttgatgcaagtcagaaagataatgacattgcattctgcgaatccatcattaataggttgagtggcattcggctcccctcaccttcgaaaaatgcatcaacaataattaatcttgacgtgaaaaaccaataa

SEQ ID NO: 144025 - DNA, 2202 bp, Enterobacter cloacae
gtggctgttctaacgatcaggggcgtcagaagttacagtgcagacaaagatgtgcgtatcgacctgagcaacaaggttacgctcatctatggccagaatggttctggaaaatcaacgatatcaaactatttttctggctattatccggaaaagtaccgcaagtgccgttttgaaagtcaggaagatttatttccgcttgtctttaatcaggattatatcgaaagaaaatttagccttgagaacgttcagccgggcattttcacacttagcgagcacaataaagatattcaggaacaggttgatagtaatagaaacaaaatagcacgaacagatacaaagataggcgaacttaacactgaaatcgccgggcgggcggaaatggagttgaccctgataaataactgcgctgccagaatgtttaaaaggacatccgctgaccggactcgattctcgtcttttcttacgggagcgaagcagcagagaaatttttatgatcgaataaaagatattccccttgcagtcaatcaactggacgcggatgaactttctgttcgttttgaaaacctgcagaatagcaaaggtacaaatttaccttatatcagctttagcctcccgccagagctcaaccctgatgtgatccggctaatttattcaccgcttcagcccgcgtcagggacacaatttgccgaattcattgcgaatctgggaaatgccgactgggtcagagaggggaggagctttattcgtgacgatgtctgccctttctgtcagaacacgtttgatacagcccattttgccgaagaaatggcgaggatgtatgacaaaagctacaccgacgcgatcgatgtaataaacaaggcggcagaagaattagcggacaatattgactatctcaatgacctgtccgagagagttttcagacatcccgctgtaagcgaaggtgatgaggttttcagctcactcaagttacttattcagataagtcagacaaactatcagaccatcctcaacaaactcgagagaccttctgagatgtacgatatggctgatatttctgaagcgcgcaataccctcatcagcaatatagaaaagataaataataccgtttctgcgaacaaccagctggccgataactacgatgcagaaatggcgagattaaaggctgatgtcgacacgtatctgcgccagatttgcgacgagtatcttgtggcactgacggctgaacttcatgaggtcagggctcagaaaacaaaagccgagcaacaggcctcagctcttttgactgaaagaaggcagctcggggagcaaacgtctcggcttgtagggcaactttcagtcattcaacctaccatcgactccatcaataataatctcaaagcgttgggcgtaactgacttccacatatgctgccatgacgaggagatgaagctttaccggcttaggcgtgcaagcgacccaggggaaagagaagtattcagaacgctgagtgagggtgaaaaaactcttattgcgctgctctattttatcgaatcctgcaccggcaatgttacgccctatgccgtccacgatggccggaagataatagtaattgatgatccgatatccagcctctcacataattacatttatgaagtagcctcgctgataaaacgaaaaattattaaacctgagacagcccgccatctggtaatcctcactcacaacctgttttttttccaggaaattttgctgacgtccgtgaggaggctggagagtaaactcgatgcccctaaaggctggtcactgctgcgtattgtcaagaatgatcacagcgactgtatccctttatccatgcacgaaatgcttaacgagtatcaggctctgtggcagacactcaaggacgtgcgggacaacaagagtcagcttattgtgctgcctaatacgatgaggaatattcttgaatactatttcagctttgcctgcaaagaggagaaactggaaaaaacgcttgcagctctggcttctgaccacgccgaaggccgttatgattcattctatcgggccataaacagacattctcattcagatggcagaaatattctttctacaggcattatggataaaagcgaatatttcaggcttttcagaaagatttttgaagaaatggacgaactgagacattactgctcaatgatggatgaaaagcaagaggaagctatttag

SEQ ID NO: 144026 - DNA, 381 bp, Enterobacter cloacae
atgctacatgatgagcaagaattgttagattacctcactgagaattacagtgaccgtaaatctccggcaaagaaagaatggaccttccaggagcatttcaatctcatacctgaagatcttgaggacatgctgcttgaccttttcatccggtacggaattgagtacagcaactttgtgatggaccattattttgaaccggagctgttttggtttcagtttcggctcagaaaaaaattccgcgatcggcagtacaaaccgctatctaccggcggatgtaaggtggcagaaaatgagcgggtggcggttggattttgggggagaggaaacgcgtattataatgaaaaacgaatggtatcttctgctcttcaaccccgtttatga

SEQ ID NO: 144027 - DNA, 198 bp, Enterobacter cloacae
atgcagaatagcctgagtaagatgaagtccgacatccgcaaagtcgatgagctaactcagaaggttttacagcttgagagaaagaattctgagcaggagagtaagatcgagcgattgcaaagaagccttgatgacatgaagcggagcaacgacaacctttcaaatcaggtcagcaatttatccggcaaaattaagtga

SEQ ID NO: 144028 - DNA, 918 bp, Enterobacter cloacae
gtgaacaaaataaaagctgactcagattttcttgttagtcataaaattaaaacattgattggtatgactttgttcgtacttaaggcaagccctaatgttccgtttaccgccaggcagttggcaatcaaagtttgcgaaagctttcctgaatacgcagaaaagaaacttgcttcatcagaacatctttcgagtgttgaagacctaatctcccaggtagcggcagagataggcgcccaaagaccttcgctggttaagagaaatgctcatattaatgtgacggcaggaaaacctagaaagtatctttggtcagatgatgaggcaaagggcatacaattaaataaagatatctttgtcacggatgatgctgacgtttctgatccccatggcgaattttattctgagcatgaattatatcctcttctaagcgagtatgcttcgagttcattaaacgtgcttgttcgtcgtgtagatgaaaagaaatccaaaaagggagccttcaagagtaataagtgggtacatccagatgttataggggtccaggatattggtcataattggtcgtccttgactaaggatgcggtttcaattcttggtggtaaacgtgcctttctttggtcttttgaagtaaaaaaatctttagttatttcgaacgttagagaggcatactttcagaccgtttctaactcatcatggtctcactatggttatcttgtagctgcaagcattgagaataactgtattgatgagttaactgttctgaatgcggcacatggtattggcgttatcctcctcgatgtacataatccgtctgaaagtcagattcttcttcaagcaaaagaaaaaataagtttagattggcaaactattaatcgccttattgaattgaattcagactttaaagaatatattgggagatag

SEQ ID NO: 144029 - DNA, 861 bp, Enterobacter cloacae
atggctgttgtttcggagctggagcagcgcttccctgaccctgccagtatcgacagtgaaaaagagaaaaaagccttcgtcaaactgtttggtgaatatctgcgggcagaaaacatcctgcaaaactatgatgaatttgccacgctgaaagccctgcagaaggttgatattagtgacccggaagcggtagaaacctttaaagcagagcactatgtggatgatgaaaaatttgctgaattacaaaccattcgtctcccggcagaacgtaaagttcaggactatcgctcagcatacaatgatatccgggactggcagcgacgcgaaaaagcatcaaacgacagggataaatcaaccacagactgggatgacgtggtgtttgaaattgacctgctgaagtcgcaggaaattaacctggattacatccttggtctgattttcgaccacaatcgtcagaaaaaaggtaaagaagccctgactgaagaggtcagacgcttaatccggtcaagtctgggcaaccgtgccaaagaaggtctgattgttgactttattcagcaaactaaccttgatgacatgccggacaaggccagtatcattgatgcattctttacctatgctcagcgtgaacagcagcgggaagcggaagcgttgattaaggaagaaaacctcaatgaagaggctgcaaggcgttacatccgcacatcactcaaacgggagtatgctaccgaaaatggcactgagctaaatgagacgctaccaaagctcagtccgctgaatcctcagtacaaaacgaaaaagcagactgtattccagaaaattggggcgtttatcgaaaaatttaaaggggttggaggacacctctag

SEQ ID NO: 144030 - DNA, 591 bp, Enterobacter cloacae
atgaaaccgttacgctatgcagctgctgtagagaacgctctacgtaaaaaattgggcgccgacacgggctattcggggctaatttgcaagaatccgaaccacagtcactggaaaattgccgtctggcagcctgagctctacacgctggactggttagctgactcactcgacctgaacgccgcgaacgacaaagaaattgtcgctgattatggcttaggccgtaactgcaccctgttcgacaaaacccgcaagtgggcatatcgtgccatccgtcagggctggcctgagttcgaccagtggctgcaagcctgttacgaacgtgccagcgcctataatctgcaatttgcagctcctttagatgaaaatgaggttaaatggatttcgaaaagtgttgccagatggactcatagaaaaatcacaaaggaatcattttctgattatgtgtccagaacacatacgtcagaactacaatctttcagagggagaaaaagccatggcggggggcggaataaaaatcctcactcagaaagagaaattaagccatgggatctgttagggataagcagggctacttactacaggcgtaagtag

SEQ ID NO: 144031 - DNA, 966 bp, Enterobacter cloacae
atgtggtggagtaagattcagattggcatcgaccttgcgacaagtgtaactatctttgcggcagccttaacctggtggatgaacaaggtgagggagaggagagtgggcgttattgacagtgctcgatccacaataatagaaaatatcaacaatgcgacaaatgaaatggcattatcttttaatgattttgccacattcacaacatcgatcgagcgaaaaataaacaccaaattacgatttggagaagataaattcattgatgaaatagcatcagggagaatagatgtggttgaaatacacacacttttctcaaaaagcgtagacacaatgggagtgttttatgaaaggggggcaacattaagatatacaatcttcccatcattatactcaattgggggggaagatgaggcggtatctattctaaaaaaagaaataaatgatgtcttagtcgcgtataataaaagtcaatccgggtatattgcatacataaaagagataacatccatatgtgaaaaaataaaaaaaataaaagccagcgatccaagcgcagacttggtgtcgatcattcaagacgaatacattggatctatatttagtattgttgacgatcctgactatggcatctttttacaagatttcttagatgatggtgatgatgatttgtttttattatcattacataaaaaatcggaagaaatgaccgacaaagaaaaagaattaagattgaacgtggcgaaattcttaatatatatgattgcaaacaaacctgaatctttgatatctcaattcctgcaaaggctggcttttcgaatgcaagaaaaccgagtgcaatgtaaggagtttcttgtaacactaagtgctatctcaagtaaaatgcagcaacgttccagtgacttctccataaaaaaagcatatgacgtgttaagttctgaaaaatatttcaacacaaaagaagaaataagataa

SEQ ID NO: 144032 - DNA, 327 bp, Enterobacter cloacae
atggaaaagcgaacgaaagagatcaaaatccgtatgaccgagactgagcatcagcgtctgcttgaacggtgcgaccgtcttcaccttgcagagtggttgcgtcagcttggtctgggagaacagacatcacgtaaacggcctgttcctgaggttgcgcccgaactgcttcgacagatcagtggtatgggcaataacctgaaccagatcgctcgtcgactgaatcagtccgattccctgacgccttctgagcgtgtctcactgctttccctcctgaacagcctcgaccgtcagctaggggagttactggagcagcaccgtgatcgttaa

SEQ ID NO: 144033 - DNA, 486 bp, Enterobacter cloacae
atgagcgagattttaaatttggcgaagggcttcgaggagaaatcgaagcagcaggcgcaggataccgcgcagagcgtgaagcgcgagttcgagaagctggaaacgtctatctgcgaggacttgaaatcaagctcgcagagcatcagcaccgctatccgcgaacagaacgaccaactgacgggcatagtcagatattccctcctgagcgcactgggctggatattcctgttcgccgcgctgctgatcatgatactgggcgggataatctggtatcagggaacggtcatcacttcccgcctggacgaaatggacagctacagccagcaactggagagcctgaaagcccagagcggcgcgggggtagcgatttacaaggacgaaaagcagaagaacacctacatggtggtactgccgaagaaagcgcatggcacagagacatacacatcgacatccggaaacaccgtgttgaagtacaccgcgaaataa

SEQ ID NO: 144034 - DNA, 237 bp, Enterobacter cloacae
atgaccgaaatggaaaggcagcttctgagcgccttagaaagcttacagacaagctacgaacaacagcagcaggcgtggcaggacagttacagcaacttgcaacgcatgttcgagactacctcacaggcgctggagcgcaacgacagggtatgtctgaacttgagcaatcagctgaacggtttgtacgagcaggtcgaacgcttgagcagcgatctgagccgattaacacgctcgtaa

SEQ ID NO: 144035 - DNA, 333 bp, Enterobacter cloacae
gtgagtcacgcgattgagtttatcgagacaacgatgtttacccgtcagataaagcaaatcgccacggatgatgaactcaaagagctccagaaagagcttatcgagtcaccggacaaaggtgacctcatccagaaaacgggcggtctgcgaaagatcaggatggcgacggggaatcagggaaaaagcggcagtgcgcgggtgatttacttccttgccaccgctgaagtgatttatctggtgatggcctaccctaaaagcaccaaagacagcatcacagacgcagagaaagccgaactgaagaagctgacccaacgactgaaagacgaggtgtaa

SEQ ID NO: 144036 - DNA, 285 bp, Enterobacter cloacae
atgagtttttttgacgagctgaaagcctctctggaagaggccgttgaaatcaaaaacggaaccaaagcccccgcccgtgtgacccgctacgagctggcagacgtcagggctatcagggaaaacctgaatattactcagagcgaaatggcgaaagtgctgggaaccagcctcgacaccatcaagagctgggaaaccggacgccgtaacccgaccggactggccgcaaaagtgctggccaccattcaggctaacccgaaattctttcatgaactggcggcgcattaa

SEQ ID NO: 144037 - DNA, 423 bp, Enterobacter cloacae
atggccagagtgtctattagtgaagcggcacggcttgttaaggttagtcgccccacaatttacaagatgattaacagtgggaagttaagttacacctctgttgtaaagcacggtaaggctattaaagttattgatacttcagagcttattagagtgtttggttctcttgatggtgtcatcgatactgtaaaatatgatgtaaaaagtgacgcagaatctacaggtgttaacagcgttggtttacatgatttacaacatagaatcgctttacttgaagctgaaaacgatggtcttaaaggggctgttaaggctcgagatgagcatattgattcccttcgtcaggctatgcagcttctggagcacaagcacgaaccttcttcaccaccccattccccgtggtggaaattctggaaaaaatcctga

SEQ ID NO: 144038 - DNA, 1245 bp, Enterobacter cloacae
atgagcatgttggcggtgtcatccgcgaaagacgacataaacttggctaacgtggtttcagtgagtgatgttcggatactgaaatctgctctgatatttggggctaacgctagcgggaagtctaatctcatgaaaacaatttctttaatgaaagatattgttttgcattccgtgcaagctattgaaagtagcattacaaagaacgtaataccgtttttgcttgatgaggatggaccaaataaaccatctgaaatggaaatgacttttatttcagatggggttaaatatagatatggattgtctatttttcaggggaaaataaaagaagaatggttgtactacacaccaaaatcaagagaaacaattctctttgaaagagatggtctttctattgaggtaaataaggcggcttttagtgagtcaaacctttttatcaaagaagggattattcaaaaaacaagggaggatgttccatttgtttcggttgttgctggttttaatggtgagcattcaaaacgagtagttaattggtttaacaatatcgtattcctttctggttctaatgaagggatgtttacagcaattaccatgaagttaataaatgagtctgaggattttaaggcttggctaaaaaaaatacttccagcattccagattaatgatatttacctcgatgaggtcgcacctgattttccatttggaaatataaaaacagatgatgataatttaaaaaatttatttagttcaatacaaaattttgcaaaaaaccagaaggttttttctcttagagtagtgaaaaaaacagctagcggtgagatttcagtacctattgattttgagtctgagggtactaaaaagatagtttatcttcttggtccaatctacaatgccatgataaacggtaacttattgttagttgatgagtttgattctaagtttcacacccttttgtctaagtttttgtttagaatattccatgcgcaaagcgaggggcttagccaaataatagctgctgttcaggatgttaatctaatgaacactgattgttttagacgtgaccagatttggtttgttgataaagatataaaatcaggaagtagtcatctctattctttggttgagtataaagagaagcagcgaactttaaaatcatcgtatgggcatgattatttatctggtgcatttgatgctatcccattgtttgataatttagatgaatttgaaaaacttatgcctgagggatga

SEQ ID NO: 144039 - DNA, 123 bp, Enterobacter cloacae
atgcagacagacgagtctcaggcatacatttttcgcccttatatcacagtaaagggcaaacggatcacccgtccaaacggtgggatgttcaaaattccaattaatcgtgaaaagaagaagtaa

SEQ ID NO: 144040 - DNA, 2568 bp, Enterobacter cloacae
gtgatcgcccttgccgataccgccgccgagcatctcgcgcgccagcgcagtttccagctcgctgcggatcaggcgcttgagttcacgcgcaccgaactcgggcttgtagccttcttccgcgaaatggtcgatcagcgtctgatcgaaagtgagcgtcacgccctggctggcggcgctgcgcgccacgcgatcgagctgcaggccgacgatgtggcggatctcctccttgcccagcgcatggaagacgatgatctcgtcgatgcggttgaggaactcgggccggaagtggccgcgcagcacgtccatgactccggccttggtcttttcgtactcctcgccggccgccccgcgcgccttcagccgtcgctggatgatgtccgaacccaggttggacgtggcgatgatgatggtgttggtgaaatccaccacccggcccttgccgtcggtgaggcgaccgtcgtcgaacacttgcagcaggatgttgtatacgtcagggtgtgccttctcgatctcgtcgagcagcagcacgctgtagggcttgcgccgcaccttctcggtgagctgaccgccttcgtcgtaaccgacatagcccggaggcgcgcccaccaatcgcgccacggtatggcgttcgccatattccgacatgtcgatgcgcaacagggcgtgctcatcgccgtagatcgattcggccaatgccttggcgagctcggtcttgcccaccccggtcgggcccagaaacaggaaggtagccaccggtttgctgccttcacgcaggccggcgcgggacagccgcacggcatcggccacggcacggaccgcctcgtcttgtcccaccaggcgctcgtgcagccgttgttccaagtgcagcagcttttcgcgctcttccaccgtcaactcgttgaccgggatgccggtcaggcgcgagacgatctgcgccacgtgttccgccttgacctcggcactgccggaggcccgctcccgctcccagttctcgacgagcttcttgagctcggcctccttggcttcgatgcgcttcccgagctcggcggcctggtcgtactgcttgcgcgcggccacgtaatcctgttcacgccgcagctggtgcagttcggactccagctcctgcacggccaccggccgggccgtggccgacagcttcacgcgcgcggccgcctggtcgagcaagtcgatcgccttgtccggcaggaagcgcgccgtgatgtagcggtcggacaactcggccgccgcgatgatcgcgtcctcggagatgctgaccttgtggtgcgcctcgaaggtgtcgcgcaggccgcgcagaatcatgatggtctgggccaccgtcggctcgggcaccgtcaccggctggaagcgccgctccagtgcggcatccttctcgatgtatttctggtactcgttcagcgtcgtggcgccgatcaggttgagttcaccgcgcgccatcatcggtttgaacacgttggccacgtccagcccgccttcgccaccgccctggccggcaccgacgatggtgtgcacctcgtcgatgaacaaaatcagctcgccctggtgctcggtcacctccttcagcaccttctgcacgcgctcctcgaactcgccgcgatatttggcgccggccaccatggcgttgatgttgagttccaccaggcgcttgtcgcgcaaggtctcgggcacttcacccgccaccatgcgctgcgccagcccttcgacgatggcggtcttgcccacacccggctcgccgatcagcaccgggttgttcttcttgcgccgggccagcacctcgatggtggtttcgatctcctgcgcgcggccgatcaccgggtcgagcttgccgtcgcgcgccatcttggtcaggtcgcgcgagtacttgtcgagttctggcgtgttggtcggcgtctcagcgcggccatcctcggcgcccttgccgaccaccttgctgacctgttggcgcagcgcctgcggcgtcaggccgtagcggcgcagcaggttggcggccagcccttcgccttcctcagccagaccgatcaggaaatgctctggaccgacataagaatggccgagttcattggaggccacgaaggcgcggctgagcgcatccttcacgcgcggcgacacgccgatctcgccctcgaagggcttgtccccgcgcttggcctcagactcgatctgccgcttgaggtcatcgaccttgatcttgaactgacccaggatggtcttgaccacgtcgctgtcggccagcgccagcagcagatgttcggtatccacctcggagcggccaaattcggcagcgtgtttggcggcctcctgcagcaaggcttccgactgttcgctgatgcggctggccagcccactgccgcgacggcgcggcgcacccgaacctgcggcggcgggctcgccaaacgaggcatcgaccacgtcatcggtatcggcggcaactggcgtcgcgtcgtcgccgatgcggaagaagtcactgccgaggaagtcctcgaacaggccgctgcgcgaaccgaacaaggcttccagcggcgaaacggtgcgcttttgctggcgcactaa

SEQ ID NO: 144041 - DNA, 570 bp, Enterobacter cloacae
atggacatcgatttcaagaagttggctccctggaactggttcaagaacgagcagcaagagcagcagaccgtctcttccctgccggtgcagcgcaatgacctgccagcggcgagcgggccagtcagcccgatcctgcaactgcatcgggaaatcgaccggctgttcgatgacgcattccggggcttcggttttccggcgttgaacatgccgcagtggccatccgattggtcgggcatgctgaagccggccctggacatccaggaaaccgacaagcagtacaagattgccctggaagtgcccggtgtcgaggagaaggacatccagatcactctcgacaacgacgtgctgatggtgcgtggcgagaagcgccaggaacaggagaagaaggaaggtggcttccaccgtgtggagcgctcctacggcagctttcagcgtgccttgaacctgcctgacgacgccaaccaggattcgatcaaggcatcgttcaagaacggggtgctcacggtcacgatcgacaagcgcgaggtcagcgcgccgaagcagggacgctcgatcccgatcaacggctga

SEQ ID NO: 144042 - DNA, 177 bp, Enterobacter cloacae
gtgatcctgatcgggctgatcgccctggcgcgtaaattcgtaatcctcgacccggagaccggccccgccaaggtcgcggcgcttgcaggcgcgacactggccctcggggcgacttactggctgctgcgcgagcgcgatgaccggacagccggggaaagctcagatgatcagtcgtga

SEQ ID NO: 144043 - DNA, 816 bp, Enterobacter cloacae
ttgcttcaaacaaatgatgactatgactacgtcatagtactcaaaggtgaatctctcaatagaaaaaatttattaaaattcaaaaataaatataagaaatctaaattcatttactacgcatgggattctattaaaaactaccctcatattcaagagtgcctgaatttatttgaccgcgtgtttacctttgatgataacgatgcgcgagaatatgattttatgactcatttaccattgttttattccccggattttgtaagcacagcgaaaaaagacgcttcaaagaattttaagccatccattgcatttctcggtaccgtacatagtgacagatacagactattgggggagatttatgagaaatataaaaatgaatatgatttgaggtttgttctttatttcccttcaattgttgtcttggcaggttttcttcttactaatattaagtctatcattaggttcagactttttagttttacccttcgctctagaaataaaaagcagatagcatcattcttctctagtgctgatgcggttcttgatatccagcatccccgtcagacaggtttgacgatgaggacaatagaatgcttgcctctcaagaggaaatttataactaccaattcacgagttaaaaattacgatttctattcagctgaaaatttttactttatcgatcgagataatatccaaatcgactctggtttttttgaaatcccatataacgatgcgcacctggatgcaatttcgcgttatagtgtagactcgtgggtaaaaacattatgttcgactgatatcagagaagatgttgtttaa

SEQ ID NO: 144044 - DNA, 951 bp, Enterobacter cloacae
atgaaagcaaaatattttttctttacctctgtacttctgttacctcctgcattctccggcgaaaaacagcaatgtgattttctctggggcacggcatcctcatcctaccaggttgaaggtggttggaatatatatggaaaggggccttcaaattgggattattttacccataatgaggtcacaaagtataccattggcactgttgaaaatggagatattgcggccaatcaaatttcgcgagatgtctatctaaaagatatacaactcatgaaagaattaggtgtcaattcgtaccgcttctctatttcctggtcaaggatcatgcccgacggagtgacggttaataaaaagggattagaatattacagccaattgattactgacttaaaagaagccaatattgaacctgtgattacactttaccactgggacatgccattagcactttataagaaaggaagttggtctaatcctgaatcaccagtttggtttgagaaatatgcacaagtagtttttgaaaattttggtagcagaagtcattattttataacttttaatgagcctgaaggatacgtttttactcttgaacctcttgcagcaaaccttattgataaaaagccagacggatatcgtgacgttttatccgttgcttctcgtggaaaacaagcgatagcactgcacaatcttttgattgcaaatgcgatggcagtacggaattaccacaaagcaaaatatgatggacgtattgggattgcattaaacttatcgccatgcattgataatgacaatccaaatagtgctactgagaagttatgtaacgatctccataacaactggattctggatgctctttataaggggaaataccctgattcagtattgaaaatgtatcagtctgcatatcctaaattcaagcctacatctggtgatgctgccaacttactgatttag

SEQ ID NO: 144045 - DNA, 141 bp, Enterobacter cloacae
atggcgattgcgggtggcaggcttgagatcgagatcatgcagataggccacaatgtccgcctccgtcatatcggcgatttttttatcgccaagacgagggagcagatacttgtgaattttagacaggtctgtccttgctga

SEQ ID NO: 144046 - DNA, 1242 bp, Enterobacter cloacae
gtgagcgaattgagctatttggaaaaattattggatggagttgatgttgagtggaaggcattagacgatgttggcgagtttcttcgcggtaagaggttcgtcaaatcggatattatttttgaaggtattccatgtatccactatggagaattgtacacacattatggtatatgggcagaagaaactaagtcatttctcgacgaaggtgtggcaaagaagttacgcgtcgctaattgcggagacgttgttattgtcgcagcaggagaaacgatagaggatattggaaacggtacagcgtggctaggtaaaaatgatgtggtctttcacgatgcttgtttttcattcaaaagtaaattaaatccgaaatatatctcctattatctcagaacacattcatttaaagagcaaataaaaagtagtatttcttctggaaagatttcgtccatcaatgcaaaaggattagggaaagctcagattcctatcccatgcccggactccccaaaaaagtcccttgctatccagtctgaaatcgtccgaattctggataaattcactgcccttacagctgaacttacagctgaacttacagctgaacttaccatgcgtaaaaaacagtacaactactatcgcgaccagttgctgagttttggagagagtgaggttgaatggaaaacgttaggggagattgcagcatattctaaatcacgcattagctttgataaacttgataaaaataattatgtaggcgttgataaccttctacaaaatcgtacgggaaagatgcaatcaaattacgttccaacttcaggcaatcttactgagtttcgtgagggtgacatattgattggtaacatccgaccatatttgaagaaaatttggcaagctgattcgacaggtggaacaaatggtgatgtattggttattcgcagttgccataaatcgattttgccaagatacctatatcaaattttggctgatgacaatttttttgagtacaacatgcagcacgccaaaggtgcaaaaatgccccgtggaaataaagatgcaataatgaaatatcgattacccattccgtcattcgaggaacaaaccctcatagttaccattctggacaagtttgatacattaacaaactccatcagggaatgcttacctcgtgaaatcgagctacgtcaaaagcagtacgagtactatcgtgacttgctgttcagcttcccgaaaccagaagccgccagcaactga

SEQ ID NO: 144047 - DNA, 924 bp, Enterobacter cloacae
atgcacggtcagactcatgtcaacaaaatctatgaccctgctgcaggctctggctcactgctgcttcaggcgaagaagcactttgataaccatatcattgaagacggtttttatggtcaggagataaatcatacaacctttaacctggcgcgtatgaacatgttcctgcacaacatcaactacgacaaatttgatatcagactggggaataccctgactgagcctcactttggcgatgaaaaaccgtttgatgctattgtctctaacccaccgtactcggttaagtggattggtagtgatgacccgaccctgattaacgatgagcgttttgctcctgctggcgtactggccccgaaatcaaaagctgactttgcgtttgtgctacatgcactaaactacctgtcagctaaagggcgtgcagcaatagtttgcttccccggtattttctaccgtggcggagcagagcagaaaatccgccagtacctggtcgacaacaactatgttgaaacggtgatttctctggcaccaaatctgttcttcggcaccaccattgccgttaacatactagtgttgtccaagcacaaaaccgacacaagtgttcagtttattgatgccagcggtttgttcaagaaagaaaccaataataacaccctcactgatgaccatatcgaacaaattatgcagatatttgtcagcaaagctgacactgatcatctggcgaaatccgttccctttgaaactgtagctgccaatgactataacctgtcagtcagcagctatgttgaagccgttgataaccgcgaacttattgatataaaagaactaaatactgaactaaaaaccaccgtgagcaaaattgaccggttacgtagtgatatcgatgcgattgttgcggaaattgaaagtggagaggtgcaggggtga

SEQ ID NO: 144048 - DNA, 1179 bp, Enterobacter cloacae
atgagtgggttgaactttctgaacaaattgctggatggagttgatgttgaatggttgtcactgggagagcttggcgatttcatacgtggcaatggactacagaaaaaagatttcgttgaaagtggttttccagcaatacattacggtcagatttatacaaggtatgggttatcagctgataaaacatttacttacgtgcttccagaactagccaataagctgaggaaggctcaaaaaaatgacttattgctagcaacaacatcagaaaacgataaagatgtagtaaaacctttagcctggcttggcgataacgttgctatttccggagatatgatgttatttcgccacgagcaaaatgttaaatatctcgcctatttcttccagtccgaaatatttcaaacacaaaaaatgaaatatattactggagctaaagtccgacgggtttccagtggcgatttatctaaaattaaaattccaattccctgttcaaacaatccagaaaagtctttgaccatccagtctgaaatcgtccgaattctggatagatttactgctcttacagctgagcttacagctgagcttaccatgcgaaaaaatcagtacaactactatcgcgaccagttgctgagttttgatgagggtgaggttgagtggaggacattgggggagatcacgaggaaaattgcatcagggcgtaataagactcgccaggccgaaggtgatttccctgtctacggctcaactggcttgcttggctttactaatgaacctgcatattcaggggatttgcttctagtcgctcgtgtcggtgcatatgctggattggttaatgctgtatccggccattttgacgtttcagataatactctaataattcacccttctgactcatggaatgcgcgtttcgcatttcatcaactgacacacatgaatttaaatcagtacgcagtaggagcagggcaacctcttattacaggcggaatgttaaaaaatctgaaagtaccagtcccctcactgaacgaacaaacccgtattgcgaaaattctcgataaattcgaaacaataacagtgtcaatcaccgaaggcctgccccgagagattgaactacgccagaagcagtacgaatactatcgtgatttgctgttcagcttcccgaagcctgaaattgccagttactga

SEQ ID NO: 144049 - DNA, 657 bp, Enterobacter cloacae
atgttgattcccgccattctgttttcattcaagcttctaaaaacagaatggttttcctggacacattatcccattcgctttgacagaaaaaacagactggtgcacgtattccggttaaatggttcagcctacagcgttccctgggatagcgtttttttcaccactggactgagccacagaaaagatgcgaacaaagactactacatcagcggtcatgtgctggcggatgataacaaaaccgtgattgacaccttctgtctgccggccacgcattcggacagggagcagcttgaaaggcactgggagtttgtccgacgttacatggaagaagggcctgagtccgtcattggtgttgttgatttttgcctgcccatcgcaaaaaaacgcgagggctatcgctttggtctgctctatcttttatccggctttaacggcgcaccattatttctgtttccgttcctgtttgtgctggcctttattttcagcgttccgcgctacctggcgatggtgacaagcagagtgcccgtctggcctgagagtattgagtcactgtgccgggtcgataaagatgacccttatcgggtcgatgcttcttgtaatcctgagcatccatggcggaatattttcatgaaaccatcagcaaataacaggaaataa

SEQ ID NO: 144050 - DNA, 978 bp, Enterobacter cloacae
atggattattacggtctttttcctaagtttaaattacatcggtctcttagtgatgaagagagaacgcatcagctaaaacaacatcaggcaactgaactggatggacaaactttagttcctgatatgaaagtgataacactcaattcccactatctggagttagttgacaaatattactcagcgaagggtttcggtggattgatcgctgcaatttgtttttttggattgtcgctattttacttggttgtgcttattggaaccattccttatctcaggtggaagatttcgggaagtgaaaaagaacttttgatttttactttaatgttagttccggcaattctgttttcattcaagcttcttaaaatagaatggtttgcctggactcattatcccgttcgctttgacagaaaaaacagactggtgcacgtattccggttaaatggttcagcctacagcgttccctgggatagcgtttttttcaccacaggactgagccacagaaaagatgcgaacaaagactactacatcagcggtcatgtgctggcggaagataacaataccgtgattgacaccttctgtctgccggccacgcactcggacaggaagcagcttgaaaggcactgggagtttgtccgacgttacatggaagaagggcctgagtccgtcattcgggttgttgatttttgcctgcccatcgcaaaaaaacgcgagggctatcgctttggtctgctctatcttttatccggctttaacggcgcaccgttatttctgttcccgctcctgtttgtgctggcatttattttcagcgttccgcgctacctggcgatggtgacaagcagggtgcccgtctggcccgagagtattgagtcactgtgccgggttgataaagatgacccttatcgggtcgatgcttctggtaatcctgaacatccatggcgaaatcttttcaggaaaccatcagcaaacaacagggaataa

SEQ ID NO: 144051 - DNA, 267 bp, Enterobacter cloacae
atgaagggtatcattcgtatcggtgataaaaccaccgggggcggccaggttatggatggctcaaagaaaatgaaatttgccggtattggtgtggcgcgtaaaggcgatccggtcagttgcccgatattaggccacagcccttcttttatcgctgaagggcatccaactatgaaggataatggcgtaccagttgcgtttcacggatataaatgtacctgtggatgcacactgatcgcttctttaagtaatgcgactacgagtaaataa

SEQ ID NO: 144052 - DNA, 1716 bp, Enterobacter cloacae
gtgttcggaaaacaattattaaactacatgccaggtttacaaactttgttagcctacgataaaagctggctaaaacatgatgttaaagccggcttatccgttgcggctgtcgcgctacccgtggctattgcctatgctgaattggcaggtgttggggcaatagtggggctttattcctgcgttttaccgatgatagcgtatgcactgtttggttcttcacgtcagcttattgtgggccctgatgccacgacctgcgcggtgattgcggccgtcgtgtttcctctttctgcaggtaatcccgaactgcactggcagctgaccattatcatgacgttgatgatgggcgggtggtgcctgcttgccagtaaattccgcctgggcgcacttgccgatctgctttctcatcccatccttacgggtttgcttaatggcgttgccgtgacgattattgtcgggcaattaggcaaggtgttggggataaaactcgacgaagcgcaggttattgagaaaataatggccttgccaggacgtctttcagacagccatttattaaccgttggaatatcgcttttaacgttaattattttaatagttattaaaacgtatcgcagccactggcctgcaccgttgattgccattgtgatgacaacgctactggtatgggcgacatctgcacaacagtatggtattgccactattggaggggaaggcttccagcctggtttacccgtcgttaactggggcgcgttccagcccggtccgatgcgtgatttagtgatcccggctttgaacctggcgctggtcagctttgtcagcctgatgctgaccgcccgcagtttcgctgcgaaaaatggctatgaaattaatgctgatgcagagttcagagcgctgggtattgcgaacattatgtctgggttatctcaggggtttgctatcagtggagcagattcccggaccgcggttaatgattcagtgggtgggaaaagtcagctggtttctgtagtcgcagccttactcatcggtatcgtagtggtgtttttcactcagccattacaatttattccggtatctgcattaggtattgttttgatgtacgcatcctggtcattaattgatctgcgcgggttatggaatctgaggcgaagaaataaacaggcatttcgcctggcctttttcacgtttggctgtgtgttaattatcggcgtcatccaggggatcggccttgcggtgttacttggcctgttacagtttctgcgtacggtgtttcgtccctctgagcacttactgggaactgacgaagatggaatgattcactcattaggtaatactaccgatattaaaatggtcccgggcgtgctgatgtatcgatttaactcaccgttgacctattttaacgtggcttattttaaacgtcgggtattgaacctggttgatggtgcagcattacaacccaaatgggtggtcattgacgccgttgcttgcttcacctattcagacatcagcgttctggcaaccataaatgagttaaagcgcgatctgaaaagtcgacagattacgttaatccttgcgggcagaaaaacggaattaacgcgctggtttaaagatagccggccaacaatgaatgatgatgacatgattctggcgccagacctctatctggcacttcggttcattcaaagcaaagagagtgcgagtgaatcaggtggcgaggtataa

SEQ ID NO: 144053 - DNA, 216 bp, Enterobacter cloacae
gtgcgttttctgacggaagttattgagaatgtattgcgttatttcctggatacgcagggggtgcaaaaatgcctgttggttttcagccgcgctgagttttttctcgtctgtttccgtttcaagagacttaaactgtgggcggacatcgttatagtccaccttaaacttcagtactttttcatcacgaatcgcatcagtaatgacgtaagaatgtaa

SEQ ID NO: 144054 - DNA, 984 bp, Enterobacter cloacae
atgatgctcgaagttatcaaggataatacagaaaaagatatcatagttgttttggatgtttttaatgatatttattccggactgacaaaagtatcaccaattaaagtgacaaaaataagacaatacgcgtacgctacggccgtaactcgtctatacgcaatttttgaacactttatagaaaaaacactttcgacctatttggattatttgtcagaaaataaaacctttgcggatttatctcctggtctgaagagggagtataggattggcttctctcatgttttaagtagaatagatcagcctagatttagctctctcaatcatgaggatttaatagagaaatatcatagagctattaatgaaagagtctctaattatcaatttatagcagaggccttgataaggcatgataataatttaagacctaatgtcttattcgagctttttagccggctaggtttgactggtcttgaaacttggctaattatgtctgcaaaagagtatggtttatatgacagtgaggaaaggattaaggaacagctcgagtcagagcttaataatttcattgaagttagaaatgattcctcacatggtgtgcctgagcaaataggtagtcagagcatactccaacggcactgtgagttaatatttttattagttagcagcattacgtcctttgttgaaagggagatttttatgcttttacaaatggctggaaaaacgctcaagattggtaatataactgaggtatttaacagggctggggcatctgtggctaaagttaatgaaaaatcgctcattagcttgagtgtgaattatgtgtttgaagattcttttaacttttacacgcaaaaattcagtactgtaaaattaaatgacgacgacgtggatgcggtattttcagcattggataataatgtggaaataggaataaagtgcgatagacttcctaagaaaaaaactaacatacatatttttttgtaa

SEQ ID NO: 144055 - DNA, 465 bp, Enterobacter cloacae
atgtaccggcttctgctgctgaacttcgtggattcatttatcgataactgcattctctcctgcgtcgatgaaccggcttacggtggtatcgtgcagtgcgaactgctttttggccttgccgcacacagcggtatctatgtgggtaacggcgatattgttcatcttgatggcgatggaaccgttatcaaaagtaaggctaaagggtttcttgaccggctcgatggctggaactccgctatctcggtgtataccgactgtatgggtttgacgcctcagggttgtgcgcgggccgctgaacgggcaaaggcggcagtgggtcagcactatccctacagcctgctcgactttaactgccaccggtttactgcccgctgcgttaccggcgattcgtgccctgatatctggcttgccagacacctcgattcttttcagaaaggggaccgatggcgcgtatggcaacgatga

SEQ ID NO: 144056 - DNA, 141 bp, Enterobacter cloacae
atggcggttgcgggtggctggcttgagatcgagagcatacagatagctcagaatatccgcctccgtcatacctgccagctttttgtcaccgagaagagggcgcaggtatttacggatcttagaaaggtcggtgttagctga

SEQ ID NO: 144057 - DNA, 639 bp, Enterobacter cloacae
atgaattctgttattgagttttttttgcatgattacgatgatttaccgtcagcattagcccgcgaactctttcgactcaggagaaaaacctttcgggaccgactcgactggaaagttgaatgcgtggaagatatggaaaaggatcaatttgacaacccaaacacgacatacttgttgggtatgtatgagggggaattgttatgcggcgcacgattcattaacgcgacgcatccgacgatgataagcgaaatttttcacaattattttaccgaaaccattatttttccggcagatgttccctgctgtgaaattagccgtttatttttagataaagaaagacgagactcctcaagtctgcagggcgtgcccgcgagtaaggcattgtttcttgcgatgaatatttattgcattaagaataaatatcgtggaatgtacgcagtagtcagtcgtggtatgtatgccatttttcgccatgcaaactggaaagtcgaagttattcaacgcggcgtgtctgaaaaaggggaggttatttactatatatttatgcctgccagtatcagcattattgaagacattattagcaaagataaatccagtcactggcttcgcgaaatgctggagcatttacgccacttataa

SEQ ID NO: 144058 - DNA, 597 bp, Enterobacter cloacae
atgtcatttgatgctgcatctgtcggcaatcatgagttcgaccatggttgggataatacgctgatacagctcagtcaggctaaattcccgatactgttagggaacgttttttataaaaatagtaatgcccccttctggaataagccgtataccatcatcgaaaaggatggcgttaaaattggggttattgggttgcatggcgtgttcgctttcgatgataccgtttcatcgtcaatgcgtcagggcattgaagcgcgtgacgaggtgaaatatctccagcgttatctggacgacctacgtggaaaagtggatattaccgttgcactcatgcatgaaggtttccccgcacgccagtccagtatcggcaatactgatgtcaaacgcgcccttgataaggatatccagacggcgaagcaggtgaaaggactggatattctgattaccggacatgcgcatgttggaacgccggagccgcttaaagtaggtaacacgctggtgctttcgactgacagcggtgggattgatattggtaagctggtcctggatatggatctaaaaaaacatcacaacaaaataaaaaggctatttgcattctaa

SEQ ID NO: 144059 - DNA, 432 bp, Enterobacter cloacae
atgaaaaatatcgtattagcatctttgctgggctttggtttaatttcatcggcctgggccactgaaaccgtgaatatccatgatcgcgtcaacaatgcacaggctcctgctcaccagatgcagtctgctgcggctcctgtcgggatccaggggactgctcctcgtatgaccggtatggaccagcatgaacaggccattattgctcatgaaaccatgacgaacggctcggcggatgcgcaccagaaaatggtggaaagtcatcagaagatgatgggaaataacacggtatccacgaccgtcccgtcaacgtcttacgcggcgatgaatgagcatgaaagagcagcggttgcccatgaattcatgaataacgggcaatccggcccacatcaggccatggccgaagcgcaccgccgcatgatcaatgcaggctga

SEQ ID NO: 144060 - DNA, 210 bp, Enterobacter cloacae
atgacggatggctggccgctttatgaatcccgcctgaagggagaactgcacgttatcagcaagcgatatacgcagcgcattgagcggcataacctgaatctgagacaacatctggcaaggctgggacggaagtcactgtcgttctcaaaatcggtggcgctgcatgacaaggtcatcgggcattatctgaacataaaacattgtcagtaa

SEQ ID NO: 144061 - DNA, 738 bp, Enterobacter cloacae
atgtattctaccgatgtcgtaaaagaaaatgcctacctttcagccacccgctcggggctggaatcgaacgagatcgctatccttcagcgctctttgccttcccgctttaatcttcggcatttgaaaaaaaatgaatcattaaaactcgtactgcaaaagaaagcgggaaaatcacgtgtagtggcttataaatttacgtccggctcatttaattacacggcgtatcgtatatcagacaaaaagttctataatctttccgatacttccgggaaaggcagtctcgattatccgttaccagccacagcaagactcagttcgcctttcaatcctgcaagacttaacccggtatcgggaaaagtgagtccccataatggcattgattattccatgcccatgaacacgaaaatagtcagcgtcatcgacggaaaaatcacccgggccgaatacaacagtaccatgggatattttgttgaagtaacgggaaaagccggtgttaaaactcgctatctccacctcaataaaatactcgttactaaaggggccagggttacccggggagacgctattgcgttatccggtaacagcggacgttcatccggtcctcatctgcattacgagctggtcatcaataacaatcctgttaactcactggcgttccggacggcggcacccgctgataacaaactcgaacagcatgcctttgcgaatgccagagactacgaacgatacctggactga

SEQ ID NO: 144062 - DNA, 681 bp, Enterobacter cloacae
atgaacaccgccacttacgttttaaaatacacagagtatctcatcagaaaatgccgttcatttttaatgacggacctacactttcatactctaaggcttaagaaaacaacaggggaaacccctgacattaactcgcccacgacgttgagcgaaaaaatatgtcatcgtctggtctatgaccataataacttctatacgatgcttgccgataaactcgccgttcgggcatacgtttcctccagaacaacgcgcgtgaaaacggtgccattaattggcgtttatacccggccgtcgcagattgatttttcagttcttcctgacaaattcgtccttaagtgcaaccatgacagcggcagcacaataatatgtacaaacaaagcgcaatttaatgaaagagaagcgtgtaaaaaactgagcctcgcgttaaagaaaaatctttactacaccacgcgcgaatggcagtacaaaaacattacgccgagtatactttgcgagccgtatgtcgatctcttcgacgatgctgacaggaacacaacgcccgaaatgctgaggatccattgctttcacggcgttgcccactatgtagaagcggattttacgggtaatgactccaacttactgatagtgttttatgttcagataatgcccgatgactttgtcatgcagctccaccgattttga

SEQ ID NO: 144063 - DNA, 432 bp, Enterobacter cloacae
atgagtaagaaaaaagtcgctaccgaagccgccgtcaccgaaagctataccgtgttctacaggggtgaagccgagaaaatcagtccacacagtaagggactgctgacgtatgagctgggtaaggaggatgaaaccggaagccttgccctgcgtttaaccgccaatggcgaagggggcctgttctcccgtgaatggatagcgcttgatgcgattcacgccattctggaacagcagccagacagctttccgtcccgtgtatttcgcccactgtttggtcagggcagcaccaataacgcagggtttcttgccgctgtgctcagaagtccggatatctgccttatcgaagcggacagcagcagactctttatgcaccgttgttatgccgactggcaacatcgtatgacgcagcttgctgcgctcagtcaggactaa

SEQ ID NO: 144064 - DNA, 234 bp, Enterobacter cloacae
atgatttctgagcgtgaaatcagaaagcgtatcggatttaacgatgacacgctacgtgccgcgctggagacctgtatttcgcggaacatcatttcgccacaggtgaatgttgatctcaccttgattgtattccacggtttttttagcggaataattaaaaactggttaatgaataacgatagttttaatctttatcagcaggctcccgctctggtgatgctgccaacttactga

SEQ ID NO: 144065 - DNA, 225 bp, Enterobacter cloacae
atgacgttagtagacgataatgccaacgtttcgacaatgtttgaaaagctaatgcccgatcttgggatagcgggctcccttattgtggttacatgtttacttctgctttttagtattgcttacaagaatttgcttaaatcgtatcgttatagtttgttttgtgagaataaaaatatttacagggagtcatcctcatgtttaagtttgttaaagatgatgtactga

SEQ ID NO: 144066 - DNA, 270 bp, Enterobacter cloacae
atggcgaatgaagaattccagcaagctgaactctttactggtgagcacaatgcggttcccggcgcggctgacttttctggatacgagatcaaccgagaggtcagccactttaagctggctttccgtgatcatcgtgtttccccgcctgaggagggttcttacccgggcgagcagttcagcaaacgcaaagggcttcaccagataatcgtccgcacccagctcaagtcctttgaccctgtgttcaatcgtgccaagggccgtcagcagtaa

SEQ ID NO: 144067 - DNA, 180 bp, Enterobacter cloacae
atgaaaccggcatccgttatcattatggacgaacatcctatcgtcagaatgtcgatagaggtcctgctacagaaaaataagaatatcgcagtcaagctcggtaatgactccaaattattgatagtgttttatgttcagataatgcccgatgactttatcatgcagctccaccgattttga

SEQ ID NO: 144068 - DNA, 165 bp, Enterobacter cloacae
atgaccattgatatcatgaataacaacatcggcaatgatgccttgcttggtaaagtgctcaagaacaaaagctgcagtgagttcaatgttctgttctggtgtcagctcagcggggagggcaattttaaactctttggcaaggcgggcatcttttctcttctctga

SEQ ID NO: 144069 - DNA, 390 bp, Enterobacter cloacae
atggatggtgaacggtggaatacccgcagcctcacaaagccgtttttgcaggcgacgcggctcagaaaccggattatcggtccccttgcccggaaatacccagccttcatcacccagatgctgacgctgttctgtcagaagaacgaaagccttatcacataccggtacacggcggagtttgccgtttttggtgtggcgaagggtgataaccttccggatccagtccacatcctcaagacgaagatgacgggtttcccccagacgcagccccgtcagggcaaggaacatgagcagagcaagggcttcatgatcgggtttaccattacgccagcgctcacagacgtccatccagcgctgaagctgggagtcatccatggcacggcgatctga

SEQ ID NO: 144070 - DNA, 165 bp, Enterobacter cloacae
atggtactgatgctgagtaattttaatttgaacataacgcttctcgtacaggcagacctggtaaatggttcaaacgaagtccagagtattgatagggatactttaccgaacgctctctgtttgccgggtgacaggataatgacaatgttgtcatttttgctgtaa

SEQ ID NO: 144071 - DNA, 297 bp, Enterobacter cloacae
gtgaatggctttagcagtgtcgatgttctggaaattacggataaaggccaagaggttgagttttgggatcgtgagaaaggtgcctgtatcggtcatcgggaagttactgagataaaggaatggaccgaaccgggaaacggtaatcagaaagttgttcgcgtgtcttatacatggaagttggcggatattccttcatgggtggacaaaaaagcgttctccagcgtcaagggtatgaatgaacctgaagaaggcatgattaatcttgttaaaaccagcaatggctggaaagcgatttaa

SEQ ID NO: 144072 - DNA, 138 bp, Enterobacter cloacae
atgaattttgacagcgacactaacgcgattgatgtcgcagtaaagcgactccgcgctaaaatagacaacgattacgggacaaaactgatccagacagtgcggggcgtgggctacatgctggagatcccggatgcatag

SEQ ID NO: 144073 - DNA, 165 bp, Enterobacter cloacae
atgctgtccgacagtggtgcaaattcaaagacctcctcttcttcttttaacgaactgaatgccggagagaaagccgccctcgtgcatgagcaggtcaataatgccggtgcggaagctcatcagacacaggcaagaaagcttcgcggcctgtattcctccaggtaa

SEQ ID NO: 144074 - DNA, 198 bp, Enterobacter cloacae; identical to SEQ ID NO: 97791

SEQ ID NO: 144075 - DNA, 186 bp, Enterobacter cloacae
atggcaacctctaacaaaaacgcaaaatcacaactctttactgttcgagtgccgcatgaggtcgtggcggaaatggaatcgcttaaagatgatggtgaaagcagtgcaggatttatcgtcacttcaatgcgcggagagatcaaacgccgccagcgtaaaaagggcaaggtggccgacaaggagtga

SEQ ID NO: 144076 - DNA, 261 bp, Enterobacter cloacae
atgcctattacggttcaggaaataaaagagtattacgatcagtttgggcttcatgacctgagctcaatgcctacctccgattaccgtcaggctctatcaaatggcggtctgttgtggatagaccatcatgattttattcgtagcactttatcagatgaaattcttgcaacaaacagagagcaggttgatgctttgattgaacatctgcgggcttttcgagaaagaatgcctacacctccaaaatggatgagtgataaatga

SEQ ID NO: 144077 - DNA, 510 bp, Enterobacter cloacae
atggattttgacgctttggcataccctgaaaaattcacaatcgcaggaactgaatacaaagggcgcagaaattcaactgaaaaaaaggtactaattccttacactgaggagccagacatcagtattggagatgaaataactcaaaaacttggaaagggtgaaatatccttaaaagtacttgatatgtcattcttaccaggaggcacgcttaatgttggcactaatcacccacacatgcttacattaaaggttgaaaatttaactgccaatgagcacaagccaaaaccatccagccaaaacacgttcaacattggtagcgtatcaggcacacaagttcaaatcggtgaacgtaaccatcttattgtaaatataagtatcactgaacttgttgaaaaggtgtctcaatcacaagatcctcaagcaaaatctttacttaaggatttattaaataatagcactgtagctagtctcgttggtgctggagcctcagcattattagctttgctatga

SEQ ID NO: 144078 - DNA, 741 bp, Enterobacter cloacae
atgacaaaagagattcttgccgttccgggtgtacatccatccccgttgtacaaaagaacctataaatccgttcaagatattgatgaaaaattaaccaagctaattcatagatggcgatttttcaatgcgggaccgcctatgaaagttactgcatatgatggaacagaaatctgctatcaaggtgtggcattcaaaggttctcccgttgatgttttttggagcagctttattggcccttacattgaaaattactcaatgaatgtattagagcagacctcagccttggcaattgaatgccaattttcaatagaggaatccattgaagaagctaaacttctattacttgtaatgattcgcaggctttaccatgaaatggccgagacagataaaattttaagaggagatggattttccttcccagaaaagaaagatgtcagcggttacattgagagtatgtcccggaagattaaagaatacgctgaaatagaaaaactgaaaaaaccactgccaaatcataacatattcaatatagatactgtaaatagcaaatatgtgcaatttggtacaagtaataatattaatactcaagaactaagtgagtttttcacaatgatcgcttcttcgggtgaagatgaagttatcaccctctcaaaaatacttctgaagagcattatgtcaaagaacttactgagcaaagaaaaatatgattttctaatatctatctttaaatcccagccatga

SEQ ID NO: 144079 - DNA, 1167 bp, Enterobacter cloacae
atgaagaaattactcgaattacgccagcagaaagccgcactcaaaacccagatgcgctccatgcttgacaaagccgacactgaaaagcgcagcctgaacgaagaagagggcaaaaagttcgatgaactccgcgcccaggctgattccctcgaagttgaaatcactcgtcttgaagccgtcgccgacgatcagcgcaatctgcctggtacttccgttgaaggtgagccagtaagcaacgacgagctgcgccactacatcatgacaggtgacacccgctctctctccacgctggtgcaggctgacggcggttataccgttattcctgagctggacaaagagatcatgcgccagttgcaggatgatagcgtgatgcgctccatcgcaacggtgaagacgaccaaaaccaacgaatatcagaagctggtatctgtgggcggtactaccgttaatcgcggcaccgaaggtgaaccacgtactgaaaccagcacgccgaagatggagcgcgttgatatcaaactcaacccgatctacgcctacccgaaaaccacccaggagattctcgacttctccgaggtggatattctgggctggctgtcttctgaaattgccgacaccttcaccgctaccgaagagagcgactttgtgaacggcgacggtgataaaaaatccaaagggttcctgtcttaccctcgcgcggccactgccgataaagcccgtccattcggtacgctggagaagatggaagccgctgacgtttcctctgatggtctgattgacctgctgtataagctgaaagccaaataccgcaaaaatgccgtatgggtgatgaactccaacaccgccgccaaactgcaaaagctgaaaaacggcaacggagattacatctggcgcgatcgtctggttgccggttctcccgatacgctgctggggcgtcctgttcagtatctggaaaccatgccggatgcgagtgcgggtaaagcgttcctcgcggttggcgacttcaaacgcggctatttcatcgtggatcacaccactggcgtacgtacccgccccgacaacatcactgaaccgggtttctacaaggtgcataccgataaatacctgggcggcggcgtggtggactccaacgccatcaaggtgcttgagctttccggctccggttcctga

SEQ ID NO: 144080 - DNA, 222 bp, Enterobacter cloacae
ttgctggcgctgaatgacgccagtactgcaagccatgtcgccgttgagatcagggatgcggataaaacgcgcctggcgcttcagcaggccagccagccggtctcggttgacgcacagggaaatgcgacgctgtcgttttatgccaattatattgccactgccgataaccctcagcccggacgggctgatgcggatgccacattcatgattaattataattag

SEQ ID NO: 144081 - DNA, 2427 bp, Enterobacter cloacae
atgattacccgctggttctggcgcgagtggcgttccccctcgctgctgatcgtctggctggcgctcagcctggcgctggcctgcgtgctggcgctcggcagcgtcagcgaccgcatggaaaaagggctcagccagcagagccgggagtttatggcgggggacaggacgctgcaaagctcccgcccggtgccgtcgggctggattgacgaagcgcgcaaagaagggctgaaggtgggggagcagataaccttccagaccatgacctttgcgggcgacacgccgcagctcgccagcgtgaaggccgtcgatgatatctacccgatgtacggcgaattgcagaccaacccgcccgggctgaagccgaagcccggcacggtgctgctggcatcacgtctgatggcgcttctgaacctgaaacccggcgacagtatcgacgtcggcgacgccacgctgaaaatcgccggggaagtggtccaggaacccgactccggctttaatcccttccagctcgcgccgcgcctgctgatgaatactgcggatgtcgcggcaacccatgccgttcagccgggcagtcgcgtcacctggcgctataagtttggcggcacgccagcccagcttgacgcgtacgaaaaatggcttctgccgcagctgaaatcagagcaccgctggtacgggctggaacaggacgaaggggcgctcggcaaatctctcgagcgttctcagcagttcctgctgctttcggcgctgttaaccctgctgctggccattgcggcggttgccgtggcgatgggccactactgccgcagccgttacgacctggtggcgatcctcaaaacccttggggcgggcagggcgcagctgcgcaagcttattgtcggccagtggctgatgctgctgattctgtccgcgctgaccggcggaataatggggctgctgtttgaaaaactgctgatggtgatgctgaaaccggtgctcccggccgccttgccgccggccagcctctggccgtggctatgggcaatcggcgcgatgacggtgatttcgctgctggtagggctacgcccgtaccgcctgctgctcgcgacgcagccgctgcgcgtgcttcgcaacgatgtggtagcgaacgtctggccgctgaagttctaccttccggtgattattgccgtagcggtggggctgctggcgtggctgatggggggcagcacgctgctgtgggcggtactggccggggcggttgtgctggcgctgctgtgcggcgtgctgggctggatactgctcaacgtcctgaagcggctgacggtgaaatccctgcctgtgcgcctggcggtcaaccgcctgctgcatcagccctggtcaacgctcagccagctgtcggcgttttcgctgtcgtttatgctgctggcgctgctgttagtgctgcgcggcgatctgctggatcgctggcagcagcagcttcccccggaaagcccgaactatttcctgatcaacattgcccctgagcaggtcacgccgctgaagggcttcctgtcggagcatcacattattcctgaatcgttctatcccatcgtgcgcgcgcgtctgacgcagatcaacggtcagccaacggaggggaataaggacgagtcgctgaaccgcgagctgaacctgacctggcaggaaaaacgccctgaccataacccgataaccgccggcacctggccgccgaaagcgggggaagtctcgatggaagaggggctggcgacgcggctgaacgtgaagctcggggacagcgtcacctttaccggcgatacccaggattttaccgcgaaagtcaccagcctgcgtaaagtggactgggaaagcctgcggccaaacttcttctttatcttcccgccgggcgcgctggacgggcagccgcagagctggctgaccagcttccgctgggaaaacggcaacggcatgctgacccagctcaaccgggagtttccgacggtcagcctgctggatatcggggcgatcctgaagcaggtagggcaggtgctggagcaggtgagccgcgcgctggaggtcatggtggtgctggtgacgatctgcggcgtgctgttgctgctggctcaggtgcaggtggggatgcgccagcgccatcaggagctggtggtctaccgcacgctgggggccggaaagcggttgctgcggatgacgctctggagcgagtttgcgctgctggggctggtggcgggtctggtggcgggtctggtggcggccattggcgcggaaacggcgctggcggtgctgcaggcaaaggtctttgacttcccgtgggagcctgactggcgtctctggttgatcctgcctttcagcggcgcggtgctgctttctctttgcggaggctggctcggcacgcggctgttaaaggggaaagccctgttccgtcagtttgcaagttga

SEQ ID NO: 144082 - DNA, 1785 bp, Enterobacter cloacae
atggcatttttaaaagagaataaacgcaaaacagtaacgacatcgaacattaatactgatacagtaattaatattagcttacgcgacaaatttataaaagatcaagatcgctctgcaaattttgagcgtttactctacgaaaattgccctgctattcctattactgacaactatataaatattaaaattgataaacctggttttgtttatgctaatcgacaatcacttgtagtacgaatttgtaatgcaatacacagtttagatacaaccgatcggactaaagtaaatgtttttaatgaaacagtacgtttcttaaaaatggcagatgaacataaaatcaaggatgttttctgcattgacacgatatcaatgtatataaaaaatcttgttggctcatataataaaggaagtaaagggaaaacattatccggtcgtcaaaattctattaaagctttattgaaagctatggattatgaattatatacaaaatgtgaaagcatatttttttctttcccagcagatacgcagagtgtttctcattatactgatgatgaagttaaagatcttttttctgcattgcaaactatatatatttgttatgctgagcatgtcgaaaatggtactaagcctaaagcatttcctctttatgaactaaaagatttagatggtaatcataaatataaaaataagacatcgacagagagaacggtctcatataaaaatagtgatactgtatggttatctgacttagttagagtagcctattttatgacatgtttctatacaggtgcaaatgcatcatcgctattaaagttaagattatcggactttaccgaagttctatttaaagatcttaatagaaaaacgtataagttaagcacaaaaaaaggaaggcagtcagggagaaccaatgaaattgatgtgggatttactaaggaagcaagagtcttttttgagagatggattggcgttagcaaaaaaataaataataatgaagatggttttttttatcctaacccatcagttaataatagatcatatatgactgatagcagtatgagtattttgaataaaacatttgttgatcttggtttgcctgcattgagtagtcaacgatttagaaagacaaaagcttcattaattatgagagctacagagagtgtgttctttgtttctcaggggctcaataattccgttgaaacagtagcaaaacattatgcagatggtgaccctgttaccactgagttctcactggcttccgcactgtatatcagagagcagactgtattgggaaaacctttagataaggctctcactgagagtgccttcctttaccacgacccacttaaagaaggtgaagccagtaaagaatttaaaaaactgactaatggcttaagatgcggtggagcatttaaagataaggctataaaagtcaaagaggttttggtcaaaaatggtcttgctgaatctcatgatgtcgtggcttgccacaagtttcttgagtgttttggatgcaagcatcacgctattatcgcagaggttgatgatatttggcttttactctcatttaacgatgtgattctggagtctgtcacaaggccagcgattaactcccgcccatcaaacttactgaacaaagtgaataatactattcaggtcattatagaacggatgaaacgggagcatgctgcggtatacaacgaagcttatgataaatatctgaatggaatgcaccccctttggcaggatacgaatgatttagaattaatgctgagtatttactaa

SEQ ID NO: 144083 - DNA, 1332 bp, Enterobacter cloacae
atgagcatcgtactttgggaacttcctgacttagttgttgatcaagaaatcagaaggaaaattgatactgagacaggcgaattatcgataggctttgaaggtacaggccagcatttaggcaagctcccattattatttatggaagatggcagcagcatcagagtcgccaataattggttgattcatttaaaagctaatttgcgtaaaaaagaggttaatacgcaggctcaggctttactgcattattttacctttcttcatgatattggtatgtcctgggatgagatgccaatatctctcaggctacgtcccacctacgcctttcgtaagcatttgcgagacatgttcaaacgtggtgagttggcgcgcagcactgctaacagttatatgggatcagtgattaatttttataaattctatctggctcgcgatcatttttttgcctatcctccctttaaatatgaagtagtacggttacatagaaatttatcccatgaatatatgagaaatcattttatccatgtcgataccacggatttaagattaaaactgcccagtgatacccgacactttggattatcacgaaaacttgttccattgagcaatgacgaatggcaagtcgtcgagtctgtatataaaatccgtggtataggtgtttcaaccagtgctggtgagggtaatgaggttccactatctgaggaatgtaagttagctattgatcttagccgatactctggtcttagaagaacggaaataatatcgttaagagcaaagcaaatttataaaccagatactgaacagctcaagaaaaaatatctgatcaatactgagggcttgctgcttgatccccgacaaggtgttgaaactaaaaatggtacaatacgcactgctgagatccactctgaattaatgcagacactgtatgattatattaattcatctagatatattaagcgtagaaatagatatcaagagctttatccggaaaacaaagataacccgccattattgttaaaccaaaatggtaaaccctatgcttccaaaacactggatgcacgctggggtgaaatcagaaatgcggtcagaaaagagttacccagttttagtcataaatttcataacttacgctcaacctatgctgtggaaaggcttaaggaattactggatgctgggctaaaagagggaaaggcgcttgattacctgcaatcggtgatgggacataaaagtagagcgaccttactgggttacctaaaattctgtgaggaagaaacaatgacggctaatgaagtgcatgagaaagcattaaatattattctcaagagtgataaatag

SEQ ID NO: 144084 - DNA, 297 bp, Enterobacter cloacae
atgatcatttttgttctgctctacgatgttttcaggctgtatcgcgactcgcacgttaagtatcagcagtcttaccagaactccattcgcgacccgctgacgcgcctgtataaccgcagttatttttatgaaacgttaaagcaggcgctggatatcgccaaacccagccgcccggtttccgtcatcgtcagcgatctcgatcgcttcaagcgtatcaacgacacctacgggcatcttcagggcgacaaggtcctgcagtttgtcgctaatctgctgatggattccgtgcgcccctag

SEQ ID NO: 144085 - DNA, 540 bp, Enterobacter cloacae
atgtgcaagcatgtaagcataaggagtcaaggtatagcgtgttacttagttactcggattaacaatcccaacgtacagagcggcagatttacagagtcagcgcagtccctgctccggcagtcagtggcaggcggcgtactgaagcaaaccattatcgataccggcatcggcgataccatcggcatgctgatgtcacacggcaatatttctccctacatcatggcgtggttgataaccgtgctgatccgtctggcaacgggtcagggcgtggtctcagccatgacggcggcggggattattagcgcagcaatcctcgacccggcaaccggtcaactggtgggcgtcgacccggcgttgctggtgctggcaacagcgactggctccaacacgctgacccatatcaacgatgcttcgttctggctgttcaaaggctactttgatctgtcggtgaaggatacgctgaaaacctggggtctgctggagctggtaaactccgtggttggcctgataatcgtgttgatcatcagcatgattgcataa

SEQ ID NO: 144086 - DNA, 696 bp, Enterobacter cloacae
atggataaccgtaccgcgtttttaaacaccatcgcccaggcgctgggtcgcccgctgcgcttcgaaccgcaagcggatgccgcaccggttaacaactatgccaacgagcgcctgaccgagcttagccccgagcagcgctgctctgcgtttatccagtttgccagcgaagtgatgctggcccgctgcgaactgaccagcgaggaccaggccgcagacgcggcactgcgcctgtgcgaagaattgggtcagcagccggtggtgctgagcggcgacagccggctggtggagctgggcatcaccgaacgcttgcagcaggaatgcaacgccgtggtctgggatccggcgcgtggtagcgaaaatattacccaggccgagcaggcgaaagtcggcgtggtgtatgccgaatatggcctgaccgagtccggcggcgtggtgctgttttccgcaccggagcgcgggcgctccctgagcctgttgccggagtcctctattttcgtgctgcgtaaaagcaccatcctgccgcgcgtggcgcagctggcagaaaaactgcatcagaaagcacaggccggtgagcgtatgccatcgtgcattaatatcatcagtggacccagctcgacggcggatattgagcttatcaaggtggttggggtgcatggtccggtgaaggcggtatatctgattattgaggattgttga

SEQ ID NO: 144087 - DNA, 1428 bp, Enterobacter cloacae
atgtcgataaaaaccagcgatgtagaatttaaactgcgtattcgtcagcagatagaagatccgattatgcgcaaagccgtggctaatgcgcaggagcgtatcggcgcgaatcggcaaaaaatggtcgatgagttaggccactgggaagaatggcgcgatcgtgccagccagatccgcgatcacgttctgagcaacctcgacgcttacctgtaccaactctccgagaaagtgacggaaaacggcggacacgtctatttcgccaaaaccaaagaagatgccactcgctacattttgcaggtcgcgcagagtaaaaatgcgcagaaggtggtgaagtccaagtcgatggtgaccgaagaaatcggcgtcaaccatgtgttgcaggatgccggaatccaggtgatcgaaaccgatctcggggaatatatcctgcagttggatcaggatccgccttcgcacgtcgtggttccggcgattcataaagatcgctaccagatccgccgcgtgctgaacgaacgtctggggtacgacggcccggaaaccccggaagctatgaccttgttcattcgtcagaagatccgcgaggatttcctcagtgccgaaatcggtattactggctgtaactttgccgtggcggaaaccggctcggtgtgtctggtgaccaacgaaggcaacgcgcgcatgtgcaccacgctaccgaaaacgcacattgcggtgatgggcatggagcgtatcgcgccgacctttgccgaggtggatgtgctgattaccatgctggcgcgcagcgccgtgggcgcacgtctgacgggctacaacacctggctgaccggcccgcgtgaggcggacaacgttgacggaccggaagagttccatctggtgattgtcgataacggtcgctcgcaggtgctgggctcagagtttcgcgatgtgctgcgctgcatccgctgcggagcctgtatgaacacctgtccggcgtaccgccacatcggcgggcacggctatggctctatctatcccggccctatcggcgcggtgatttctccgctgctcggcggctataaagattttaaagacctgccgtacgcctgttctttgtgcacggcttgtgacagcgtctgcccggtgcgtattccgttgtcaaaactgatcctgcgtcatcgccgggtgatggccgaggagggcattacgccgaaagccgagcgacgggcgatcaagatgttcgcctatgccaatagccatccggggctgtggaaagtcgggatgatggcgggcgcgcatgcggcgagctggtttatcaatggcggcaaaaccccgctcaaggttggcgcgattggtgactggatggaggcgcgcgatctgcctgatgctgacggcgagagcttccgcagctggtttaagaaacatcaggcgcaggagaaaaagaatggataa

SEQ ID NO: 144088 - DNA, 720 bp, Enterobacter cloacae
gtgaatgtaaatttctttgtcacctgtattggtgacgcactgaaatcacggatggcacgagactccgtattgctgctggaaaaactgggttgtcgcgttaatttccccgagaagcaagggtgttgcggtcagccagccatcaacagcggttacatcaaagaggcgatccccgggatgaaaaacctgatcgccgcgctggaagacaacgacgatccgattatctccccggcgggctcctgcacctacgcggttaaaagctacccgacgtatctggccgatgaaccggaatgggcgctgcgtgctgagaaagtttccgcgcgtatgcaggatctcacctcctttatcgtcaacaaactgggtgtggtggacgttggtgccagcctgcagggccgcgctgtgtatcatccttcctgtagcctgacccgcaaactgggagtgaaggaagagccgcttacgctgctgaaaaacgtgcgcggactggagctgttgacgtttgccgatcaggatacctgttgcggctttggcgggacgttctcggtcaagatggccgagatatccggtgagatggtgaaagagaaagtattacatctgatggacgcaaagccggaatttttgattggcgcagacgttagctgcctgctgaacattggcggtcgactgcaacgggaaggccagccggtcaaagtgatgcatattgctgaagtgctgatgagccgctga

SEQ ID NO: 144089 - DNA, 1698 bp, Enterobacter cloacae
atgaaacatactgataataagacctttttgacaactcttacccaattggttggccctgctcatatcctcaccgaaccgtcaaaaactgcgcgttaccgtaagggttttcgctcgggtcagggtgatgctctggcggtggttatccccggctctttgcttgaactctggaaagtccttagcgcctgcgttgaggccgataaaataatcctgatgcaggcgtcgaacactggcctgactgagggttcgacgcccaatggtaatgattacgaccgcgagatcgtcattatcagcacgctgcggctggacagtctgcatgtgctggatgagggtaagcaggtgctggcttatccgggcaccacgctgtattcgctggaaaaggcgctgaagccgtttggccgtgagccgcattcggtgattggctcttcgtgcatcggcgcgtcggttatcggcggtatctgtaataactccggcggttctctggtccagcgtggcccggcttataccgagatgtcgctgtttgcccgtattgatgaacagggacgcttgcagctggtcaatcacctcggcattgagctaggtcagacgccagagcaaatccttgcccggctggataacaatgcgattgaagccgtgctcgtcaaccatgacgggcgtcacgcgcacgatcacgactatgttagccgcgtgcgggacatcaatgccgacacgccagcacgttacaacgctgacccggatcgcctgtttgaatcctctggctgtgcgggcaagttagcggtgtttgccgtacgtctggatacctttgaagccgagaagaaccagcaggtcttttatatcggtaccaatcagactgatgtcctgactgagattcgccgccacatcctggcgaattttacaaacctgccggttgctggggagtatatgcaccgcgatatctatgatattgcagagaaatacagcaaagataccttcctgatgatcgacaaacttggcacggacaaaatgccgttcttcttcaacctgaaggggcgtaccgaggccatacttgagaaggtgaagatctttcgcccgcactttaccgaccgcgcgatgcaggcttttagccatctgttcccgagccatctcccggcgcggatgaagacctggcgcgataactatgaacaccatctgatgttgaaaatgtccggtgagggtgtggccgaagcccaggcatggttaacggactattttaaatcggccgagggcgcgttctttacctgtaccgcggaagagggcagtaaggcgtttctgcatcgttttgccgccgcgggtgctgccattcgttatcaggccgttcattctgacgaggttgaggatattctcgcgctggatattgcattacgccgcaatgataccgaatggtatgagcatttaccggcggaaattgacagtcagttggtgcataaactctattacggccattttatgtgccatgtattccatcaggattatatcgttaaaaaaggcgtagatgcccacgcgttaaaagaacagatgctggaattactgcgccaacgcggagcgcaatatccggcggaacacaatgtcggccatctgtataaagcgccggaaaatttggcacgtttttatcaggaaaatgatccgaccaacactatgaacccaggtattggtaaaaccagcaaacataaaaactgggcatga

SEQ ID NO: 144090 - DNA, 1554 bp, Enterobacter cloacae
atgcgcgaatatttaatgtttgctctggcactctctcctttgctgctgatggtatttttaatactgaaattaaaaatgcccatccattattccgtactgatctctttggtattcaccgctgcactatcggcaatattctgggaaatgcccacacagaatctgaaagccgcgataggctatggtgcactgaagggactatggccgatcgtaattgttatcctcggcgctatcttcagttataacgtcatgcaggcgaccaaagcgctggatattctgcgcgatattctcgccagcattagcgaagataagcgtattcaggtgctgctgatttcatggtgttttggtggatttcttgaagccgctgcgggctatggcacggcggtcgctattccgatcggtattctcattgcgctgggattcaacccgttgaaggcggcgattgcttccctcgtagcaaataccgttccgaccgcatttggcgcggttgggatcccggtttctattctggcagagcaggttaatctgccggtttataccttaggcggaaccattattttgcagctcgcgctgtttaatatcctgctgccgtttgtgattgtctgcattattggcggtggcctgaaagccattcgcggcgtatttctgatcacgttgatttgcggcatttccacgctggttccgcaatattttgtcgccatccatcttggcgcggaattacccgcctttgccggtagcctggtcagcctgtttgccgtggcgatggtcagtcgcctgcgcaaagggaaaaccgatcccgagtggcgcattgaggtcagccatacccgcgaaaccacgccgcgctcggcaaaagtgttgttccgggttggctctatttatctgtttatttttgtgtttatcctgctgtgttcgccgctgttcccgacaataaaaggcgcggcatcccaactggcttcggtgctgcatttcacgttggctgacggcaaaacgatggcgctgaaagttgaatgggcgaccacaccggggatgctgatcatctttgcgaccattatcggcggttttattcagggagcgtccgcacgtgggatgctggaagtatttatcaaaacgattttccagcttaaaaactctatcgtcgcaattatggcgatcgtcgcgctggccacggtgatggatctcagcgggattatctccacgctggcccagtcgattgtcgatctgaccggcagctcgtacgtcttcctcgccccggtgattggcgcgctgggcacgttcgtgaccggcagcgataccaactcgaacattctgttcggcaagctgcaaaccattgccgccagcaagttacatatcgatcctaactggctggcggcggccaatacctctggcgctacgggggggaaaatgatttcgccgcaaagcatcgccatcgcagtttctgccaccaaaatggacggtcaggccaaccagattatgtctggcaccatgaaatactgctgcgcctacattgtgatcctcggcctgaaagtcggtctgttttattactggtttatggcgtaa

SEQ ID NO: 144091 - DNA, 192 bp, Enterobacter cloacae
gtgatacaccttaaaatcggctaccatctgcgttcgttggcggaaacggcgatgtcgcggatgaagatgcagttcggagaacggttgtcgctgcgtgattacgatgcgcaggtgggcgaggcaagggcgcgggtgaaggcgttgaataaaatgacactgatgggtgtaccgttcagcgtgcggattgcctga

SEQ ID NO: 144092 - DNA, 741 bp, Enterobacter cloacae
atgccaattccaactcaatcacagattggcggcgagcagcagaccgcgcaggccatcgccgattcggtgtctacccagattcgcgtagcgatgcccggcatcattcagtcgttcgatcctgacactgttacttgcacagtagaggtggcgcttcgcggtattgttggcgatggctccaccgaattaaaaccgctggtggatgtgccggtcgtcttcccgcgcggcggcggttgcacactgacctttccggttaaagaaggcgacgagtgcctgctgatctttgccgaccgttgcatcgatttctggtggcagagcggcggcgttcaggagaccgtcgacccgcgccagcatgacttatctgatgcgttcgcaatcgttggcccgcagtcgcaagcacagaaaatcagtggtatcagcaccagcgctgcgcagctgcgaacagatgatggcgcggcgttcgtagaggtcgccacaggacataacatcaccattaaaacgccgggacagcttacagctacggctgaaggtggaacgacaatcacatccccgactatcacgctgaacggaaacgtaacgattaacggtaacctgtctcagggaatgggcgaaagcggcggtactgcgacgatgctcggaccggtgacggtaacgaatgacgtaacagcttctggtatcagtgtcgccacgcataaacatggcggagtgcagacaggcgggggagctaccggaggtccgcaataa

SEQ ID NO: 144093 - DNA, 723 bp, Enterobacter cloacae
atgaatatgcttgcaataactcccatatttttctcagtgtttttgacttcatgcagttgggaccctaatggtgttaacgcacaaagggactggctggcacaaaaagatagagaaaaagttgaatatgaaaagcaagttaatgaaaatcaaaaaaacagagtaaaaaaacaaaaagaagatgctgaaaagtttgaggcttcacaccctgaagtagaggttgataagttagatgttaattctgcaaattcaaccgaaaacgaactgaatcgagctattaacaatttaggttttgttactcgctatccaaactctcagaatatggataatgtttatgtaaatgttggtggctatcatttaacgatgagacgtatccaaatagccattgctggttatgctgacgaatgtaaaagagcttcggcatatgataatgcaaattataaaaacctttgtatatctagcttgtcgaaagctttgaatgatttttccagtgtattaaaatcgcataacattcctgataaaacaaaatatacagctttaagcgaagcttcgtttgatagttttatagattttgagcatgcagcaaggcttgcgaaaatgcatgcgaatttatgccagcagaaaggtaataaagggtatgtagaaatggttacggtagccgccccttgtagtggtaatggtgatgtttacaacattgacgcagccagaaaaatggggttgttataa

SEQ ID NO: 144094 - DNA, 168 bp, Enterobacter cloacae
atgaccaccaaaaccaaagaactcatagcttccgggcatgcgctggcgaaagagctgcattgcgctgagtctgccgcgctggtgcgtgaactggcgacgcagctggatgttcagcgtgttcgtgctgacacattagccacaaaacttcgtcagggagcagcatcatga

SEQ ID NO: 144095 - DNA, 813 bp, Enterobacter cloacae
atgggcgtcgttaagttagcagactacaggccgaatctgtcggtcgtggagagtcaggtggcagatcttgatgatgggtatacccgcatcgctaatgagctgctggaagcggttatggctgctgatttaacggctcgccagctgaaggttgttatggcggtgatccgcaagacatacggattcggtaagaagttcgaccgcgtatccaatacacaaatagcggcaatgaccggcattcaccacacgcatgtttgcaaggccaagaacgagatgattgcaatgaacatcatcatcaccaatggcctggcgataggcgtaaacaaggtcatttatgactggaatttcagtattagccaagttggcaaatcattagccaaaccagctaataaaacattagctgagtcagctaatgcagataagccaacccagctaaacacaaaagaaactattcaaaataaagaaagaaaagatccccctaaatcccccaagggggaatgtgtcgggcaggaagaaaaacctgtctcgaagaaaaccccgatcgactaccaggcggtgctgtctgcatacaacaccaccctgggagaccgccttccccaggcagaggcactaaacgacaaacgtcgccgtgctatcaaacgcctgctgaccgaactgaaagagccaaccgtcgaggctgtggagaattacttcgccgcgttcgctgagcgagcaccaaaattttacttcggtgagaacgacagaggctggcgtgccagtttcgattatctgctgcgttctgacaccctgctgaaaaccagggagaaagcgctatga

SEQ ID NO: 144096 - DNA, 228 bp, Enterobacter cloacae
atgcaacctaccagcctcggtcaaatcatcaaaaaaatccgcgtacctgtcgttgcgcgagcctgcgaactaacgccacgagcgatctacaagtggattggaagtggcagccttccgcgcactgattacaccggtgaaaccaaatacgcagaaaaaatcgcacaggcatctgatgggcaatttaccgctgaccagatactcgaagtgagtaaaccgaaagccgtctaa

SEQ ID NO: 144097 - DNA, 210 bp, Enterobacter cloacae
atgctcggtatggtagaggcggggatcggcattgctgccgttcccgccatgtcgatgccgacgtcagagcacacgctgctgacgcatctgccgctggtggcgccggaagtgaaacgcaccgtggggcttatccggcgccgggggcgtatccagtcctacattgcggctgaactggaaaaacagatcaccgagcagtatcgccggacgtaa

SEQ ID NO: 144098 - DNA, 267 bp, Enterobacter cloacae
atggcgacgctggggcgtcttatgagcctgctgtcaccctttgacgtggtgatatggatgacggatggctggccgctgtatgaatcccgcctgaagggaaagctgcacgtaatcagcaagcgatatacgcagcgaattgagcggcataacctgaatctgaggcagcacctggcacggctgggacggaagtcgctgtcgttctcaaaatcggtggagctgcatgataaagtcatcgggcattatctgaacataaaacactatcaataa

SEQ ID NO: 144099 - DNA, 651 bp, Enterobacter cloacae
atgaataaatatcgccttagcgacgaaacacgcctctggcaatggaaaaacggcgacactactcactccgtcacgctgcggcagattatcgcgacagtggattttaacgacgtgacggtcggtaccaaaggcggctgggttgacgatgagcgtgcactcgcccaggacggcgaatgttggatctacgacgaaaacagcgtggtgttcgccggtgcaaccgtgtccggcaacgcgcgtcttaccctgccttgcatcattagccacgatgcgcatatcagcggcagctgctggctggacgcggcagaggtcagccacggctcgagaataagtgacaacgtcaccattcagcaatcctgcgtgcggggcgagtgtcatctctacggcgatgcccgcattctgcacaacagcattatcattgccgccaaaggactgacgccggaccatgaccagatcctgcaaatttacgataaggcgacagtcagccagtcgcgcattgtgcatcaggcgcaaatctacggcgaggcgatggtgaattttgcctttgttgagcaccgcgccgaagtattcgacggtaatgactccaaattattgatagtgttttatgttcagataatgcccgatgactttatcatgcagctccaccgattttga

SEQ ID NO: 144100 - DNA, 462 bp, Enterobacter cloacae
atgacagcacagatatcagcctacgggcgtttagtcgcagacccgcagacccgcaccacagcaaacggtacaagcatggcaatgggacggttagcggtggcactgccctgccatgcagcagagggcggagaggttactttctggctgggcgtggtggcattcggcaaacaggccgacgcactggcaggacacgttaaaggcgatttagtcagtgttgccggagcgatgcaggtcaatcagtggacgggcaaggatggcggtatacagcaaggttatcaggtagtagccgacagtgtaatcagcgccagaacggtacgccccggcgggaagcgggccgaatcagtcaaagcaagcggagccagcagaggccacgcaacacaatccgcgccgggatgggaaatatataacacccctgatgattttgaccagcgccagccattcgacgatgaagcgcaattctga

SEQ ID NO: 144101 - DNA, 195 bp, Enterobacter cloacae
atgaaacagttccgaactttcgctacctgtcttgatggtgcgggagcgtcgatcccggtcacatggtacggcgagggaagcacgccagatgttgacgttcagcaaatgagagacgaagcacacggcaacggctggagcgtggaagctatcgccgatgtacagcagcgtgagaaacaacaggagttagcagcatga

SEQ ID NO: 144102 - DNA, 279 bp, Enterobacter cloacae
atgagccagttacctgaccagattgaggaagcaacagcagtaagtaaccgcattcgtgccgcgctgggttgcggtgaaatcaccgaaccacacaccccagagaatgtttcacgcgcccgccttttgcgtgtacgtgcaggcctttgccatgtgctgacggagattatgcccggaataacagcgagcgcggaacgtgacgagttgtatgcatggttgtttgagattcactccgtgacaagagctgaagagtgtcaggcgagactggaggcggacaaatga

SEQ ID NO: 144103 - DNA, 498 bp, Enterobacter cloacae
atgattgccgtccagagtaaagcccttccgctggctggcagcaaagagccggacgtgaacgggctaccgttgtcgatggttcaccagtggcaggagtacccgacgaaacgcacctttgccgtttctgtatctaccgagctacgccgccagtattacctgaatgacgcagttttcagtaaggcaatgcgtaacgcgggttatgttccggtgcgtacccgcagactgaccggaaagctggcgagtgtctggctgtatcgagtaacaggcaatgataagggggtatgcacagcagaacccgcgccccgcaaggcttccgcgcccgttgtccagaccatgacaaagccgcatccgtggtttaaacgcgtggcgctcgatggtaaatggcagcacgtctacgccgaccatatccgctttctggcgaagaagcgtcaccgtgtagatggtgtacgtgtgcagggttataccgctggcgggcttaccgtagaggtgatcgcatga

SEQ ID NO: 144104 - DNA, 174 bp, Enterobacter cloacae
atgcgtaaccataatccgatgccgggaagccgttacaaggattcccacggggctgtagtgaccgttgagcacgtcgagcataaccgcgtgacgttctaccgtgacggatatcaatacccgtgcatacagccgattgagcgattcatgaaggagtttcgggaggttgagcaatga

SEQ ID NO: 144105 - DNA, 858 bp, Enterobacter cloacae
atgagtagaccaccacgaggaaagcctgaattggcctccatttgggcagataaaaaaatcccaccaatggaatatatgtcactttcacgcgccgcaaggcttctgggttgcgaggttgaagacttttggcattggaaagaagttggagtaattaacctttcagtacgtgcgatcggcggggcatttcatggatgggctaagcccaaaagaccatcagaaaaagaaaggctactgagcgatcttaatgacgctgtaaacgccgaaatttacaaggtagcgcaaacatcaggcattgatatgtcatgggcgcaccccgccacaagaagaagaagcaaggcagatggctcaatagaaattcaaggcatgacctatggggggatatggtcaatttcgacaccaccaggctttggcggcatcaaaaaaggggctaaaaaagaataccgtctatacacgcacaaaaagggaaagaaagcagactacaccttgtttttgataggcgatgaacagcatgaaatcaacaatgattctgcttacataatgcgagaggacatcgatcgactttatgcagcaatcgaaacaggagtatttccattagcccctgctttttttgaaaatgaaatggatattcaaaaagaagatgattcgcaacaatctacgatgcccggcacaatgggtgggtttattaaaggattgatacatctagttccaagcttggggccagaggtcatagatatgaattcaaacaagcgaatggaagttatcaagcgcgtttttgaggatgccgcaaagtcaaaagaaggtggattcagctataaagcaccatcagctgcgacaatagacaagtaccttaaattttaa

SEQ ID NO: 144106 - DNA, 180 bp, Enterobacter cloacae
atgaaggcgcttgccgataagtacggtgaggacatccagctgctgcagatgccggagaaggcggcgggcaaagagaagctctcctgcgatatggtgcaagatatgtgggcgaaggtgctggcgctgccggagcagaaggcggcgggtgtgattcgtctggcggtgtccgagctggagtga

SEQ ID NO: 144107 - DNA, 267 bp, Enterobacter cloacae
atgaaaggtaaacatcaagacactaaagccctatctgacgtattagcagaaatgcatcggcaggatgacaaatggggggcagaccgtaatcaagacccttttatctggggagctattctcggggaagaggtgggtgagtttcatcaagccgtcctccatgatcgttttggtggcaaagcagccggtaccagtagggaggaagcggtgcaaattgctgccgtggcactgcaaatcatcgaatattatgatcgcgtaaaagagagataa

SEQ ID NO: 144108 - DNA, 1083 bp, Enterobacter cloacae
atgatggtaacgcaggacttccagcctgactgggtatctccacccggtgatacgattatagatctcatggatgaacatgggctttctggtgaagaactgagcaagagagttggattgtctcttgtccggggtcagcaacttctcgaagggaaaatccgactcaatgagtctctggcctgcaaacttgaggagctattcagcgtatcgacagacttctggatcaagcgcgaagacgcttatcgccagcaaattgaatacctcgagaaagtgaatagtgattggctcgaatcattgcccgtacgtgatatgatggagtttggttggatccccaaaactacaactcgggaaagtaaattcagacactgcctgtcatttttcggaattaattccgtgaatgattttttttataaaattcagtcagatgctcctttggtcgcttttcgtaaatctcttaatctggcaaccgagcctgtggccgatttggtgtggctgactagggctgcacaacttaccgcaaaccaagactgtgcagtatgggataaagaggtgctgctagcattattgccagaactgcgcaaagccacaaatgaacccgacatggggatttttatcccttacattcgcggccttctcgccactgctggagtttctcttgttgtgttgccaacgccaaggggatgtcgtgcaagtggtgctacctgcttttttacaccagaccgtgctaccctagtcatgagtttccgttatctgaccgatgaccatttttggtttacgctgtttcatgagattgggcatcttatcttgcatgaagctgtccgagttcgcgtagaaggtaaagatggtctttcgacgaaagaggaaaaggaagctgataaatttgccgttgatgttcttatcccagaagaataccggcagcagcttggtcgctatggtgtccggcactggaaagagatcatccggttagctaggaaaatgggggtatccaaagggatcgtgctgggatatttgcagcacgaaggtaatatacccttttctcaccttaataggtttaaagtgagattccgtaaagaagatatcgtctga

SEQ ID NO: 144109 - DNA, 945 bp, Enterobacter cloacae
atgaaaagacacaatcaaatcagtcagttggtcgttagtttgcaaaattttagtcgcaatgaacacaacctaaatggcctaagttctcccgcctgctttgatgttttagcctgtcagattatcgacagtatacgtcgtatacgctatgtggaaactcttgcattacggactgattatatgactccgttacgaaaagagccgaattctgatgtttttgatcctctccgtgctgcctgccttcatcttcgtgaaaacaattatgacgaagcctgctggctggttttccttgccacacatttcggcaagagtaacaaaaccggctggattttgtgtcgagatatatacagtggactcggtacacaaacgtggacatgggatacgataactgatgactttgctgcttttgaacaatggtttgccagcgtctctgatgagctgacagcaaacagcagcctaaggcagtatggtaaccaccggaaatatgaaacgaagaaatatcactctcgtcgttcaatacctgcggtttttcgctcttatatcggattcattggtgccacacacagtcatgaggctaggtttgcagaagccaggagtttttcatcttcacccgaagctttattcgaactattgtattcagggctgaatgctgtgatctcatttggacgaaccgcaaaatttgattacctaactatgctcaagaaaactggacttctggaggcagaaccaggtcatgcctttctgaatggggcaacaggtcccctccaaggaagccgactacttttcagcaatagccggactgctggtgacacaatagatgtattgaatgaaaaactggctgaccttgcggcaattattcctgcaccctacctgagaatgcaggtcattgaagatgcattgtgcaactggcagaaatcacctgaccgttatgtctatttcggcggctaa

SEQ ID NO: 144110 - DNA, 981 bp, Enterobacter cloacae
atgacccttttggtaacggctgagtgtgtcgacgatctgataaacgatgttcatcaagctatcttggctgatggactcagtaacgatcctacaaaaggatcaactctagagattcttggtgcctatcttgtccttaccgaccctcggcgaagaataagtagaacagaatcccgaggaaaactaattagttgcttaggtgaattactgtggtacctctcagctcagaacgatctcgagtttatcaaacacttcataccacgttacgctgaatccgctgagtcagatgggaaaatacatggtggttatggcccgcggttgtttaatatgcgtggtttatataatcagctgaaaaatgtcatcaaccttttgcaggagaaaaaacctaccagacgggcagtaatacagcttttcgatgcttcagacttggtgccctcaaaaactgaacagcaagaatacgtagatattccttgtacaatatctatgcagtttattgtcagacgtggggagctgcatctatttgtttgtatgcgttctaacgatgcctttatggggctgccccatgatgtatttgctttcacgatgctacaggaattagtcgcccgcttgataggatgcgaattgggccactatcatcacttcgtatccagtctacatctctataaaaatgatttagaaaaagtggaggcacttcagaaagaggggttcatgagcactctaccagtcatgggatcgatgcctgaaatgcattccttagatgatatcttacccctgcttgaggcagaaaaatctcttcgagagaataaggaatttgatattgacactacttccttgaatgactattggaaggatttactgcgtattttaaaaatccactttttgttacgttcacgtacatccaaccacaaaaaactagccttccaagagttggctgcaatgaaaaatcaggaatatcgatttatttttgatggaaaattacaatga

SEQ ID NO: 144111 - DNA, 822 bp, Enterobacter cloacae
atggcgggtcaagatcagagtgaaggaaaaggcgcaacagttaaaggaattactctcccttttcttaaagggttaaatgtaccaattccccctcttaatgaacaaaaacgtatcgctgctatttttgaaaaagtcgatagtatacgtcaaaaatgcaatcgaggtgtcaaactggctgatgatttattgcatgccatatttttggatatgtttggcgatcctgttgaaaatccgaaagggtggtttattgattctttattaaaatatggtgcatttagaaatggaatgaatttctcgaaaggggagtcaggagcgactcttaaatgtttgggagttggggatttcaagtctctagcaacaattacctgtatggataatatcgatgaaattaaattaaacactcttccttccgatgattatcttttgaaagatggtgatatcgtctttgttcgctctaatggtaataaagccttggtcggaagatgccttactatttatccgggtaaagggaaagttacatttagtggtttttgtatccgatacagaatagaaaacccatcgctactccctgaatatcttaattttctcttccgtacaccttcaatgaaacagcaaatgttgaacgggggccaaggagcgaacattcagaatattagccaaggtaccttatctgcactcaggattccagtccctcctttagaaaaacaactggcattttctaaagtagtgagttttcactcggcactaatggaaaaactagatattaatacagctaaaacagaagatatgtttgactcaatcagtcaacaatattttaattaa

SEQ ID NO: 144112 - DNA, 546 bp, Enterobacter cloacae
atgactaaccaactagcaaaaccatccatcgatttcacttttgaagatcatcaaatccgcaccatctttcgcgatggtgagccgtggttctatgcatcagatatttgtgatgctatagcggtcattaaccaccgtgacgccatctcgaaattagatgatgacgagaagggtgtagctttaaccgacaccctcggcggtaagcagaatttggttattgttagcgaatccggcttgtacactctcatcctccgctgccgagatgcagttaagcaaggtactctcccgtggcgcttccgtaagtgggtaacaaacgaagtgttaccgtccatccgaaaaactggtcgttaccaggtagaagaaaaacgccagcaggttccagtattccgctacgttatcactttgcactatcgcgatgttgtcacaggacaagaggagactctcagcggcggcgcaaactcgccagaagagattgtgcgcggcaccgctaaaaaatttggcatattcattcctgaaatgctgaacatgccagtaaacgcgtactactga

SEQ ID NO: 144113 - DNA, 684 bp, Enterobacter cloacae
atgaaaccaataaaagaaattggggaatgcctgatcacatatggagatcaggactatttactcaggccttcattcatcaacatgacacggataggtgaacccgacgagattgtcagcaccttctatgacctctatcacgacgaaatttccggattaattgaatcagcgataaaagcttatggcgccgttccttcctggctgatcgagcacataaaatcgaccagttacgggcgcaaggctgtaatgtcggcgatgacagtgattgaggcttgctgcgatgaagacaccactgttttgatcggtgagttgcgcccagcaaaagttgcaggtaaatccttcaaggtccgccgtggtgccatgaatgaatacaatatgctgatcattgctcagtcactgatagctcatggcatcatcggaaaagctaaggtcaggaaacttcaacggcatgaaagcaatgaagcgaccagcgaattcaatgcgtttgaatatatcagcgcagcgcgtaatcacttcggcatgagccgggcagaggccgagcaactcacgatgaccgaatttcaattactcatcgcggcaaaatacccggaccagaaaggtttcaccaaagaagaatatgatgccgttgccgatgactatatggcacgaaaagccaggaagctcgccagggcgaaaaaagcggcatag

SEQ ID NO: 144114 - DNA, 759 bp, Enterobacter cloacae
atgcaaggttgctctactgacaacagtaagctctttggtcgcgccgtggtgctggaggttgcgttgggctgccctgacacaatcccgcttgaaagcgagcgactgccgctgatggctggcacgtcgaaaggctttgactttagccctaacactgttaccagcgatgctgatgatacgaaaggctacgttgaaaatatcgtcacaaacagtgatttcaccatctcatttgaaggtgaagttcgcaagcgtgacaaactcgatcagttcggtgtcggtaacttcgttaaatattacaacgacgaggtgaaagcaggtcgccagccgactatctgggttttcatggattacggcccggttcgttttgtcggttatatggtgatcaccgcgcttagctctgatggtggtagtaacgatattgttacgctgacaacggaatttaaggtatctgattctgacaccatcgacgtgcaactggtcgctgaagatgttccggttacaggtgtgactgtgacacctaccagtgcatctgtagcagctggatcgtccacaacattcgcggtaaacgtagcgcctgccgatgcatcggagaaaaccttcacggctacatcttccgttccggcaagggcaaccgcgacaatcagcggcaacacggtaacagttaacgccccttccggcgcgacagcaggcactgccaatatcacagtgaaaactgacgatggcgaattcactgccgtatttgccgtgacagtgacggtttaa

SEQ ID NO: 144115 - DNA, 384 bp, Enterobacter cloacae
atgacgccatcaatgtatgaacgggtcaaaaacctgttcgttgcggccgggcttactgaagggcggatcgtgcaattgcttttctttgaagacaccaggaaagcgactgactcatttatcgtattccgaccaaatggcggaacaccaatccgtaaagaccttggagcagaacattacgtactggtcgatgttatcgggccgagggataaacgcgcggtcattgctcaggcagtgcagaaaattattgattacgtgcaggacaaccccatcagcgacagctgtgtagggcaaatcgaaaatatgggtggcatcccgccaccgataccgaccgatgggggaaggatcgtcttccgacttcaattcgcttgcctctacggggagtaa

SEQ ID NO: 144116 - DNA, 369 bp, Enterobacter cloacae
atgggcggtaaagttcgtggcatatctcagggcaaggccaatctgaacagactgattgatgacatcaccgggcgcaagattgcccgcgccattcagtcagcactcattatcggcagctcacaggccgcgctttatacccccatcgacacatcgttactgattaacagccagtaccgagaactggttattaacggcgtgcgcgtgacagggcgtgtcgggtattcagcagcttacgcgctgacagttcacgaccctaacgttaagcaaaacttccggcgttcaacggctgagaaagagttcttgcgtaaaggctttgatgacatgcgcgggcaaatcgacgcggtggtgcataaggagatatcggtatga

SEQ ID NO: 144117 - DNA, 369 bp, Enterobacter cloacae
atgtcagcaaccgcgaattggagttataccgcaaaggccactgtctggcgaaaccttggcaaggatgaatacggcgatcctcttgggtattccgctcctcttgtcattgattgcgactatcagggtggcatgtcagagaagattgctggtgtatctgcgtctctcggtaaccttggttcagaagtggtggttaaaaacacgttatggactgaatacgcagacgcgcagaccggtgatttcatcttcatcggtgagtctgtcgagtctgatcctctggtggctggtgccgacaagattttgcaggtcatccggtacgccgacacattcaatcggaccgcagacgattatgcgctgctatcggggctataa

SEQ ID NO: 144118 - DNA, 174 bp, Enterobacter cloacae
atgacgtacaaatcagttaaacaagggctaccgcgctcattcacccgcgtatgggtgatgaccgataccgggcgggagactaccggctacgttaaatcggacggcgagtggttcattaactgccctcgcatccgggcgactggcgcgaaggtgctgcgctggaaggagggctga

SEQ ID NO: 144119 - DNA, 183 bp, Enterobacter cloacae
atgagcggcgtttatttcgaatcgaagagacttggcgatatctcatgcacgcacgttaagatcggcggcgtcgaagcgatgatgaagcaggtaggtgatcgcaaagtcatcaagtcacaaggtcgcggcaatgtccgccaagtaaaagccatcgtcagagcgctacataaaactatccaataa

SEQ ID NO: 144120 - DNA, 693 bp, Enterobacter cloacae
atgaaatcatgcaagaaatgcggtgagaccaagccgttatctgagttttacagaagcaaaaaatgcactgatggatatcgcggaagctgtaaggcgtgcgcctctttgcttaacaaaacaaaatgtcttccagccagcaaagatggcgttgtccctctgccatcaaaggataggctgaatgagctttttgaggtgttagggtctgacctgatagccaagatatctcgcggctgcgtcaagagtggctcagtttgtggctataagcgcaaagatggctacatccgcgtcaaagtcgatggcgcactggtaatggcccatcgaatcgtctggaagatgttcaacggagatgagcctgattttatcgaccacattaacggcgtgcgctccgacaatcgcatagaaaatttgcgagccgccaccaagtcgatcaataaaataaacgagagccttaggtctaactcgcaatctggatttatcggagtttcttggcacacgccaacagatagccgaaagacatcaaaatgggtcgcaaagatcgcacttgctggtaagcaccatcacatcgggtacttccatgacctcaagcttgccgtcctcgcctacaacgctgaatgcgaacggctccatggcgaatacggcaagcgcaagattgagcacaacctgaataagctccgagaaatggggctgttataa

SEQ ID NO: 144121 - DNA, 456 bp, Enterobacter cloacae
atgaagcagcactactgcatcgttaacgacaccgttaaagagaacctcatcgcgtacattcgcaccctgccggtaaaccctcgcgcgccgttggtcgtagaggctcgggaagagacccgcaccgacaagcaaaaccgtctgatgtggccgctgctgaaagacctgtctgtccaggtggtctggcacggcgaaaagcttgaaccgaaggaatggaaagacctcatcactgttcttgtcagccagatgcaaaacccggaaagcgagcagaaatccgcgccgggaattaatggcggccgtgtttatttcggtgtcagcacatccaaatccagcaagcgctacatggtcgacgtcatcgaggcgatttactggttcggcacagaccgcggcgtgaagttctccgaagcatccagtaagcgcatcgcctgggcgcaagagtggagggcttcacgtgggtaa

SEQ ID NO: 144122 - DNA, 309 bp, Enterobacter cloacae
atgaaaccagctaacctggcaccagtttactgcgctctatacccagcactggcagagatagcccgtaagcacggctatgcgatggctattcacgggacaatggcgcgtgactttgatctgatttgcatcccatgggtagagaacccatcaaaaccagaggaagttgttgcagaaatcaccgcgacgtatgcaactaccgatatcaccaaccctggctacaagcatcacggtcgccttgcttactctgtgtgctttggatttggcgagttctttgctgacctgtcattcatgccgaccatcgaggactaa

SEQ ID NO: 144123 - DNA, 348 bp, Enterobacter cloacae
atgagcaaagtaactttcgtcgttgagtttgatgatggtaaagagccagcagtaaacgctggtatgacaatctttggcggaaagctcgcggctgtctcatggagcgatgcgctggaagaaaaaacattctccgtgcatgaatgccttccatcacccaatgacacggttctgcttttcgattcaaccggtgagggatggctgattgggtggcgatcaatgtggatgaccttcgggcagaaagagactggaagttggcagtggactttccagaacggtgatatcgatatcgacgatgttgttatcactcactgggctccaatgccagaagagccggagtccgcccaatga

SEQ ID NO: 144124 - DNA, 573 bp, Enterobacter cloacae
atgaaattatttgagatggaaggttttctgcgtggcaagtgcattccacgcgatctgaaggttaacgaaaccaacgccgagtatcttgtgcgtaaatttgccgaagcagatgccatgtgcgcggcgctggctgctgaaaaagagaaattcgctgtcgagtgcgcagccacaaagatcgccattgcatacctaaaatcaggccgacatgattttacgcttaacaccccggccaccgacgccttcctggctgaagtgcgggcgcagggtgttactgaatacgccagtaagcgcgggttctcattccagcacggaagcatccatgcccacttcggcaatggtgacgtgatggttggctcagtgacgttcgaaaacggtgatgcgggaattaacttcgctcctgttcgtgagaaaactggtggagttggcacgagttacgaatggaccagaggaaagactgctgagcaggttgattccgtatttgtcatcgccagcagtaacgctgaagggcttgaagttatccgcgacaagttatctgagtccatcgcccagcttcgcaaaggagtgcagtcatga

SEQ ID NO: 144125 - DNA, 174 bp, Enterobacter cloacae
atgactgtcaatcacccacttcttcgcttagctcagcagaaagcccgtgatgcgcgccagaatggtgatggcgccaaatggatggaagccaacgaagagatgaagagagccgctggcatgccttggtatagagggaattcgaatcagcgtggaggtgagcatgcaatgggttaa

SEQ ID NO: 144126 - DNA, 180 bp, Enterobacter cloacae; identical to SEQ ID NO: 144067

SEQ ID NO: 144127 - DNA, 630 bp, Enterobacter cloacae
atgcctcagccaaaaataacagaaataatactttacgagcctcggcctctatttcgaaatgtggcaaaaaacagcatccaggtcgccaacggttccctgctggtgatagaaccagacgcgctgatagaggaggtaacccccgttaccgatcaaacgtctctattcgctgcaggccttagtggcgccggtgaagaaatatatgcgctattacggctgattcaacatctaataatgctgggaaaagaaactatcgtctgggtcgctaagcgggatgttcttcttaccagactgatgtacgagcttggtgtacagacgctgctctgcgaaaattacctggaagaggaactccctcagcgcatgaaatccaccagtttcagatcaggatatttgcctttacgccccgcgctaataaataacatgaataaaaaaaacaggctcacacactcagagctgaatattcttatcgactgcgcccgaggtctgaatgcctatgaaatcgccagtctgcgccatatgggatacaaaacggtcttcacccataaacaaaacattcggttgcgtctggggctacaaaagtcagccagttggctggatctgcttaaccgtttggatcagatctgttcagtctga

SEQ ID NO: 144128 - DNA, 612 bp, Enterobacter cloacae
atgtttacttttactatttattctcgcgtggttcatccgactctactgaatgggtttctatccagcttaaaggcttttcgtgagaaaaatccagaatggaattatgaacttatacggcatgataatgcacatctgactttgcttgatttcaccgcatatgacgcacttactgatatcaccgccgcggagtacgaaggtctctgccggccaggtgaaggtactgcgctggttatgctctctgcgtgtcaggagaagctggcgcttcagctaatgaagtcataccggtgttcgctgctttgtgtggatgaacgtttgctggaactgcgtgagctgataaaacacagtatgaaaagtcaacgttatatcagtgctcacttcctgcgactcaaggagcaaaaaaataatatagccgacggtattttttttaccgatgcagaaagaaaagtacttagtggcctgaaaagtggtaaaaccggaattgaattatcacgcgaaatgtttcgaagtcagaaaacgatcagtacccacaaacgaaatattatgtttaagctgggagtaaaaaatgatctggaactgcgcaaagcgatacagaagctccagccgccgcattga

SEQ ID NO: 144129 - DNA, 546 bp, Enterobacter cloacae
ttgaaagccacattgcgtatattaaatgactgggttacagctacccttattaataatacctgcaacactgccaatattggcggcatccggtttttatatgaatcggttaaaaaagaattttcattaagcgtgcacaacccggacgataaagcgaatctaacgcgccttattattgcaggcacactttaccaggataaagagtcgttgcgcagactctgcgtcaaggcgatcccgtctgcgtcttgggaaaataatacccaacagattgccgtcttcaccagtaccaaacttatcaatcgttctggcgcgcttaaggaagcccactcagataaacagatcgataaactcaactggcatgctacaggcgagcggctggaaggactttttaatgaggccttcagcgacggaaaaatgggggctatcgatactgcctcagcagttggcacgccgacgcttcaaacccatacacgcgctttgagtatgggcgctggcgacacaccccgtaaaatcagtcctgttattaccatgtcatctgcataccactaa

SEQ ID NO: 144130 - DNA, 645 bp, Enterobacter cloacae
atgaaccagcccgtcatcacgttgtggtccgatgcgaattttttttctccctatgttatgagcgtatacgttgcgctggccgaaaaagggctcacttttacgctgaagaccgtcgatcttgacggcggtgaacatctcaaaccgcagtggcagggttacgacctgacccgacgggtgccggtgctggagattgacggttttgccctgagcgaatcgtcggcgattgatgaatatctcgaagatcggttcgcgccccccgagtgggagcgcatctatcctcacgacctgcaaaaacgcgcgcgggcgcggcagatccaggcgtggctgcgtagcgatctggtgccgattcgcgtggaacgctcgacggacgtcgtgtttgccgaggtcaaaaagccagcgctcagcgcagaaggccgtgaaagcgcgcaaaaactgattgaaaacgccacctcgctcctcgcacacggcaacccgaacctgttcggcgaatggtgcattgccgacgccgatctggcgttgatgcttaaccgcctgatcctcaacggcgatgaggtgccgcagctgctggtggattatgccgcgtttcagtggcagcgcgcctccgtgcagcgctatgtggcactctcggctaagcgtgcgggctga

SEQ ID NO: 144131 - DNA, 1815 bp, Enterobacter cloacae
atgattatcaatgagttggcctataaggtcacaataaaggccgatgagttcctgaacggcaagaaaaaggttgaagagagcgttaaggagcttcaggacaccgtagataaaagcttcgacgacattgatgaaacctcaaagcagacaggtaaggtagtcgttaagaccggagatgacattcagcgctctacgcggaagacggggcgcgtcatttctgatgccacgtttgatgttaagaagttcggcacgtcggcagccacctcatttcgtggggcatatgctgcagcagctggattccttgggattggtgctgggctgtatggcatcaagcaactgttcacctccacatcaaacgaaatcgtacgcgcaagcaatcaggctaagttcttcggcacagacgttaataagatgttcggccttcgtcgcggattccaacaggctgggcttaacggtgatgcattcattggtgcgtctggcagcgcccgcatggcgctggctaacatcgcggacccaacagtatttggaggcttaaccggtgcagcacagaaccttatggttttgggggctcgcacaggactgaacatcaacaatcttggcgacccgagtaaggctctcggtgagttcacccgctatgggaagaatcactcacaagaaaacctgatgcaggtaatggcagcagcaggtttcgacccgacagatgcagccaagattaaatctggggagctgaagtcacttgtcgactctgagaccaagaagtcaaacatcactgctcagcaggtgaaagagcaggaggctttagtggcaacgcttggccaactcgactctgagtttgaccgactgagacgggaccttgcgattgcttttgctcctgaagttatccgcgccatgaaagactttggcgactggatacgcgaacaccatggcgacattattggtttcttccgtgatgcgggtgattccattaagaagctcacagactcagtggggggagctaatactttacttttgcttcttgcggcagggctacgtctgaatccacttgttctcgctgggatggcaggcgtacaggcaataaataatatttccgatgcagcaaagaaaaaggacaacactgattcattgtgggattctatcgtaaaaagatggaaggcaggtggctgggctaatgcaacaggggaaacgtctttacctcctgatcagctaactcagtcagcacgagtgatccagaatgggtctgaggtatctgatgatttacttcatggaatcatgatgactgaatcaggcggaaacccgctagcttataacgtatccggtgctgccggcgcgtttcagttaatgcctggaacggccagagacctcggtttgcgcgtgaattcacaagttgacgacaggttagaccccagcaaatcccgcgcggctgcttccgtttacatgcgccagcttttgaagcggtacgacggtaatgtcgacaatgctcttcgcgcctacaactggggtatgggtaacgttgataagtggatcgccaatggcagtgacatttctcagctacctaaagaaaccagagagtacacaggcaaagtctacggcaacatgggtaatgccagaaattactatgccacacagggaagaatggctgacagcaggccgtatgagctggcttctggcggcggacaatcgcagattaccaacagcacccatatcaacacagtgaatgttaacagcaaccctcagtccgtagattctctcactcagagcattaaccagcaggcgaaaagggctacaacgaactcatcgtttgcttctgctgtgaattga

SEQ ID NO: 144132 - DNA, 753 bp, Enterobacter cloacae
atgaaaagattattaaccccactatccatgatcgctttaataaccctgtcttttagctatccgtcttacgcagaggaaagccaatccccaactcagaagaaagccatattgtcatgcgataaacttgctcaaactgaatctgaaaattggcttgattgggctactcagagaagcatctccaagaagcagttacttacctatgcattaaacatgtgcctcaatgctgtggtaacggcaagagatgccgagtcaatcaatcaaattgaagattggcaggttgatgcatttaatagaaacgcatacctcggttttgaagtattaaacgtaaatgctgtacaacgatcggcatcaattgcaaaagagtattttaaatctctccatggagaaaaaaacgcatcaagccaacgcgaaattacatatccagttctttctaattcagccagcaaggaagaaaggattgccgcacttagagattattctgcaaaaaagaaaattggcggcttaacgatcgagaaacgatgtgaattgattacaaaaactatgcctgatggctcaaccccttcatatgatgttaagaaaaatgccgtacttgtttgtgaaggaatcatggcgaatagtttcactaacggtaagcatggtatatctgcaagtgtggcgatggacatagcaaagaaaacatacggcaccagttcgattgagtatcgttaccttaaccaagtaacaaagttggcattttccgaatctaaactgtga

SEQ ID NO: 144133 - DNA, 666 bp, Enterobacter cloacae
gtggctgaacatttatttacgccaactagtgcgcaaactagtgatgctgaaaacctctcatacgtattcaagaagctcctttcgggagctttttttattgagctcgttcaggtaacagcaattcgaggctctgcaccaaatcttgttgtggatgtaatcccgctggtcacccggacagacccttctggtgcaaccattcagaactcagaaattttcaatgtgccggtattcaggcttcagcgtggaatgagtgcagtcatcatgaaccctgtggcgggcgacattggcatgatcgccatctgtgatcgagacaactcaatcgccagggcaaaccgcaaacagtccgtgcctggaagcaagagaacgcacagcaaatctgatgcgctttacctggggggctttcttaatcaggcgcctactcaatacgttgagttcgctgacgacaaaataaatattgtcgcgcccaatggcgtcaacattactactccggatatgtatgtcagcggaaatattagagctggcggcaatattacagacaatgttggcacacaatctgcgtcactcaaaaccctgcgcgacaaatatgaccagcacatacaccctgttccaggcgttcagactggcggctccacagttaattcaaataccacggataaaccagcatga

SEQ ID NO: 144134 - DNA, 639 bp, Enterobacter cloacae
atgtggcaggaaacgatcctaacgcaatactcagcaagccaaagactattaaggattatagacacctttaaccaagcagttagcctagatgacttcactgatgaatttatcgctaaggtatgggacctgactacctgcgaggcgtttggtcttgatatgtggggtaagattgtcggagttagcaggtatatcgtagctccaatagaaaacagttcatttggatttagcgaagctaatgatgtaaatcctgattacccgactccgttcaatgattcgccattttttgcaggagtgcaagaaactacaaatgtaagattaggtgatgatgcatatcggactttaatactctgcaaagcattcacaaacatcagcattgcaaccattccggaaattaacagattcctgaaaatgcttttttatcagcgaggaagggcgtattgcgtaaattacaaagacatgactattggtctgacattcgaattcgaactagctccctatgaagagtcaatcctgactaactacgatgttacgcctgttccaagtggagttcttgttaacgtaagacaaatagtcactccttacttcggctttgccagcgacgcctatccattcaatgacggaacattttacagagattaa

SEQ ID NO: 144135 - DNA, 900 bp, Enterobacter cloacae
  misc_feature (283)..(292): n is a, c, g, or t
atgaacagatctgatgccccgactaaacaatatacgccctttgctacaaatgggctgcgtgagcccttattacaatcaacaccctcaggcgataacaccgcatcttatcttgatggatttcctccaattacaatgactctaaaatccgctggagggctcccgcctaaaggccaggatatgaatcaaattctatttgagttaggaaatctatcaagatgggcgagcactggggctttgaattcatttgactccgcgctttcttcagccattggaggttatccgnnnnnnnnnngatcgtgcctcatgggggatgacggaagcacaatttatatcagctcggtaaacaacaattcggccaacccaaatactggaggtgccgggtggataaactactcaaagataacctcaattgcttcattatctggaggtgctgataaattaccctattttactggagctaatacagcatcacaaaccgcatttacttcagtcggaagagatatcgttggtcaagccactgtaagtgccttattgacttatctggggttgggtactgctgctattaaaaacgttggcacaagcaccggacagattcccgatatgtcaagtttcacagcaaatagggcaactacaggctggcagaagttgccggggggtctaattattcaatgggggcaggcatcaacaaataccagctcacttgtagcggttgcctatccgattccattccccaacaatacctttcaggtcgttggctcatgtattgatgtgaacaatgctaacatagtggctattaactctactgatggcgtcaacttcaatcttgtagcctgggttgctactgcgggatccgttttgagaacaacaacaccagttaaatggattgcaataggaaactaa

SEQ ID NO: 144136 - DNA, 414 bp, Enterobacter cloacae
atgtcaagtgattacgtattcagcgccactacgttaggtttttatcctgtagaattacaggaagtgtatgagcagaatggaacgtggcccggcgatgctctgccggtaacaaacgaaacctatctggaattcctttctcctcctgaaggtaaaatgcgcggagccctaaatgggctgccggtatgggtggacattcctacaccgccaaactcagaactaagaaaggcggctctttcagtattgagtaacacttatcaggatgatatagaaaaacttaaccgggcatggctggctgcagctgttaatgatggggttaacgaaacagccaaaaaggatgttgttctctcgcaaattaatgctagaaaaacacaatatgcaagtgacagggcggcaattattgctcaatacccgtaa

SEQ ID NO: 144137 - DNA, 162 bp, Enterobacter cloacae
atgtcagataacaatgcattaccggccaaagaaacacagagctcaaccgaatcaacagcagttagattctgccctatctgcggaacgcaaatgtatcagggggagcggtacggctttctgtgctggatttgtcctgaatgcgactttgacgaaccggtttaa

SEQ ID NO: 144138 - DNA, 1095 bp, Enterobacter cloacae
atgaaaatctatagcattcattaccttaggggtattgctgccttattcgttgtcctgttccatttcagaagttacatgaacaatgtgtatgctcagtctaacctgggagacattcttttctcgaagggagcctttggtgttgacctcttcttcgtgattagtggattcataatatgctttgctacagaaaaggaagaatttcattcatcattgaagtttgtgataagaagattcttcagaatatatcccctgcttattttttctatgcttgtctattttcttgttgtggttctcaggcctgagtctcacgacttaatgatatggttcttatggtcaataattccacttcatgttgattatcatgctggagcccctttctttggctacaatatgcttggcattgcctggactcttacatatgaggtttctttttactttatattcctgattgcaatgagtatatctcacaagtacagaatgatactttcttcgaccattttaatttctatggtgattatgtctcaaatgctatcaggatcaccaacgctggatgggttgaataataattacataataaatgatttcataacacttatatcttccccaatttatatagattttgtatacggaatcataacgtattgtgtatttaaaaaagttaagatatctgaaaacagaaaggggggcgggatattgtctgcgctcctgatctgcatagtagtcatcacaacatccagcatcttccttacaaaggataccaaccatggccctttatcgtggggttttatggcgtttgtgatagctctgtgcatgactcttcttgaagatattgtaagaaaatacgatagcgctcttttggatgtcctggggaatgtttcattttcactttacatgtgccattacatcattattgaaatttacaacaaatacttccactccgagtcttttactggagcatcggctttagtgatgatgactactatttctgtaatggtttctatattgctatttagatttgtagagatgccatctgtaaatgcttcaaaaaaactaacagcaattgtagattcaattgggcaaaaacaatttgcctag

SEQ ID NO: 144139 - DNA, 660 bp, Enterobacter cloacae
atgcaagtcgcatatacagtaaaattaaactctggttgtatttcaaggcaggtgggtgcagttgttaccgatagcgataactcaataaaatcagttggttggaatgatgttgctcaaggacaggttccttgtgctatgaggtcaattgatggattaataaatgattttcactcagaaacatatagccattatgaaagaaataacgaaaaatttagagagaaggcgcgagagttctatgatatttttaaaccagtaattcagcaatcaagttcttttaaaggaagaaatatttcatattgttttaaagatatacataacagtatagataataaaagtaaccaagtgcatactcgtgccttgcatgcagaagagaatgctttcttacaattagcaaaatatggtggggtcggtattgttggtgggaagctatatactactgcgagcccatgtgaattatgtgccaaaaaagcatatcaacttggtatttcagaggttgtctttattgatccttatccggggataacgcaagaccatattattaacattggaactatgccacctaagttaatacagtttagaggcgctattggtaaagcatatcatcgactttatgaacagattatacctataaaagatgagctggattacatgttaaaatag

SEQ ID NO: 144140 - DNA, 843 bp, Enterobacter cloacae
atggcggaacaaaaattcataagtgagttatttttagaaaataatcaattcatcctggttggtttaactggaagaactggttcaggttgtactactacagcaaatatattagaaagtaaaagcattgcctttcctgaattaagtggtttgagtggtttttataagggtttagataaaaggcgttactctatagttaaaaagtttgctgaagagcattgggagaatttttattcgataaaggttagtgaccttatatcaatatacttattattattacctactgtaaaattaactagtttcatatattcttgcggagagaatatagctaaaaaatcctgcgagtctttagtaagaaaaggtgttttatcaaaaagttttttaaaagaaaattatagtgatgtcataaaacaacttttagatcatcattctgaaattgatttcagtgatccaaaaataacacgttcattcatcaggattctacagctggttagaaaatttacgagagaccttaaggctgaattaaaccagttagaatccggtttatatgtctcggtttatcaatctgcgggtaaatcaattagacgaattggcaaggttgatgcagaatatgaaagtaaagacttcattccaagctctgttttccatttgccggagaccattaatagagttattaagtcaataaggaaggtgaaaaatgagagagcatacatcgttattgatgcaataagaaatccctatgaagctaagttctttaaagatcgatatgcagcatttcatttagtttcaattaatgcgccggatgaacacagaacaagatatttacaaaagctgcataaattttaa

SEQ ID NO: 144141 - DNA, 465 bp, Enterobacter cloacae
atgtaccggcttctgctgcttaacttcgtggattcatttatcgacaactgcattctgtcctgcgtcgatgaaccggcttacggcggtatcgtgcagtgcgaactgctttttggccttgccgcgcacagcggtatctatgtgggtaacggcgacattgttcatcttgacggcgacggcattgttatccgaagtaatgctcgtgagtttcttgaccggctcgatggctggaactccgctatctcggtgtataccgactgtatggatttgacgcctcagggttgtgcgcgggccgctgaacgggcaaaggcggcagtgggtcagcgctatccctacagcctgttcgactttaactgccaccggtttactgcccgctgcgttaccggcaactcatgccctgatatctggcttgccagacacctcgattcatttcagaaaggggaccgatggcgcgtatggcaacgatga

SEQ ID NO: 144142 - DNA, 384 bp, Enterobacter cloacae
atgaaaatttttaaactattaaccgccacaattttgctttccgccatcagccacagcgcgttcgccgacgagcagtctgacgctcagatgataaccaactcgaccttctgcgcgatgtactccacccgcctgacccagaccagtgacggcggccttcaggtaaaaggcgtcaatctcaatgcccgcatcaacggaccggtattcaacagggtacttcaggtgatgaacaagacctatggcagaacctggctcgaatcaaatgcccgtaacggcagcatgaccgccatgcagctttcgcagtcggagctgctctataacccggaatatgcccggcagtgcgatgcctttacggataaagtggaaaaggaatggcgcggaaagtaa

SEQ ID NO: 144143 - DNA, 321 bp, Enterobacter cloacae
atgattatcgaaaaaaagtatgcgcttgttgatacaactgcaagactcaacgctgacctgagggattatgaacgtgaaataaacaacgccgccagtataacatttggcaatgatctcattgaggtaaccgtatatcagttcagctttgtcatcaaagtcagaacgaatagtgaaaagatcaagcatggtcttcttgttaactttggtaaaaacatagcaagacaggtttcatccctttgtgaatccgcaatgcgattctacccgaatgaaagacataaaccgagtcgtcagctttttagatgcataaataaaaattcgtga

SEQ ID NO: 144144 - DNA, 816 bp, Enterobacter cloacae
atgaagccaaaggcagaggcaaataagttatcaaagatcctgagcatttttttgggagaggataggtttcctgttgatgttgaatctttagcgctagagtattctaaagaaacttctcctagtgatcctatagtgaaaataaaaaagagtgatgttgataattttgaaggtgccttaattaaacatccaaataaaagccaatggatgattttatataaagaaaatattcgttcagaaggtcgtaaaagatttacgattgcacatgagttaggacactacatgttgcatcgtgctgaaatggatgaatttttatgtacatctatagttggtgaacaatctctatcagtccgcgatatagaaaatgaggcagatacatttgcatcatatcttttaatgcctttggacgattgtagaaaacaaacatctcatcagcaatttagtatcgaattacttattcactgcgccaatagatataatgtatctcttatggctgcagcgttgaaattgaaggaaattcttccaaagcgaattgtagttgtcgcagctagggatggtatgattttatgggcttcctctaaccaaaaggcatataaaagcaaaatatatatcaaaacaaaaggtgttccacctatatcaattccagagggttcattaatgtcctcattatcaacgaatcctgttggtgaaagtaaaaaacagccagcaaatttatggtttcctgatgaaccgaaagatttacatttaattgagcatgtgtttgttgcaactgaaggatatgactatactctgggtgtgcttgaacttgaaagtgaatga

SEQ ID NO: 144145 - DNA, 324 bp, Enterobacter cloacae
atgagttctacattgggtaataaaatcaatgcaaggcgtagggagttgaaatttagtattgataaacttgctgaattgtctggaacaagtaaaagctatatttgggagttagaaaatagggaaaactctaacccttcggctgaaaagatagaaaatatagcaaaagcattaggtgtgacacctcaatttttactcgaaagtaaaagtgctaatcctgatgaggatgtaatagatgaggcattctttaggaaatataaaggtctttcagatagcgataagaaaaaagtgaggaagttaatagatgtctgggatgacgaggattga

SEQ ID NO: 144146 - DNA, 663 bp, Enterobacter cloacae
atgaaaaataaattcataaaaatcaatgacaaaattgttgagatcgatgatctcactcctacaggggctcaaatccttcttgtagctggtgtcaaagacattgttgagtatgttctgttccagaagctgaaaaatggcttgcttgaagagattcgtcctgaagaaaaaacgactctcgataaagagggggttgaaacgttcctgatgtttaactccgatcgcacttatcgttttacacttaatggcaaaatgtttgattggggagcaccaagcttaacaggggccacagtaaaatctctcgcagagtgtgattttgacagtaatgacgtatggcttgaaatgaaaaatgagaaagacaaactcattactgaccatgaacatattgaccttactcagccaaatgttgagcgcctttatacccaggaaaccagtattaacatcattgtcaatgcaaaaatgcgggtcgaaaatcgccgcgttattagctactgggatgttgttcatctggcatatgaacatgccgaaaataaggaaacatcaatctattctgtagattacgctaaagggccaattagcaatccagaaggctcaatggttgatggtcaatatgttcaattaaccgacgggatgattttttatgtcactcaaactgataaatcttaa

SEQ ID NO: 144147 - DNA, 1194 bp, Enterobacter cloacae
atgtcactcaaactgataaatcttaatccttgcctgaaaagacttcaggatgagggctatgaactcgaaattagagatggtttccttatggttcactcagtaccatatgtaaactccaataaagaggtcctgaaagggacccttatcactaatcttgttttagcatcccccgatgttgttggtaaacctaatacacaccaaatgtatttcaatggggaacatccctgccaccctgatggaagaatattaacagccattcagcacaccactccaaatcaaacacttgggaatggcatcatagggaatcattggttttccaataaaccaccgtcaggtagctatgatgattattatcatcaggttactagttacgttagggttattgagagccaagccaaagctattgatgaaaatgtttcagcgaaaacatttatttcgcattaccttactaatgatgaagacattttcacatatcaagatacagcttcagctcgtattggaactgttcagctcaacaatctaattgcaaatcagaaactagctattatcgggttgggtggaactggctcttatattttagatatgatatctaagacctgtgtaagtgaaatacacttatatgataaagatcaattccaacaacataactcatttcgtgctcctggagccgcatcgatagatgacttagaaaaaaaacaaacaaaatgtgattactattatcaaacgtatagtaatctgagaaatggagtcattcctcataatgaaatgctgtcagaaactaacttacatgaactaattaattatgattttatcttcataagcatagacagcgccacttcacgtaagatgatcactgattatctataccaacataaaatcagctttattgatgtaggtatgggattaagttttactgaagacaaaagcagtattttcggcacttgtcgttctacattatatacaaaagatatggatgatacgcctttaaaatcactgccaaccatatcaagagatgatgaagtatacagatcaaatattcagttggtagaattaaactgcctaaatgcagcatttgctgtcatacaatggaaaaaactattttgtttttattgtgacgacatgagttcgtatgaaatgacttacagtttagggttaaacaaaatagcaaataaggttatggagagagtagaatga

SEQ ID NO: 144148 - DNA, 489 bp, Enterobacter cloacae
atggaacgcttttttgaaaatgccatgtacgcctctcgctggatactggcccccgtctattttggcctctcgctggcacttatcgcgctgacgattaagttctttcaggaaatctggcatgttctgccgaacattttttctattgccgaagcggatctgattctggttctgctgtcgctggtggatatgaccctggtgggcgggctgctggtgatggtgatgttctccggctacgagaattttgtctcccagctcgatatcgacgagcgtaaagagaagctcagctggctgggcaaaatggatgcttcgtcgctgaagaataaagtggccgcgtcgattgtggcgatctcctctatccacctgctgcgcgtgtttatggacgcgaagaacgtgccggataacaaactgatgtggtacgtcatcatccacctgacgtttgtgctgtctgcgtttgtgatggggtatctggataagatcagtaagaagtaa

SEQ ID NO: 144149 - DNA, 1017 bp, Enterobacter cloacae
atgaataaaagtccgcttgcattaattatatatatgtccggaactcttttcgtttccacgctaagcgcccccgttttggcaaatgaaaaagtatccacgcctgtcgccgtacaaaaaacatttgatggttctattcaaaacaactcgttggcaataagtcccgatgaaaaattggcggtggtctcttacagcgccagaacggatatcgccgtatacgatcttgaaaagggcgagttacggcaggttatcaacggttttattacgccgcgtaatatcgttttcgcaccggatggcaacagcttttacgtatcagacagcagtaaggggaccgttgaacgtattgacagcgcgtcgttgaacgtcacgcataccttttcaacggggccgggcagttttggtacagccttaagcaaagatggcaaaacgctctggatcaacaatcaggcaggtaacaccgtgacccgtcttaataccgatagcgggctggcagaaacggtcattaccggtttttcgcagccccgacagggcgtgaagctgagtccggatggccgtactctctacgtgacaaacttccttggcgacaagattaccgcagtggatacgtcaaccaataaaattacgggggaaataaaaggattcagcaaaatacgcgctatttctgttagtcaggacggtaaaacactgtatgcggctaacagcgggagcgacaccatcgcggtcgtcgatctgccgaaacagaaaatcatccgcaccgttgaggttggaaaaaatccctatggcgccgcgctctctccggatggaaaattcatttatagcggtaacttaacggggaacagcctgtcggtgatcgatgttgccagcctgaacgtcacgaccaccatcaaagggtttaatgagccaagacaagcacttgtttttacgaaggacggtaactatctctgggtgctgaataaagatctcagcctgtcaaaagtcgaccgaaaagagcaaaaggtcgttgctaccattaaagagtaa

SEQ ID NO: 144150 - DNA, 225 bp, Enterobacter cloacae
atgaaaattcaacatcaggactatggcgccgtggcgaacatcgttatcacaagcactctgtttgagttccgtaaacataacagagtggtagatgtcacgctgctacatacacccggaatcgtagcaacccgtagcgggatgttcttcatgagaacggttttatccggcaagtctcgggacatgctccgtgcgtacagagctgtttttcgggaggcatcacgatga

SEQ ID NO: 144151 - DNA, 327 bp, Enterobacter cloacae
atgaaagctaacccgacaactaaaaaatttttccagcttgtagatattcctgattaccgcttcgcaggtgacaaggaaaaatgcagtcatattgattttgaccaaatcgcaacagatagcgatacaaaaaccatttctttgctagaagctatcaatcacttagggatcagcataatgaacgaggcagaggaaaagaacatcgataaaaataaactcatgatgttatctggcgcaattgctgatttagcagaattagcaattgccacaaacaagatcgctatttcatctacttattcctccggttataaggatgctgaaaatgcctga

SEQ ID NO: 144152 - DNA, 855 bp, Enterobacter cloacae
atgaaacgatgtgttatttcccctgccatgaggttagtgcaagacgagcaaggcgtcagaatgaatggtgggttaaaatcagaggatattaattattatattcttttttgggatcgtatagttgtacctagtactcagatagtgcatcggaaattaaaaaatgaggatgatttacttggtctgggtgttataagtagaccaatgctcaaaggtcttgaaacagatggcttggtaagtagatatctatcttatcaactggagcttcttgataaatatagaagtgaaaataaaagcgaagattggtcgctgcatcaggtcggagaggattttgtttcgctagaatccagcgataagcaacactcagatttaaggattgaaattttcaacgcattgcctataccaagtgaaaacgttccgttagctgatattttggagtttaaggaaagaaagaaacagcagtttatcgattttcatgaatatttagatgaactttataaacatattatcacaagccctgacgaaccattgtttagagctaaggcttatgcctcatttgaagaatcactttcaactatcagaagattcagtgaagaaaaatggcgaggagagctaaataacttcaacttctcatttggttttgagtctaaaaatgacactgttgatgctgtgttagacggcgctagcgccttagctaacgcttatgctggagatcaggtttcggcgtttaaagacgtaattagtattttagctaagaattttagagtcagtcgaaaagaaaaagttatgcttggttccgagtctgcgcgtaaaggactaaggtacttggtaaatatgagcgatgagaaactgctttaa

SEQ ID NO: 144153 - DNA, 942 bp, Enterobacter cloacae
atggttcgtgacctgaaaggatctgttaatgaactggcgaaagcgctggcgaaactgctcaacattgaccccaaatcatggtccctgaagtgggatttcagcaactttatcgaccagatgggcgagttcagcaaaatgctgaatatgatcgccgacctgcttaacgccattaaagatggccgctgggctgatgccgccagcatcggcaaacagatgcttaatcagggcagcgaaaatccgtcagcgatgccgatggtaacagacagcgccaacggtaccgcctactggattaaagagcactggggattcgatcctcgcagcgtgggccgaacggtgcgcggctggtttggtgatgatgagcctgaacagctcggccagtcagttaagcggccacagccaaccaaagcaggctctgaactgctgggatggatgcaaccgatgcttaccaacctggagcaactctatcggcttccggaaggtttgctgcgcagtgtggccataacggaatcgggcggtaatcagttcgctgtttcaggcgctggcgctaaaggtctgtttcagtttatggacggtacggcgcgtgacatggggcttcgcgggaacgatgttttcgaaccggagaaggccgcccaggcagccgcaaagtatctttcacaactgctgcaggcgaacggcggtgacctgagcaaggcgctggcctcttataactgggggatcgggaacgtgcagaagcacgggatggctcttatgcctcaggaaacccgcaactacattccgaaggtgttaagcaacatgcccgcgcccggtgctcaggtacagcaacagaacacctatcacatctacggtggtggtgacccgcgttctgtcggtaccgaggtcgagcgtcgacagcagtcggcaaacgcccaggttatgcgcggtaatcaaacgaaggtgggctaa

SEQ ID NO: 144154 - DNA, 2667 bp, Enterobacter cloacae
atgaacgcattctcgtacgatcttaacgcgctgccggccgccgtcatgatttatgaccgagatgaacgcctgcaggcctggaatgacaacgtggcccttttttatccggtcatcaccccctggctgcaggtgggtacgccccttgcagagctggcggaacgctttatcgatgctgtttacaacgtcgaccccggcctgcgccagacgctacgcgagtcggtcgtccgcaactgtcggcaggataaacactgtgaggtgcggcaagtgggccagcggcgtattttcgtccagcatcagcgccttgcggacggcggtattgtcagcttgcacagcgatattacggagctggatgaggcgcagcgctcgcgccaccagctgcatgacgatttcctgctgacggcggaatccattcatatagggatctgggactggcaggtttccggcgacgcgttacaggttaacgacacgctgcttgccatgctgggtcagtcgcgatcccagtggagatatccgcttcaaaagctgctagaccttgttcaccttgacgatcgcctcatactacgtgaggcgctgcttgcttcaaaacaggcgcatcgcccggtctttgaatgtgagatccgcatgcatcaccccaccgaaggactgcgctggatgctgctgtccgggcaggtggtcacgctctccatcgagggaaacgccgagcacgttattggcacactgcaggatattacgcggcgcaaagaggctgagattcaggcgatcgcctcagcccttgaagcacaaaaagccaatgaggccaaaagcgcatttctggcgaacatgagtcatgaaatccgcaccccgatgaacggcattattggcatgacccagctgtgcctggataccacgctcagcgccgatcagcgcgattacctgacgctggtgatgagttccgcgcagtctttgctgcatatcatcaacgatattctcgacttctcccgtattgaagcaggcaaaattgtactggatattgatccggtcaatcttcgtcacttcattcagaccttaattcgcccgcatatgccgggcgcgagcgaaaaaggcatcgagcttctggttgatattgcacccgacgttcccgacgtgctgctggtcgatggcgcccggctgcgtcaggttctgaccaatctgctgggtaatgcgctgaaatttacgcaccagggagaagttatcctgattgttgaatccggggatgacccgaatcactggcgttttcgggtgcgcgacagcggtattggcatcccggctgataagcaaaaggccatttttgaagccttcagccaggcggataactcaaccacccgccgctacggaggaacagggctcgggctaaccatctcttcgcgactggttgcggcgatgggcggcgagctaacggtcaccagcgagccggggaaaggcagcgaattttcgttcgtcctaccgcttgcaacacagtttcttgccccggaggcacgcccgcgcagccagcgctttaatggggaacccgtgctggtggtcgatgataacgaaaccaacctccggctgctggccgccatgctgagccagatggggctgaaacccacctgcgtcaacaacgccagcgaggccatcaaccgggttaaagcgagtgcctggccgctgatcctgctggacgcgcagatgccggatatggacggcgtgtctctggcccttgagctttcggtgctgccgcagatttctgaaagccatatcatcatgctgagctccatgagccgacattttgatatcaatatgctgaagcggatcggcatcaaaaactatctgcataagcctatcgctcaggacgagctgcatcaggcgattgccgcggcgtttgaacgtgcgccgaagaccgtgggggaaaccgcgcccgcccccgtcgccgccccgggcgctacggggctgcggatcctgctggctgaagataacctcgttaatcagaaagttgccgcgcgcctgctggaacgcctcggccatacctgtcagatcgtcgacaacggcgtcgcgctgcttgaacgctggcgcgcgggcgagtgggacgttctgctgatcgatcttcagatgcccgagatggacggcgagaccgccattcgcctgcttcgtgaggaggaacgctcccgggcagaaccggctcagcccgccgtcgccatgaccgcacacgccatgcagggggataaggagcgctgtcttaacatgggcttcgacggctatattgccaagcccatcagccaggagcgtctcgctgaggagatagctcgcgtgctcgagcatcatgatgattcctccgtttttcctgatgaagctcgcctgatgaaacagtgcgctgacgaccctgccctggttcaggagctgcaggccctgtttggcgaagggctggaggaggccatgaaaagcctcacccgggctatcgaaagcgataaccgtgaagcgctgcgccgcacggcccacaagctgcgcggagaagccgtcacgctggatttcgggcttctcgcccgtcagctgcaggcgctggagagcgaggcgcacacgcaggacaggcaacagcttgcaacgctaaacgagcgtcttcaaatggaatcgcagcgcctgatggcgtggctcaacgcgcgaggggtaaacgaaccatga

SEQ ID NO: 144155 - DNA, 639 bp, Enterobacter cloacae
gtggacgcccgcgatccgcgcaccacgtggcagccctccctgataaccacccttccctatatgctgccgggcctggagtttggctgggagccggaaggcgttgcggccgatctgcaaaagcgcctgcgcaagcaggcggaaaacgtctggctcagtcagaaaagccgctgggagaccgataaaatcctgacggccagagcggatttttcactgcctcaggccccctggcatatacaggatacggtctggggaaatggctatgcctggaactctgttggcgatgatggcagggattacacccgcttcgcgcaggtgtcgacaaaagcggtttttgctctgtgggccttgtgggatacctcttatactgacgtgctgatgtcggtcaccgagcaccttaacgatccgcagagaggctggtacgaaggccgccttgaagccacgggcgataccaacgcctccctgaccctttctaccaatgccacggttctggaagcccttttctttaagcacaatgccgggccgctgtttgacgcccgccggtctaagaaagagagctactttacgcgccgtgtggcagaggaatatacgccagtcgggcactgtctgccgggcgaaaacgccttaaggaggacgccgtga

SEQ ID NO: 144156 - DNA, 309 bp, Enterobacter cloacae
atgaagataaagaacctgactctaacgctctgcactacgctcctccttgcaagctttgcaggacatgccaaagaggtcaaaattggcatggcgattgacgacctgcgcctggagcgctggcaaaaagatcgcgatatttttgttaaaaaagcagaatccctcggcgccagcgtgtttgttcagtcggctaacggcaacgaagaaacacaaatgtcgcagatcgagaatatgatcaaccgtggcgtcgatgttctggtcattatcccctataacggccaggtattaaggaaggtgcgaacaagttcctga

SEQ ID NO: 144157 - DNA, 558 bp, Enterobacter cloacae
atgttgatcggctatgcgcgcgtctcgacgcaggatcagaatcttgaactgcaacgcgaagccttgaccaaggctggatgccagaaggtctttgaggacaaggtgagcggcacgcgggccgaccgtccaggcttggccaagacgctcgaaatgctgcgcgagggtgacaccctggtggtttggaagctggatcgcctggggcgcagcgtcaaacaattggtcgatctggtcggcgaactgcacaagcagggcgcccagttcaagagcctgactgacgccatcgacaccggaacgccctctggccggttcttcttccacgtcatggccagcctcgccgaaatggaacgagagctgatcgtcgagcgtacccgcgccggattggatgtcgctcgtcagcttggccgcaagggcggtcgcaagcccaagatgaccgggagcaagatcgagtcagccaagaagctgctggccagcggtgtgccacccaaggacgttgccaagaacctcggcgtgtccgttcctacgctgtatcgctgggttccagcatcgacgcacgcttag

SEQ ID NO: 144158 - DNA, 246 bp, Enterobacter cloacae
atgaagcatatctgtaagaaagaccaccgttacgaccctcgttttattagcctcccggaaaaccaaggcaataccggacgccataagtgtcccggatgcgcattcgaacgcgcaatggaattaaaggctaagggcattccaatgtgcaacgatgattctattctggccgacttaccagaaagccaagcaggaaccgttcgccataaggatgctttcgaggcgtacaagatggcatatcaagcgtaa

SEQ ID NO: 144159 - DNA, 429 bp, Enterobacter cloacae
atgaacaataactatgtcttcagcgctaatactctcgctttctatccggtggaaatgaaagaggcttatgaaaacgcagggagctggccggacgatgccgtagaagtatcggacgaggtttataatgaatttcttattccaccagcgggaaagatgcgcggtgctaaggatggtctgccatgctgggtagatgtaccacctccgacccatggcgagttggttgcagcggctgatgcggagaaagaacagcgaaccatcgaagctaacgaccacatgaacagcaagcagtggcctggaaaggcagctatgggacgattgaaggattcagaaaagacacagtacaacgcgtggctggattatctggatgcgcttgacgctgtggatacctcgaaagcgcctgatattacctggccggaaaaacctgcctaa

SEQ ID NO: 144160 - DNA, 216 bp, Enterobacter cloacae
atgacctcattacaatttattaagtggatctgtatttataagcccgcaacgctgaagagcatcgtaggtatttttcttttcagctgttctggtgataacaagatcatggtcaagagacagtattttctcgtcgaaattgcgcataacctcgtctatttttcttacgaattccttgtgctgtggcctgtctatatctccagggatcaaagcttttaa

SEQ ID NO: 144161 - DNA, 1476 bp, Enterobacter cloacae
atgcttaggaaaataatcagaggtagcggattcactcagtcagaagaaaaacttatagagttcgctgatgatgctttttttggtctttggtcttatcctaatatttatagtgatgaggggtactctaaaaataacattgggaaagaggttagtgacttattagttatatttgataaagatataataattttttccgataaggctattgcattcaacaaagacaaagatcctaaaattgcatggcagcgatggtttaaaaaatcagtcataaaatcttgcacacagttatttggagcagagaagtttataaaagatcatcctgaaagactttttgttgataaagaatgctcaattaacctccccatcaaaatagacaagtcatttagttttcatttggtagccgttactaacaatatttctgaaccagcgatgtcttactttgacaaaataggaaaaggcagttctgctactttagttaatatatatccttttaacgctcaccaatgtctagaaaatccgttttgtgttggagatatttatcctgagaagacttttgtccatatacttgatgaggcagccctaaaattactgttaaccgagttaaacacagcaaatgattttataagttatcttaacgaaaaagagaaggttgtaagacaaaaaaaattgctggtcagtgccggggaagaagaaactcttgctgcttttattatgggtgataaaacgataataccagatgatattattaaaaacgatcaaacgatgacaataccggaaggtgaatgggaaaattataagactagtttcaattatcaatatcagctctcaatgaaaaagggtagtgttttctgggacaatctaatccataacttctcgataagtatattgtcagctaacgttggtttttttggcgaaattgagttttctatgcatgaattaggtgttagagaactagccaaagaaagtaggcaatctagatattacctttcaaagaactttcaagaaaaattaaaaacaactcagtctcatctaagaacgtcaagaatggttgaatcaatcgatgaatctggaaaattttacttattccttttttttcctaacgataacaacttgagctacaatgattacagaatacaacgtatatcttatataaaagcttatactacggttgcctttaataaatacagaaaaattaaaaaattaattactattgcaacagaaccgcaaaacacggcaggaagatctgaagatctaatatatagcatatccccagagaattttactaaagagcaaaatgaagaagcaaagaggttatcaagaaaatataaaatactaagtgattttttacctacaaaaatcacaaagagtaacgactttcaaacagcaacatcaaaaaatgaaaaaatagggcgaaatgcgtcttgtccatgtggctccggtattaaatttaaaaagtgccatggcgcgaatagttag

SEQ ID NO: 144162 - DNA, 957 bp, Enterobacter cloacae
atgtatatgagtgatgattttaattctattataaagaaaccaaccttcagagcggcgttacataagggattgaactttatcctttctggaaaaataaagggggtggatggattttctgtagtacaactatttagaataaatgacattgccccattaatttattcaaaagataacaacattggattaaaatcatcgtttccttcatatgaagcattaaaccgttgggctcaatccaatggtttttttaaggaaaaatatattgagaggaatgttcgtaatagctcaccaataaaagtaggctgtagatatcgtgcattttatggtaataatgaaggtataacccttctattttgtcgtcaggatgcaaagcaaagtgagtattcttccatagggatggaatattttcatagtattattgcacaaaattatcagacccaaaaacagttagaatcattttacgactcttggagtataattatttcagaagtcttgtctttgtgtaaaaaggggattttcgatactgataaaaaacaatactcgtctcatagttcattgcaagatattactataataaagaatcattttgataacaagaataatgtttcgcatgaaggtttaaaaattttagattctataattgaaatcgatcaccttaaatataaaaaatcatgtgctagtaatgaatggattttgatgattccatgttatgcatgggttaatagaagggttggtcatcagttagaattaaaattaaaaaacaattcaatttctatgggtgacataggtaattttaatgcaattgagctgattaaattattttcaagcttttatccggaagataaatcctatgtaaatattcttgctaatgatataactgacatatgcatgcgttttaatccagataatcaaatcaactctttagtaaaaagcgaaattgagagaattttaaatgattag

SEQ ID NO: 144163 - DNA, 252 bp, Enterobacter cloacae
atgtcaatcatgaatgagttacgatctgggacgctatattcagataaggcatttgacgaactcaagatatttctgatcaatatttacccgtttgcatgtcattttctcaccgaaaaagaaaaagaaaaagaaaaagaaaaagaaaaagaaaaagaaaaagaaaaagaaaaagaaaaagaaaaagaaaaagaaagggtgcaatcattaatgatgataccgtcatatcttggcggcatgaactatgaaggctaa

SEQ ID NO: 144164 - DNA, 162 bp, Enterobacter cloacae
atgggcggcctgagctatttgctggcgcaggcagttcagaacgccatccagaacgtattgcacgcgccagggctggtattcgcgtttgcggaagatggccgtcagatcgagccaccactcttcctgatgcgggaagcagggaaccagcatcccttgcgttaa

SEQ ID NO: 144165 - DNA, 765 bp, Enterobacter cloacae
atgaaaccgacacgcttgcccgttcttctttctttgctttgcatggctgcatcccagcctgtacaggcgcggattaataacatcatcctcgttcacggtgcctttaccgacggttccgtctggcaggaagtgatagaccgtttgcagacccggggctaccgcgtcacggcagtgcagaaccctctgacctcgctgaaggatgacgtcgccgccacggagcgtgtcattgaccgtcagcaaggggaagtggtccttgtcggccactcctgggctggcgcggtcatcgctcaggcaggcaataacccgaaggtgaaaaagctggtttttctctccgcccttgcccccggcagcggtgaatcggtcacctctcttcttacccgctttaacgccccgatggccgatatgcgcccggataataatgggctgatctggctggacgatcccgatgcctatcagcgcacgatggccaatgacctgcctcttaaacgcgtaaagctgctgacggcaacgcagcagcccatcgctgcaaacgcctttagcgagaaggtcaaacatgccgcctggcgcgaaaagccctcatggtatctgataaccgaagacgatcgcgccctttctcccggcgtccagcagcagcttgccggcgccatgaacgccaccgtcctgcgtattaagagcagccatatgtcgatgatttcccacccggatgccgtcagccagtttatcgaacgagcaacccagaccgacgcaaaggaaacaaaaaaatga

SEQ ID NO: 144166 - DNA, 546 bp, Enterobacter cloacae
atgaataacttcaagaatcaatgtgcagcgttctcccgccccattgatgcaggtcaactgctcaggcaaggcgcagcggggcggtctgatcaggcaatggacagcgcctggctcgtcagcctgcgtgtaccacaggcgcctcgatcaaacaccgatcctcacgttgtagccgagtgcccgcagccccttgctcgtctgcatgttccttggcggaaactcgtctgggcgcgcccagacgacgatttccccgaggctgctcaggccaacgtgcggaattgcccagtcgtcgctgcggatcgcgttccagagtcgggccgaaacacttccgttgccccagacaacgtagttcaacagtatccgtccggccaacacaccttcccgacaccgccgccgaaggccatggcccatcaagcggattttccatgcgccctcagcgccgtacctacagcaaatctttcaaggctcaggtcattcaggagtgttctgaacccggtgcctccatcgcaaacatcgccttgggctacagcctcaatgcggctttgttga

SEQ ID NO: 144167 - DNA, 531 bp, Enterobacter cloacae
atggaaaaaaagaatcaatggaataccggctactggatcgttgccctcctgctgttgctgagtttgcagagctactggcagacggcgaaaaccgtcgagccggtgccctacagcgagttcgagaaggcgctggacgaggggcgcgtggccgaagtgctggtgtcggatcgtacggtgaccgggcgcctgaagtcgccggacagccggggcaagacgacgatcgtggcaacgagggtcgaacccgatcttgccgatcgcctgtcgaagtacgacgtaccctatgcccgcgtgttggagagcacctggctgagcgatgtgctgtcgtggatcctgccagcggtatccttctttggcgtctggttcttcctgttccgccgcttcgccgagaagcagggcatgggcgggtttctcaacatcggtaagagccgcgccaaggtgttcgtggaaaagaacaccggtgtgacgttcgccgatgtggcggggggggggatgaggccatggcggagctggtcgcgatcgtcgatttcctga

SEQ ID NO: 144168 - DNA, 486 bp, Enterobacter cloacae
atggcgcagcttctgcgcgaggaggtaagtaatatcgagcggcagataaaagcacatatcaaagccagccctgcactgaggcgtgattatacactgctgagctcaattaaatcggttggtccccagcaggggatgcatatgctggtcgtgcttcgcagccataactttgtatcggctgagcaggctgccgcctttctgggcgtggtgccgatcgagaaacgctcaggcacatcggtccggcgccgaccgcggatgtcgaaaatcggcccccctcagttgagagcgaagctttacatgtccgccctgtgcggaaaaatctacaataagcgaatgcgtaatatttacgatgagatgtgcctgcggggtaaacctaaaatggtggccattggcgcgctgatgcggaaactggtgcactggtgttatggcgtcctgaagaccggaaccgtttttaatgacgaaagcctgaaaccggtactgtcaacctga

SEQ ID NO: 144169 - DNA, 1635 bp, Enterobacter cloacae
atgattaccggtgacttaaaaagtaaaatcgatggactatgggaagatttctgggtgggtggcatcactaacccgctgaccgtaatcgaacaaatcacttacctgatgtactcccggatgctggatacccaggaacaacgcgacgagaagcgtaaacaaatcgcgggtattgattttaaaccgcgctttgcgcctgagcagcaggagttccgtttcagtcactacagcaatcttggctcggatgagatgatggaagttgtgcgcgatggcgtattccagcatttccgccagctcggccaggctgatgcgtcgaaggtgacgctgctgggcaactttatgaaagatgctcgcctggagattgttaaaccgtcactgctgaccaaagccgtggaggtgatcaaaaacctgccgctggatcgtggcgacaccaaaggcgatctctacgaatacctattaagcaagctaaccaccgccgggatcaacggtcagttccgcacgccgcgccacattatccgcacgctagttgaaatgatggagccgaatcccgcccgcggcgagacgatttgcgatccggcctgtggcaccggtggttttctggcaaccagctatgagtacctgctggaaaaatacagctcgctggaatccattcataccgagattggcaccaatgaacgcggcgaactggaagagcaaaaaatctttactggcgatctgctgacgccgtggcgtgaccatgtggataacaacatgttccatggttacgactttgataccaccatgctgcgtatcgctgccatgaacctgattatgcacggagtggaagagccggatattcattatcaggacaccatgagccagagcttcagcaccaatttcccgcaggccagtaaaaacgccttcaacctgattctggcgaacccgccgtttactggttcactggacgaggaagatatcgactccacgctgtcggccatggtgaaaaccaaaaaaaccgaactgctgttcctggcgcggattctgcaaatgctgaaagtgggcggtcgcagtgccactatcgtgccgcagggtgtgctgtttggctccagtaaggcgcatcagtcgctgcggaaaacgctggtggaagataaccagctggaagcggtgatcaatctgccttccggtgtatttaagccttacgctggcgtggcaacggcgatcctgatctttaccaaaggcggccagacggatgaggtctggttctacgatctacaaaatgacggctacagcctagacgacaagcgcattcccgtaaaagacaacgacctgccacatttgctggcaagctggaagcattaccgtaatttgcgcgggctaccggttgataactttatgggcgagaaattagcctcgttgctgaaacagctgtatccggaagggattggtgctggcgttgattttaaagatcgcactcaggcagcgtttgtggtgccgaaagcggatattgcggcgcagaaatacgatctctctattaatcgttataaagaagtggtgtatcaggcgaaggaatatgaagatccgaaggtgatattgaagcggttaaaggctttggagaaagatattttgacggatctggatgagctggagggaatgctgtga

SEQ ID NO: 144170 - DNA, 3414 bp, Enterobacter cloacae
atggagcagtctctcaattttgaaatgttgcgtagccagtggccggaactggcggaactcgcgtgtatggcggaacgttacgttcacaccgatccggaaagctgtctggtcaagctgcgcaactacaccgaattgatggtacgttggttataccgtcaggaacgactgcctgaaggcatcaaagcaaatctgtatgatttaatgaacgcagatgtgtttaccagcatgatgccggaagccatcatcatgaaaatggatgcgctacgtatccacggcaaccgtgccgcgcacggtggtcgtatcaaagctaaagatacctactggctgctcaaagaagcgtatttgttgggaatttggctatatgtccgctacgcccacggtaatgttgataactgccccatatttactcttcctccattaacgcaatcttcaggtcgtgcagatgataaacgtctggaagatgccatcagggctcaagatgaaagccgtgagcgagaactggcgttacaacgcgcactacagcaagagcaggaaaaggccgaacacctcaccaagcgcctgaatgaagccagagctcgcaaccagcatgttgccgacatcctctctattgatgaagcggaaacccgccgccgcctgattgactcccgcctgcttgctgctgactggaatgtaggtgaagagcttaacaataccgatcaggttacgcaggagcaccctgttaaagaacagcctactgcaactggcgacggttatgcggattatgtcttgtgggatgaggcgcacaaaccgctggcagtggtggaagcaaaaaaaaccagcgtcaatgccgagcaaggacgaattcaggcccggttgtatgcggactggctggagaaagaatatagtcagcgtccggtcatcttctacaccaacggctacgatatctggctgtgggacgataataaaactcatggctatcctccgcgccgggtatttggcttctacagcaaggaaagcctgcaatatcttattcagcagcgtgaaacccgtctgccgctcaacagcgtgccgcacgttaaggataatgaaggcaaagcagttgccggacgtctataccagcttgaaaccattgcccgcgtcagcgaacgtttcaccaacaagtatcgccagtcgttgattgttcaggctaccggtacaggtaaaacccgcgtggctattgcactgagcaaactgatgattgatgctcgctgggtaaaacgcgtcctgtttctttgtgaccgcaaagagctacgtaaacaggcggcaaatgccttcaatcagttcaccaatgagccgctgtatgtggtcggaaaatcgaagaaagcagacaggcagaatgccagaatctacatcgctacctatcctggcatgatgaaaatcatggaccatttcgatgtcggttatttcgatctgatcatcgccgatgaatcccatcgttcgatctataacgtttacggcgatctgtttaagtattttgatgccctccagattggcctgacagccacgccgattgacatggtgagtaaaaccactttcggcctttttggttgtgaaggacgtatgcctaccgctaactacagtctggaagatgccatcgccgataacaatctggttccctatgaggttgtcacgcacaccacggaattcctgcgcgaaggcatcaaacgggagaaattaagcgatacacaaatcagcgaactggaagaacagggtatcgatcccaatacgctggaatttgatggtaaggcgctggatgaggcgatctacaataaagacaccaaccgctatatcctgcgtaacctgatggaaaatggcctgaaagatcgggacggccaactgccaggtaaaaccatcattttcgcccggaaccacaaacacgcgctgttgttaaatgaattgttcgacaacatgtacccgcagtttgccggacgcttctgtcaggtcatcgacaactacgatccccgcgccgagcaactgattgacgattttaaagggctggatgaaagcactaacaaagagctaaccatcgctatctccgtggacatgctcgataccggtattgatgtcccggaaattgtgaatctggtctttgccaaaccggtcaaatcgaaagtgaagttctggcagatgattggccgtggtacacgcctctgttcggggctatacggcaatgatgaaaacggcaaaccactggataaacagaaattccgcatcttcgatcactggggcaactttgagtatcacgagttgcataccgaagaggccgaagtcacagcgacaaaatcgctggcgcaaaaacgcttcgaagcgtgggttatgctgggggctgctgcacaacgtaagttcgacaaacaggcggtggatttagtcgctcaccagctccgcgagcagatcaacgcgctggatgaaaagtcgattgccgtacaggaaaagtggcagcaaaaagcgcagtacagcgatgaaaaagtgctgcgccagctttccccgaaaacacagcaggatctgctatctgtcctggccccgctgatgcagtggctggacgtgcgcggtcagagcgatgctatgcgctttgatatggatattctggcggcgcaaactgcccgttataccaacccggaagaattggatgtgctctggccggtcatcctggagaaagtggaacgtctgccgccgcatctagcacaggttcagcagcagggacaacggattaatcagcttcgtgatttgggctggtggaagcaggcaagccttgaagagctggaggatatccgcattcacctgcgcggcattatgcacctgatggaaaaagatgcgacgccgcaattcggctcgatacaggtggatattaccgaagatgcgaacctgatccagacggaaacccgtaaaaccaatatccgctcgattgatttcaaactctatcgccagcaggttcagggagcgctggagccgctgttccagcaaaatccggttctgaagaaaatccgcaacggcgagccggtgacgcaaagcgagctggatgagctggcgaagttagtgctgatccagaatcccaacgttgatattcgggcgctgaaagagttctatccgcaggcaacagccagcctggataagcttttgcgtacaatcatcgggatggacagcgacgcggtagaggtacgttttgcacagttcgcagctgacaacagcctgaccagccagcaactgcgtttcctgtcattgctgaaaaaccacatccgcgattacggcaccattgaaatgcgacagctctttgaacaaccgtttacgcacatccacaacgaaggtgttactggcgttttcccagacatagagcagatcgcccggttgcaaaagatagtcgaagagttgggtgttgtgaccgacgcaacgacggtataa

SEQ ID NO: 144171 - DNA, 486 bp, Enterobacter cloacae
atgtatgccaaatctttcctagcccttgacggtaatggtcgtctcaccggagccagaacggcacaacgttatccgtatgaccgctacacctgccacctgtgcggcagtgcgctgcagtaccatcctgattacgacgcaggacgaccttactttgaacaccggtccgggatgctgacagataacgggcgacagtattgtccgtatgtcagaccagagccgggggagacccgtcatatacggaaacttaaatgttatatacctgatgcccgctcgctggtttaccggaatgactggctcaacgggctggatgctacggtgatgtcgctggcctggtactgcgtctggtgcgctaatcattacagcggggaaaaacgctgcactgcatgcgggaacggtatttacagcattgaggaagcctgctggcagaataattacacccgagttggcctgcttgttgggaagatgccaagctgcaactccacttga

SEQ ID NO: 144172 - DNA, 228 bp, Enterobacter cloacae
atgaccatacacaccggaatcacaccatccttactcagcgcagaagatccgctgattgatatgaccttcatcaccacctgtaccggcatgacagataaatggttctataagctgattggcgaaggtaaattccctaaaccaactaaattagggcgcagctcccgctggttcaaaagcgatgtggaatcctggatgcgtcagcgcattactgattcccgtggcgtctga

SEQ ID NO: 144173 - DNA, 1605 bp, Enterobacter cloacae
atgaaccactatgccggacagaacaagtccaaagagtcaaactctgcctaccctgtagatgcactaccctatctattgcgtgatgtcgtggtcaacctgaatgaagataccggtattccagtcgaactgattggcagtgcagtattgtctgccgcatcgcttgcctgtcaggcgttaattgaggttatagcaccgcatgacaataaaccggaacagtgttcgctttatttgctgacaatcgcagaatcaggcgaggggaaaacaacggttcataaacgcatcatgagtctgtttgatgatttcagtcaaaaaatggataccatttataaagcacaaaaagaggagtatgaggctaagctggacacctggaaaacaaaaaataaagggttaaaatcctctcttagtaaagctgtcaagaatggcgagaatacagaggctcatgaaaacgccctaacagaactgagtaagaataaaccggtcgagccaagacgcctgagaatactttatgaaaacatcacgtcagcagcgctgattcgtggcttaattgaatacccgaacgctgcaatcatctctgatgaggctatttcattttttcaggggtatgttaaaaatgagtttgggtttcttaataaagcctgggatggttcaccttactctttcgagcgccgtgactttgacggggtgcgtgttaatgcttgcatgacgatgggcctgatggttcagtctgatgtatttaaggattatttaaaaaaaaatggttcgcttgctcattccagtggctttctttctcggtttttaatcgcagaagtaaaaagttctcgtggcctacgaaaagcaaccgtgtcacatgaaaaatctgatgccgccattcagaaattacacgacagaatagatatcctgcttgatctgcaggaaaagaaattcagagaggatgataaagaaaagatctcaatgatactgtcagatgacgccatagatttatggcggaaaatgtctgaccatatcaatgcacgctgctcaaatgatggccattttgaacatatcaaagaaacggcggcaaaggccatgagcaacgtgataaggctggccgctatatttcaattcatatctccctctccaggtatggacctgcttgaacatacggataaaattggcctttactcgtgggaaacaaaaaaaaccattgataaaaaggcactgagtgatgcgttcaggattatagaatggcatctattccagaccagcaagcttttttacactaaaagtaaactctatcaactggaacaggatgcttacgagttgttcagctacatcaaaaaacaattcattgagctggggaaattttcacttactattcgtgatcttgaaaatagtggccctggtcgcctcagaaaaaaaagcgtccttatgcctgttttacaccaactcattagcactaatgttatttatctgtacggcgacccgctatctttcgacaaaaataaaattgctatgcacctgaatggaacgcattatggctctcctggaacattcactccctttgcaataacagcggccgatgtaaaagtaccccacattgaatgggacctgtcgagattaacgtga

SEQ ID NO: 144174 - DNA, 648 bp, Enterobacter cloacae
atgacacggagacattttacactggattcaagacatgccccctttaatgaatcttacatagagaagcttcataatacagtagagcttgctttagctacacataaaagaacaatggcgattatggtactactccgttttcctgattataatgacatcgatgacagtatagcaaatgcacctgacatgagttcgggcgtgttttccaggttcattgagtcactggatgctaaaataacagcataccagaagagattaaagaataaacaacaacgtatctacccatgccggttaacatttgcatgggtgcgagaatatggagtcgatggcaagccgcattatcatgtcgtattattcgttaacaaagatacattttgtagcctgggggactttacccgcagaggcgataatctggggtctttcatagaagaagcgtggtccagtgcgctgagaattcagtatgcaccagaatatcgtacgctggtgcattttccggataacccgctctattatctggatggtaaagctgatgatttcaacacgacctatgacagcctgacatttcggttaagttatctggctaaagaacggagcaaaatatacagccgacaagcacgctcttttgggtgtagtcagggcaggacgtcctga

SEQ ID NO: 144175 - DNA, 198 bp, Enterobacter cloacae
atgtgcaaattacttgacgataaaatggtcgatatggtctttatcactgagttcacaggactaagtgataagtggttttataaattaatcaaggatgacaaattccctaagcccataaaattaggccgttcctcccgctggttaaagagtgaggttgaagcctggctggaggagaaaatcgcatcttcccgtgggtaa

SEQ ID NO: 144176 - DNA, 579 bp, Enterobacter cloacae
atgtacaccctggcggtggaaggcaccgccgtcacggactctgccgctgtgctggccgggggttatctgcagagcggcgtgagctgccgggatgcggctgagtcactggtactgtatgagtccctgaaagcctgtggctccggctttacctgcgggctcgccgggggcatgctgctgccgctgaccctcaccgctgacatcggctcttcactgttcattcagatgaggctgtgtgcggcggttgccatcaccggcggtcattctcccgatgacccacgggtacgcctgctctgctggggggcgctggccggggatgcctgcaccgatgccatcagtggcatcgtcacccggttactggcccgcacactgacgctgcctcaggcggagaccgcactgctgacggtggtatgcgacgcgttactgctgaaaagcagccacgtgttactcagggaaagcctgctgctcccgttactgggtggggtaatcaacgggggggccgcctggctcgtcacccgcctgacggggcaactcgccattcgtctgtttattccaccggtaactccgccctgcgcagcataa

SEQ ID NO: 144177 - DNA, 693 bp, Enterobacter cloacae
atgtctgcggaaacgaagcaacacgatcgcatggcatcccggctggcgatcatcatcagtcgcctcctgatgggggagcagttatcggtacaggcgttgtctgcggagttccagatctctgaacgtacccttcgtcgggactttcgtgagcgcctgagctgtctggagctgacgtaccggcagggaagctggtcactggcccgcccgcataccggcacgtataccagcagggaaatccttcactttgcccgggccaccagcctggagcagctgtttcccgcaatcgataacaagctgatagcggtgctgaccgacagcagcacaccgtcgccctatatcgtctggctttcaccaccgggacgtaagcccaccccctttggcggtttctggcgcattacgcaggcgatcctcgaccgtaccctgctggatttgaccgcagatacagagcagtaccgctggtttgcaccgtaccggctggtttatttcgaaaacagctggtacctggtcggagaattccggcagcaggcacatgttcttcgcctggaaagcatcaccgatgtctgtctgacgaaaaggcagtttctgcgcaggcggcagattgatgcactgactgcagatccgcactttatccgttctttaccccacttccagtaccttcgaaaggtgctgaccgatactgaaactcaggagtaa

SEQ ID NO: 144178 - DNA, 441 bp, Enterobacter cloacae
atgagaaaaataacgttttcactgatgcttcttgcctccgcgcaggccggagcggccgtaaaccagtggacccgtacccaggttcagggcgttacggaataccgcatacaggggaaagacggcgctgagctgctgttgacctgttcaccggatgacaatgcgttcgtgcagtacaccgcgcctgatggaaagaaactcaccagtggcaatgatgacggacgcagcgttcaggcacaggtcgacagcggcgacacgttcctgattaacgatacactgtctgatgccggggggagtcaattcgaagccttctgggacgctgcccgtcagtcacaccggactcatatcaccgcgaccggcctcacctcaaccactttcaccttcagcaatgctgcccggaccctgcctgcgtttgataaatcaggctgtctgacccgcatgtga

SEQ ID NO: 144179 - DNA, 2088 bp, Enterobacter cloacae
atgaataccgccccaaaagagctccgcaaacgattgaaagaagccttcgaaaagtttgacctgcccacggcgctcgcagcccttgaggaaatggaaactgaagaggtcgctgacgttctcatcgagaagatggctcaacctggtgcataccagattcgtggcaatcgttccaaacggaacaagttctacgacacgcttttgaactcatcaaccatgtcagataagcacgattcgatacgcccacatgccaataaaataaacctaaatatcaataaaatagagtgctatttcgatgatattcgggattcattgccgaaatgccacatatcccaatatccagtagacatccaattctggagtcaggttgagcgcacgtcgtgcgagttggctgagatcgatagcgccagcgataaggaatgggggaagattgaagagaagcttaaggcgcgcattccgacagtgatgcctgaagcgttgatgacgaagcttgaacatggtggaatcgtgaatgtcgacgcggtttatggcggcctagtaggggcgcttagtttgacattgaagatgctctcttttgagaaaaagctgcttcatgatggcaagcttgtcgctcccgcaatgcctgcgattaccgaagatcatatgtacaaggctggttcaatccagctttatgcgttgtcgtggaacgcccttgaggatgccgccaaccgaaccctatttttcggtggggaaatcggaaatgcgcaggatgcgaagatatctattgatcatttctcggtggaagaacaagtcaaattcccggaccctatctttttctaccgtgagccgactgatgtcgaagcctacgactttatggccaaccgcaggctgcacacctgggcgatgcagaatacgttgttgatggcgaatatgacagcattacgcaaaactgtcatgaaggaaggtgcaacagtacctgagcttactgcaggctttgtctctgagaacgagggcattacgctgatgaagctatcagagattcttgcctatgatgtgtccgaggaccaggagcgcttccacggactgaccctacgtgagtgggtgcgaggatactgtgcgctagggctgatgggcacggcaaagcaagacgactcctgcctggtcacgttcgaaaaaagtgaaattgagcaagggttgcgcgattacaagcttcctgaagaatgcatcccaacctttatccatcatctgaccttcggccaggatagtcgcgatctatatgactcgccgttgatttactcggaagatggcaagtacacctttttcgccaacgtcctaaaaacctgcaacttaaccaacgtgctgttctccagattgagctctctcacgacccagttcgataagaagggcaaagggtttgaggaccgtgttgtgtctagcttcgtcaagtggggatatccatgcaaatctaagaagttctatattgacgatgccgagtacgaatacgacgccctggtactgattgatgacaccctgctgctcatagagtgcaagaacaacatgttgtcaggtaacaatacagtccaggcatttcgctattctaagtcgattagcgataacgtcggacaaatcaaacgtcttgtacgcggcctgagagaacgtcctgatgttgttgaattgctgttcggcagaaagcttgatgacttaacccttgtgcccattatgctgaactccatgacttactcaagggagcctgtggagggtatctacatttcggactggtcggcgttaagcaagttcttcaccgaaagcaccatctctcgcttcggtttgcagaatggcaagaagattaataagcagactattcatacactctggaaaggcaagaggcccactgctaaagagttgattgattatttgacgatgcccatccagttgaagatgatgcgaaagcacctgcgctacacttatttccctcgtccgatgtccgagagcacaatcttctttgcgcaagagctgagtgttgatgaagataatatgctcaaggcccgagggtgcccctttgccaagaaggctggcaagaagaaaaccaagacgcgccgtaagaagcgctga

SEQ ID NO: 144180 - DNA, 1365 bp, Enterobacter cloacae
atggctacgaataactttaaacctttcgctacagctgcaaatgccaatgtcaccattcagtccgactgggaagcattaccagcactgtcgagcggctttgtttcaggcccggcaaaatcagcacaggttaataaggcgctcagacaggcgacatttattgcttctgccgttgctcagtatgttgctgagctgtccggaaatgatgtgcttgatgacggcgatatcgccgggttcgtcaataaactcaaacaagctaacgataatcgctatgttgagtctgctggtggcgattacggtgctgtatttcgtttcaaaggtatcagtacattaccatccataaacaacccatcctcccttttcagtgcagagggaaatcccgcccagaacactcttgtttcgggtgtagaagctgcatggcatgcacataaagtacgtgcaggtgttcttcgtgacagcggtattaacgtattaggttatgctgttgaaattaacggaaacaggcaatttcagactgacctcctgggtaatctgatcgccactgcgggactgtatgaatcaggcggcacgggaaccctgaaaagggtctactcagaaaacaaccctccaccacagcaggatttatccgggtatctgaaaaaaacagacgttggtacgacagctggcactgtcgcagcaggtaatgactccaggataaccggcgctctccagtcgaataatcgtctgtctgaaattgcacaggctggagctgcggcacaacagcaagcgattgaaaatcttggcggcattcatgggcggcttgttggctcccgtgcgtatacctcttcgggtacgtatgttcccggtgcgggcattaaatatgtacgtgtcaccgtcacaggtggtggcggttcgggtacggggacgccgggcgggggatatcgcggcgcaggtggtggtgcgggtggcacggccattaagtatctggccctcactgctggaagctatcaggtgaatgtaggtgaaggcgggaaatcaggtaatgctggcggcaccagttccttcggcactctggtttcagctactggcggaagtggtgccactggtgccactggtggttatggtggtgaaggggttggcggtgatatcaatattgctggcggcgctggagatgactctcctggagataacaccggttcaactggtggcggtggcgctggccatggtggtgcttcttactggggcggaggtatgagatccagcactgaaacgggcgctattagcatcaaagcagctgccggtggtggcggtggtggcaacgtatccaatggcagtgcgaatgttcagccaggtagtaatggcattgtatatattgaggagttcgtctga

SEQ ID NO: 144181 - DNA, 384 bp, Enterobacter cloacae
atgaaatatgcacgcattgatggcggggttgtcgttgagtttttcgaaaccgatggtgatatttctaagatgttccaccccgaccttaaatgggtggatatcacgaatatcaagccgcagccggattttaactggcgctatgacggtaaggcgtttacagctcctgtcgtcgattatatgaaactggcagagcaggaaaagtcctatcgtctgcttgaagcagagcggatcactgccgactggaaagtagagctttcgctggggatcattagtgacgatgacaaaaaaaacctgatcgcatggatggagtatattaagcgggttaaattggtggatacctcaaaagcgccggatatcacctggcctacaccaccagcggcttaa

SEQ ID NO: 144182 - DNA, 1170 bp, Enterobacter cloacae
atgcctttaaacgatatgcagattcgccgcgctaagcctgaagataaaccctatacgcttggggatgggcaaggcttgtcattgcttatagaacctaatggaagcaagaactggcggttccgctatcgctttgccggtaaacccaaaatgatctcgcttggcgtttacccaacgatcacccttgccgatgctcgttcccgtcgtgatgaagctcgcaaacttgtggcagaaggaaagaaccctagtgaggttcgaaaagagcaaaagctggctctgcaaacagagtcagagaacgcctttgaaaagatagccagagagtggcatcaacttaaatctgctaaatggtcagcgggatatgcatcagacatcatggaagcgtttaagaacgatatttttccttatgtcggaacaaggccagtgggggagattaaaccgctagagctgctgaacgttctgcgtaaaattgagaaacgtggtgcgttggagaaaatgcgcaaagtgcgacagcgttgctccgaagtgtttcgctacgctattgcaactggtagggcggagtacaatcctgcggctgatctttccagtgccctcgaagtacatcaatccaatcatttcccgttcctaaaagctgatgaaatacctgattttcttcgtgccttagagggttactccgggagtaagcttgtccagatagccactaaattactgatgataacgggagtgagaactatcgaattacgcgcggcattatggcaagaatttgatctggataacgctatttgggaaattcctgccgaaaggatgaaaatgcgcaggccacatcttgtgcctctatcacatcaggcgttagatttgctcagtgaactcaagataatgacagggaactatcgttatgtttttccggggcggaatgatccgaacaagcctatgagtgaagcgagtatcaatcaggttatcaagagaatcggctatggtgggagactcactggacatgggtttagacacacaatgtcgactatcctccatgagcaaggtttcaacagtgcgtggattgaaatccagttagctcatgtggataaaaacactatccgaggtacttacaatcatgcagtatatttgtcaatgcggaaaaatatgctggcatggtactccgattttatatttaacccttag

SEQ ID NO: 144183 - DNA, 1335 bp, Enterobacter cloacae
atgaataattcaattgaggcagtattatttgatctggataacacgctggtaaatactaattctttaaaggaatacagagaggggccaaaggaaaggaggcttacgcaggaagaattgaatacaacaaaattataccctaaaacaaaaacagttttagaatcctttaagaattcgaatgttttgatggcggtcgtaacaaattctcccaaacagtatgcgttagatatacttaaccaccataatattcaaggttatttcaaaacgatcgttacttataatgatgttggtcctggagggattaagccatcgccgcaaggtataaacttagctttgaataacttaaatctaacaaataaaaataatgttctatttattggggatgatgcaaaagatattaatgcatcctatgcagcaggagtcaagcctattacacctgcctgggcttccaaggattttatagggcaaatgcctgctgcaatgataagcaccaagtgcctcagtgaggagattgataatttcaatcatattgatctaattgcagacagatgtgctaactttaattcatttgatattgataaaaaatggttgttttttatcccaatggatagagatggaaatattggggccgtaaagaaaaacgaaataaatttcctttgcttagggcgttattttagtcagaaaaacaccctgacggcaaaaattcatgaaaatcatactctttccaaagaaatttatagaaaggagcttgagccaaaatatgtcgttcctgagtattgggtcgatcttctttcatattttgtagataaaactcctgcatacttttttgaggatgattcagtttttgatattgttacagtcattccggcgaagaaaggtaaaaatagacgattggaaaatcttcttaatcgaatgagtcgaaattcaaaaaatagccatactcaatatatttcagacttattctatttttcggaagaggctaaaagtctaaaaacaatggggcgtgatgaaagggcggctgaaatacaagggagcctgcattttaatcctaagtatgaaaataaaatacatgcatcaaagatactaataattgatgatgtaattactacaggagcaactttaaagggggctcaatctctactggatgcaatgaatccagagagagtgctgtcaatatcattagccaaaacggttagcattagcgaagatatgcatatttgtggtaattgtgggaaattaatgcgtgttatgcgaaataaaaaaactgggcaacattttttaggttgcactggtttctttgacactccacagtgcaaaaatactatgagtatagattaa

SEQ ID NO: 144184 - DNA, 1008 bp, Enterobacter cloacae
atgaaaactgtatctcctgatacacaaaagcttttagcgattaaatatttaaaaggtattggtgaaaaaacaatatcatctcttcatgcgattaaaaatttttcaagtctttctatcgaagatatattaaacttggctttaaataaaaaaggtagttacagtaattcagatattcatcaagcgatggagtcggctaaaaaacagagtgatatcgctcatgataaaggtcattttataatatcattttttgatgatgtctatccttcaaatctaaagaatgcaagttatgctgcaccaatattattttgcagtggtgatgtaagttgtctccaaaacaataacctgacagtaatcggaacaagggaacctactgagcatggtgtagtaattgccaagagggtcacggaatggtttgtcagtaaaggctggactatagttagtgggttagcgttaggagttgatagcattgcacactccacttgtttagataagggcgggaaaacgattgcagtattagctcatggtcttgagaagatttatccggcaaaaaataaagagcttgcaaaaaaaattgttgataatggtggattgttaatcactgagtacccttatgattcatacgtcgggaaatctaatttcgttgatcgggatgctatccaggctgcagtttcatcgggggtcgttttgatccaaaccgggatttctggagggagtttacatgcatccagagcttctcttttattgaaccgtcctttaattgttgcgggacaatcaaaaacagatataaaaaattgtgcgcaaaaagctagcggtaacatagcattattaaactcagattatgatgaagtaaaaaaaatactacgtctgaacagatatgacaaaagtatgttattacccctgcatgacagtaaccaatatgaagttgttaatgccaagttacttgagttgctacggagtttaggtgataacaatgaattaactaatgggactataggtttggatttttaa

SEQ ID NO: 144185 - DNA, 420 bp, Enterobacter cloacae
atgcgtgacagtgaaatgcgtcaggcattcgcccgactggatcgccgcagccaggaaaaaatgctgctgtcgatgcacagtggaaagcatcaggagctggcgaacgctttactaagggcgcacgcagtgtgttctggactcgatacggaacagctaaaacgtctcggcttctcccgtatcgcatcggagaacgggctggtgattagcgcggttgccgagctggtcgatgcggtaaggaaagacgtcgcacaaattacagctgtccgaacctggtataacaatctcgtttacgggaagaacgacgatccatcagtagttctgccccgtatgacaggccttgatcagttaagcgaacatgtcagcgcgatgctcaaaggcagccagcgccagataaattcagaagagaagcaggccgcctga

SEQ ID NO: 144186 - DNA, 276 bp, Enterobacter cloacae; identical to SEQ ID NO: 115955

SEQ ID NO: 144187 - DNA, 960 bp, Enterobacter cloacae
atgagcaccaatcactcccatgccctacccagcgagcgcaatgaaaaatcgctctggatcgccctggcgctgaccggaagcttcctgctggccgaagtcgccgcaggcattgttttcaacagcctggccctgctctcagatgcggcgcacatgttcacggatgcagcggcgctggccatcgccttggcggctgtacgggtggcgagacggccagccgatgccaagcgcacctatggctactaccgcttcgaaatccttgcggccgcattcaacgccctgttgctcttcggcgtcgctggctacatcctgtatgagggctggcagcgtttgcgcgagccagcgcaggttcagtccagcgggatgctggtggtagcagtgctgggtctgatcgtcaacctcatcagcatgcgtatgcttcagggcggcaaggacaagagcctcaacgtcaaaggcgcttatctggaggtctggagcgacatgcttggctccatcggcgtgatcggagctgcgctggtcatccgattcaccggctgggtgtgggtagatgcggtcgtcgccgtggcaattgggctttgggtgctgccacgaacttggctgctactcaaggaaagcctgaatgtcttgctggagggagtcccagacggcattgacatgggagccttgatggcatctgttcaggccgtgccaggcgtgacagggctgcatgacttgcacgtatgggcgctcacgagcggcaaggtcagcatgaccgctcatatcgtgtatgcgccggaaatagggcccgacgagttgctcaaaaccctcaagttgttgctggctgaccgattcagcatcttccatacgacgctgcaactggagattgttgcctgtgagcacagcgtcgatgggtgcaacttcgtggatcatcgccacaaagaaccgagttctcaaccagaccaagccgcagcccggcaggcgtga

SEQ ID NO: 144188 - DNA, 834 bp, Enterobacter cloacae
gtggcggttacagcggtggtgggcatcacggtggtgggcatcacggtggtggcggtgggtacggaagcggcgggccgccagcgggcgggtggggtaatggcggccttgcttgccccaactgcaaggcatctaacgcgccaggcgctcgcttctgccagcagtgcgggacttcgttggttccttcggcttgcgcgcaatgcggaaccacactgcaaccgggtacgaagttttgcgctcagtgcggcaaggcagcggtctgaccgtgccatgctcgtcggctatgcgcgcgtctcgacgcaggatcagaacctggagctacagcgagaggccttgacccaggccgggtgccaaaagctctttgaggacaaattaagcggcacgagagccgagcgccccggcttggccaaggcgcttgaaatgctacgcaagggagacacgctggtcgtctggaagctggatcgcctgggccgtagcgtcaagcaattggtcgatctggtcagcgagttgcacaagcagagcatccagttcaagagtctcaccgacgccatcgacaccggcacgccgtcgggacggttcttctttcacgtcatggccagcctcgccgaaatggagcgcgagctgacggtggagcggacccgtgcaggattggcggtcgcccggctgtcaggccgcaagggaggacgcaaaccgaagatgaccaaaagcaagattgaatcggccaagaaactgctcgccagcgggatcgctcccaaggacgtggccaagaacctcggggtctcaatcccgacgttgtatcgctgggtgccggcttccggtcacgctgaacaaaaatga

SEQ ID NO: 144189 - DNA, 1803 bp, Enterobacter cloacae
atggttcaaaaaatgaacgtgcacttcaacactgcggctctcacttcaactaattattcaaaaaaagtaaaatcttcactactagatttcatttttattgttcttttttttacaatagctataacgggcattaaaaattcaataccattaccaaactttttatattcaataatacactatatctggcttgcaagtcctttaccgttagcctatatttctcttcgcctattaagaacaccatcattaatttcagcttatacagtctttataatctttaagttgttagattatataagcaacacgaaattatccctcactggtgaagttctttcctggaatgatttattttcagggtctaatatatccattgcaaagcactatcttaccccttggccagtgttttatctgttcctcgcaatatcatttggtataattttattttttatcagccgtgttttctacacgacaaagaaaaaccaattatttcttgcgattagctttgtcataacattacccttttcattttattcccattttagcaccctcttaggggaggataatatcctcgccagaaaaatgacattgattgctatagaaatgaatgtgagctatatatcgtggaattggcctgtaaacctacaggaaaatggaatggcaatgcatattttgatgacaggctcacgtaaatctgcacctttggctgacaaaaataacaaagacagctattcccttgaaaaatcagcaggtagtgcatcattaccaaaacataaaactattatttatgtgctctgtgagtcatgctggtatgacaatgaaaattttaaagaaattatcaatcccttattaaaggaaggctttgtatctttccgtgcgacctccccagtttatggcggaggcactgcaaatgttgaatttgaaatgctaactgggctaccaagcaactcaagagttttatctggaacaatttatcaagaatatgcctcgcagttcaaatcgggttcagacactattgcaagcgttttaagacaaaaaaactatactacttatgcagcacataattatataaaagaattttggcatagagatattgtttacaaaaaattcggcttcgaacaatttgatggcctcaatgaaatgtccaatataaaactacccgatgaaattgtcgcaaccaaaaagaaatggcagtggcaacccgatgattaccttctttataggtcagcaattgaacatctaaaaaaagccgatggaaaaagtattttcatgaatttgattactatgtctacacatggcccatatcctagagagaatgactcgggagagtatgtatatgcatatgaattaaaacaggctattgaacgattcattgatttctcaaaagaagtgcgagaaatagatcctaatgctgttatcgttatctatggcgatcacaaacccgccttgaataaattttttatggacaagaatgtcttaccagcaaatcttttcagcaaaacaggtgatcgcgacaacgattttgtatttaaatgggatataaaaccgactgattatggcgatgtacccgtgtttatttctgcaggcagtaatactaatttacaacaactcgctatggaagcaaataatcaaccttacttttgtgtttcatccctcatagataaacacttaattaattctggtctaccaagcttcagatacaatattaaaaatggttgttccaacacaagccaatcatatcaaagaaaaatcaatgcaatgccttcatgggtatattcaatggccttattcgaaggcaatgaaaaatga

SEQ ID NO: 144190 - DNA, 180 bp, Enterobacter cloacae
atgaggagtaattttaaggtaaacgaactttcagagaatcgcgttgagtatacatgtgagtatatatggcggttctcttatttttcaatttcaattatttcagttggttacgtcgagaatcgcggtgcggccttcggcaccatctacatttttttccttgaaaaacaagcgattaagtaa

SEQ ID NO: 144191 - DNA, 789 bp, Enterobacter cloacae
atgcaaaacaaaatcaaagaacttcgtactcaactatcaatcactcagcgtgaattggcggatatggttggtaccagccaacagcagatccagcgtatagagacagggaaagttgcggccaagttaggactggcgcaggcgataagcgctgttttaaagaaaccattgaatgcagtttttcctggtaacgatactttattgcaaaaagtgcgcaatcaaagtagccgtagtgatgatgatctggaaagcatcgccgctagtggtattgaaatggatggctgcatttggacggtgaaactctggttacgagggcagcaagattatttgctgttacccatttccccggctgataagcgtcgtttttactcatactttcaggaaagagcagcgcctgattatgagcatttctttgttttcgactctgaacagcatcgttatgccttaaatgcccgagaggtgattttccaccaattcttgtttgatggttttccacctatccctgatgaagaggcaaatgaagaaagatatgggaatgtccatatcaccatggtgaatggtggtccggttattgagctttactgtgagccagatgagtctgaggacgaaagtgatggcgatatcggtcagttgaatgcattttttgacattcttgaatcagagccggaatcaaccgagcggtatcagttaaccgacatagatggggaagatgcttttatccgtattggttctattgctatggtgcgagtcgcgcttgacgcgttagaacctgtggaagatgatgaggagtaa

SEQ ID NO: 144192 - DNA, 276 bp, Enterobacter cloacae
atggaaatttactggacgcttaaagctcaggatgacctggagcgtatctaccgtttcgcccttcagtatagccgccagcacgccgatgacgttttggatcgtctgattactggttgtgctggtcttacagcgcatccggcaattggcgtacagcagactcggtatgaacctcgggaagtccgaaaagtattattcgatgattacgaggttcactacgaaattcgtgacaatgacatctatatcgtggatctctggcataccagagaagaacgatga

SEQ ID NO: 144193 - DNA, 273 bp, Enterobacter cloacae
atgttattaacggaggtaatccctatgggttcgcttactaaacaaaccatcagcgcacagatacccgttgaattggctgctgctgttgagaatctggcaattgagttagatcgttctaaaagctggattattaaggaagcgttgaccagtatgctggccgaaagagaacggcgtcaccagagcatccaggccggtcttgccgatgtggatgccgggcgcgtggtgagccactcggacatggtggattttgcaaatcgcttaaagaaatcctga

SEQ ID NO: 144194 - DNA, 834 bp, Enterobacter cloacae
atgcaaacagaagctgaagtcttaactgaccataatgagttaatttgctcaaccagtatcgaacgcatcgtcacaggacgtgatgctgcgctgagcctgatagaaatcctgatccataagcttgatgatatctcacggctaacctccagcatcggtggtgatgtggcggagcattgggcgatgcgacagggccattcctttgactgctggctgatgcaaccagtagataaagcgatgccggtgattacccgcaatatcgaccgcagtatctggcgcgatctgatgctgaagtccgggatgttgactctgatggatgctgaagcccgtagtcagtgggcaaagaacctggaggagggcgatctcccggcgattagcgaagccaacatcctgagtacctttgaacaactccaccacaataaacaggatgttttcgaacgtgggattatcaacgtattcaaaggactaagctgggactataaaaccaacaatccctgttgtttcggtaagaagatcatcatcaacaatctggtgaagcacgaccgatggggctacagcctgaattggggttggcggcgcgatcagttagccgatctggaacggatgttctacttgctggatggtaaaaccattcctgataaccggcatgatgtctccattcggtttatggactttgtgcgcgataatccgcatcagcaggttttcgaagacgattttttcaccattcgctactttcagaagggcagtgggcatatcacttttaaacgccgggatctggtggagaagatgaatgatatcgtggcgaagcattttccggggatgttgcctgcgaaatga

SEQ ID NO: 144195 - DNA, 342 bp, Enterobacter cloacae
atgaaaaatcttcctgcaaatcagcgggtggcgaaaccatgcccgccgctagtacttgtctggcaaacgttgcttacgcgcctactggagcaacactatggcctgactctgaatgacacgccattctgcgatgaaacagtcattcaggaacatattaacggcggtatcacactggctgatgccgttaactttctggtggaaaagtacgaactggctcgtatcgatcgcaggggatttagctggcaggaacaatcgccttatctgcgggctgtagacattttgcgggcgcggcaggcaacgggtcttctgttacgacaaggccataatctttcgacgcgctga

SEQ ID NO: 144196 - DNA, 351 bp, Enterobacter cloacae
atgccgaataacacaccgccagtaaaccatgacatcaccaaaccgtggtgggggcttaaacgcagtatcactccgtgctttggcgcacgcttggtgcaggagggcaaccggctgcactatctcgccgaccgcgccagtattatcgggcagttcagcgacgcggatttacgtcatctggaccaggtatttcctgtactgatgaaacagcttgaactgatgctcaccagcggtgagctcaatccacggcaccagcactgcgttacgctgtaccacaacgaactgacctgtgaagcggatacgcttggtagctgtggctacgtttatctcgctttctatcccacccaacgttaa

SEQ ID NO: 144197 - DNA, 480 bp, Enterobacter cloacae
atggaacaacaacttccgctgtttgcccgtgaactggcccccacagaacagcagacggtcagagaagccttaaccctgctggaacaccagttacgagaacccggcgcgtcgtttacctccagccatgccgtccgtgactggctgcgcctgcagcttgccacgctggagcgcgaagaatttaccgctctctttctcgataaccagcaccggctgattgcgcacgacacgctgttcaccggcaccatcaaccatacgcaggtacatccacgagaagtggtgaaggctgcgctgaaacataacgctgccgccattctcgtggcgcactgccacccgtctggtctcgctgaacccagcgacgcagacagacgaatcaccgaacgcctgaaacaggcgctggacctggttgatattcgcctgctggaccatctggtagtcggcgggatggatattgtctcttttgccgaacgcggctggctgtaa

SEQ ID NO: 144198 - DNA, 189 bp, Enterobacter cloacae
atgagtggtaacggtggcgataacgcccacaacagcgcattcggtggcgggaagaatcccggcatggggaatacaggctcaggcagtaattcaggatcatccggcagcggaaatacaggcagtcattttaatggcccggcagtaacatacggtccggacgggaaatatcccagcagccgcccgtggtag

SEQ ID NO: 144199 - DNA, 693 bp, Enterobacter cloacae
atggcagaaaccctatttagacagtggtttattgaagagacgcatgcggattgggaaataacaactcttgattgtcatattacagtagctaagggattaagctacaagggagccggccttaccacgtcagataacggcattccactttttagtttgaactcagtacttgagggcggtggttataagagtgcaggtataaaatactacaatggtgattttaaagaaaggcatattataaagcctggggatatcattgtagccaatacagaacagggccatgaatatcgactcatagggtatcctgctataattccaaaaacagaaagcgaattatccatatatacgcatcatttatttaaaatcagcatcaatgacgatagttacttaaccaatgcttttctgtactatttactttgctccaaagatatgcatgagcaagttgttgctgcaactaacggttcaactgtaaatcagctgtcggctgacggattacaacgcccagaattcaaactccccccggagtgtatggtgaaagaattcactacacagattgatttcttctggaaaaaaataagtattaacaactcacaaattaaaaacatagaatctctgcgcgacactctccttcccaaactgatgagcggcgaagtacgggttcagtatgcggaagaagcaatcgcatcagtagcataa

SEQ ID NO: 144200 - DNA, 678 bp, Enterobacter cloacae
atgctcaccaccaaaggtataaaactgagccgctggcgggcaacaaagctgatgaaagcgctcaatattatcagctgtcaacaacctggccatcgttataagaaggcgtctaaggaacacattgagatccctaattatctggatcgccagtttgctgttaccgagcctaatcaggcctggtgcggtgatgtgacttatatctggacgggaaaacgctgggcttatctggctgttgtactcgatttgttttcccgtaaaccggttggctgggcgatgtcatttttcccggattcagcactgacaggtaaagccctgtcgatggcctgggaagcacggggaaaaccggctaatttactgtatcactcggatcaaggcagtcactataccagcaggaatttcagacagttactgtggagatatcagataaagcaaagcctgagtcgccggggaaattgctgggataacagcccaatggaacggttcttcagaagcctgaaaacagagtgggtaccggataatggctatgcgaattttagcgaagccagcacggcaataacgaattacatcacaggatattacagcaagctcagacctcatcaatataatggaggtctgacgccgaatgaatcagaacgattgttctggaaaaactctaaagcggtggccagttttagttga

SEQ ID NO: 144201 - DNA, 312 bp, Enterobacter cloacae
atgaccggacgtaacagacgcaattttagccccgagtttcgcctcgaggctgcccagcttgtactcgatcagcattacaccgttgccgccgctgccactgcgatgaatgtcggcaaatccacgatggacaaatgggttcgacaactgaaagaagagcgagcgggaaaatcacccatagcttcacccatgacacctgagcagattgagatacgtgagttgaagaaaagacttcaacgcgttgaaatggaaagggatatattaaaaaaggctaccgcgctcttgatgtcagactccctgaacaattctcattag

SEQ ID NO: 144202 - DNA, 879 bp, Enterobacter cloacae
atgatcatcagcagtaaaacgagtgagaaactgcgaaacttaataaatgaagagaccgagtatcgttctggacctaacttggttaagttttttaatgttcttggctttaaacactcatatggtcaaggctttccatctcgttggaaatatactgacgattgtttagaaataatcaatggaactccgcaacttgacaagtgcataaaagaggcgttcaatccagttaatttcattggtcgtattagcgagttggaacgccttatcgccgagtttaatcagtacttagcttttgataaatggcgagtcattagaaatggtgctgaaataaatttcaagaagcttcaaaaagtagatttgaacgagaaggatttacaatctggcaacctatttgaatctgaatttttaagtcgtgagtttagtggtttcactatttctgatttaggcctagatctcaatgtaactgaaattttgaacaaacgagttgaagaaattgaaaaaacgtatagttcgggagcttatctttctacgatattaattgctggtagtactttagaaggggttttccttgggttagcttcaagttatccgcgagcttttaatacggtgaagtcttcccctaagggacgtgagggtaaagttcaaccatttcatgattggagtctcgcagcctttattgatgtggcaaaagatttagaactaattcagcttgacacttataaattttcacatactttgagggactttcgtaattatattcacccttatcaacaaatgtcatcgggcttcacgccaagagaacacacagctaagatttgtttacaagtgctcaaggcagcaattaatgaaataacattgaatatcgaaaggttacgtgcctaa

SEQ ID NO: 144203 - DNA, 837 bp, Enterobacter cloacae
atgaaattaaataaattattaaattatgatttcataaaagactttgagcagcttttagttgctgacttcgaaaaggaattattcatagcgagcctaaggaattattgttctcatgggaatccgttaagatttcacaattttgctttctcaatgagagaacttgttttacgaattattgatcgcagagctcctgatggcaaagtcaagtctgcaacttggtattcgagagaaagtgataaatttgaagtaacaagacgtcaaaaactcaagtattgtgcacaaggaatactgtcagacgcctatctaaatactatgctcttaaatgatctaaaccagagtattaaggactatctcaaagagtttaacttcttcaataaatatactcatattacagaaaaacactttaatgcttgtcccaagcagttttacacagatatgaaatttattatccagcgatctagggaagtgatcgaagagattgattctttagagaatttggtagtcgaaagcattcctgatacattacaagatctcctatttgaccacgttatccataattttccaagtgagctagacatcctagcgtacaacgtaatagtagaatctgtatctccagaggagcttggggttacttatctagagaacaatggaataactgtagctgtctcaggtacggtttatgtaactcaagaatacggtaagggggaggattttacagaaatacatgaaaactatccgtttagcatttctattgagatgaatgttgaggatcctactgacattactattgatcaatctgattttgaaatcgatacgtcatcttggtttggcgtttaa

SEQ ID NO: 144204 - DNA, 885 bp, Enterobacter cloacae
atgaaaaaaataattttttctaaaaaaataattaatgaaatatataaatgtttgaatttgattttagtggaaaaaaattttgcatctcctagttttataagtgttatcaattcatttagaatcagtgatttatcgagcatggacgatgttaggcctagctttgctaatttaaatgatcttaatcattgggctgggaataatggatatcgtgttgatgaggaaaatcgttacgggtatgtttctttagtagggcaaactaatagaacagcttcttttaatttgatttattgcaaaaaagaatttaaaaattacagagcatataatattaagcccgccttgaaaaccttgatgcagtcaaacccaaagaaaaggcatttaatacatgtttttgatgaaataaaaatagttctctctgatattaaaaagcacaataaattcaacaaaaaactatccaatgaattagattctcttattgattatgtcgagattaaagtaaactcattcagatgtgccctgaatgatgattcagaaattattgattttgaattaatactgaaatttttagatgtagaccatgtaaagtgtaagagttcagcaaataatgatgaatggatacttatgtttcctattgctccatgggtaaatagggaaattggaagaagatttgaaagaaaaaaaagcctagaaaatttaaagctaagtaatattggttttttgaacagtattcaaatcattaaaatttttgcttgcgcagtcccacctaataacgattctgaatgtgttattaaatttgcagaaattttatctaaaatgtcatctaggacaaaagacgaatcctgcttgataaaaaaaagtatttatcgcatgtataatatgaaaaattaa

SEQ ID NO: 144205 - DNA, 1929 bp, Enterobacter cloacae
gtgattttgtacatagctgaaaaaccgagtgttggcagggcagttgctgatgttctgccgaaaccacatcaaaaaggggacgggtttattagaaccgcaaacggtgatgtggtgacttggtgtattggccatttactggaacaggctgagcctgatgcctataaccctgactttaaaaaatggcgcagagagcatttacctatagtgccaatagagtggaaatactcggtaaaacctgccacgcagaaacaatttaacgttataaaaaaattaattaacgaagccgatgtgctggtcaatatgggcgaccccgatagggtcgggcaaattctggttgatgagattatcaattattgcggtgtcccaaaagagaagcgtgaagcagccaagcgctgtttaattaacgatatgaacgccgatgctatccaacgggcgttaaatgacctacgccgcaatatcgactttatccctctggctacttcagcattagcgcgagcacgcgctgactggctctatggcatcaatatgacccgtttatgtaccttacgagggcagtcatcgggttataacggtgtgctatctgtaggacgggtacagacgccggtattaggtttggtcgttaatcgtgatttagaaatcgagaattttgtctctaaacccttttatgacgtgtttatcgatcttaaaaccgataaagaccaaatttatacggcaaaatggaaaccgagtgccgcctgtgaaccctatatggatgaagaggggcgactggtgctgaaaaagctggctgaaaccgtattgaagaaggtaacaggccagccaggaactgtggttgcggtaactgaagaacgggcgaaacaagctccaccattaccctataacctgtccgcactacaaatcgatgcttccagacgttttaatctaaatgcccaaaagacgctggatgtttgtcagcaactctatgagaagcataagctgattacttatcctcgttcagattgtcgttatctacccactggacactttggtgacactcagaaggtcacccaagcaatcactaaaacagtcccaggactggcagcagcagttagcatcgctgatctatccgtcaagtccaaggcgtggaatgatgataaggtcagtgcgcaccatgctattatcccgaccagtcgtggggtagataccagccgcctgtcactggatgaacagaacgtctatgaactggtcgccaggcagtatctgatgcagttctatccgccttttcaatatcaggaaaaacagatcgataccgaagtaggtggtggcttgtttatcagcaggcaaaaagaggtggtggataaaggctggaaagcattattacccgagcggaaatcatcatctgaagatccagagttctcagccgtaaggttgccagaggttatcaaaggggaaggggtactctgtattgatggcaagctggatgaaaaaaacacctcaccgccacgtcactttaccgatgcctctttgctatcagcgatgacgggcattgccagatacgtgaccgatagagcgattaaaaaggtactgagagagaccgatggtctgggaacagaagcgacccgagcaggtatcatcgagttactgtttaagcgtgactatttgaccaaaaaaggcaaagaaattcacgccacggatattggccggagactgatcctctccctgccagaagccatgaccaaacctgatatgacggcgcactgggagtctcagttagaagctatttctgagaaaaaaatcaagtatggtcagtttatgcagccaatggtcgatggcctgcatgtgtttattaatcaagtcgataatattcgttttgaaggattgaggggcttaggcaaggcttcctataaaaagcccccagtaaaaaaatcggtaaaacgccagagtaaagactga

SEQ ID NO: 144206 - DNA, 474 bp, Enterobacter cloacae
atgaaccaagggatcttattcagcagcagtaaaaaatttcgtcatattttaaaccagctgaccagtcataagatattgcgtagtgatctgattaatatagcaatgactgaatttcgactctctgaaaaacaggctgtagggctggttgatcgtggtatctataaactaaagcatcaaggccttgtaaaggctaatgggaaggtaaaaaatatcagctaccagttttcttttggcgtgataagccattcaccgcttcatgtcgttaatgatgcagcgcttgtgctctcttctgaaaagcaaatattagaaaaagaattggcgcagatccgctacgagctggaagcctatcaagagtttctggaaaaaataccgaaacagaagcttaaaataattagattacaacaagataccgctgaaaaactaaatcagttacatggtaagttacgggcagttaaccagctgttatccctgtaa

SEQ ID NO: 144207 - DNA, 216 bp, Enterobacter cloacae
atggatgaaggctcggctagcggacgtatgaatcattacgaaaaggggcggcatatcccggatatagatatgctcaagaagctggcgagtgaacttggcgtcccactaagctattttttctgtgaagatgagttgagtgctgaactcgtgtgcctgtttaataatctcgatgaacaggcaaagctgagtttgattagtaagttgcgtcaaaattaa

SEQ ID NO: 144208 - DNA, 945 bp, Enterobacter cloacae
atgcaggaagttgatccagtttatacaaaagttagcatcgaaactgggaaaaggatagaaaaccaactatctaatcgattagaaaaaaaggaaattacagcatcctttcgtttgcagggttctgtaccgcttaacatccatattaaaggcgttagcgatgtagatattcttactattgatgaacagctattcgttttttcaagcgaaggcagcaaagcaaatagttatgctttatccaagaaaaaagctgtagatgtactccagattctacgggaagaaattgaagatagcctcagtgctgcttttccggctgcaaaggttcaccctgaaaactctaaagcagtaaaaataactggcggctctttagccagagatgtggatgtagtcccggctgtttggtggaacaatgccagatatcaagatacaggcaatgaagttgacagaggagtggcaattttaaacaaaaaggataaccagcgtatttataacacgccgttccttcacattaattatattgagaaccgctgcaacacaactctaggcggcttaagaaaatcaataagattacttaaaaatattaaagcagatgcgcatgaggaaaacatagaaataaatctcagcagttttgatattgcttctattatgtatcatgcagatatgggaaacctcctaaggggtaatttatatgaacttgcaatactaagcgaaacacagcgctggcttgactggttatggcataactttgacgaagcaaagaaactggaagtccctgatggtactaggaagatatttgatacagacgaaaaaagggatgaactgctaaaattatctctgcaagtcgatacaatattgacagctgttcataatgaaatgaatcccatttatcataaagattcaatcgatgagggaatgagagaatatttgagcaattcaaaagtcgaatag

SEQ ID NO: 144209 - DNA, 231 bp, Enterobacter cloacae
atggtctcgaagagaaatattttaaccgtattctctatctatacattcacctcttataacatgaacaaaaaagagacaataaaaaatttcattcgatttctcaaaacgacgaatgaaagtacattccataatgctttttcatttcgcggtggtaacattttgtatgtaagcaacaaaaacatgttgaaagagaaaaccaaccatgacaactatatcagattagtcgcttaa

SEQ ID NO: 144210 - DNA, 609 bp, Enterobacter cloacae
atgctggaaaaggtagacgtcagctgcaaacccaatatcgcctcaacgggaaaaatgaacggcttttcatttcagtaccaaggtattgcctttaaagcctctcaattgggtaaaaaatatggctggtcttccctgcaaacattgattgatttcgtaccggaacatctgactttactgaaacaagcacaaaagccaacagtacctgcacctgtgccattaacagtgccaatgccaatgccaatgccaatgccatcatgcgagtctgaagaacaggctgcaaaccgggaaacgattctggagaaaatccatcagcttgaagaaaaaattcgtctggaaagacaacaggagacagtgggtatcattcagctcaggagcaagctgcacaatacaacccgtcagataccccgccagcgtcgcctgaaggcgtggcttttactactcagccaaattgttgtacttctaaggcgcaagggactgtcactgctgcatgccacaatacatcatttccgcaagattcttcatctgcacctattagaacccattcctttcacagccggtcattcccttcaggaacaatcagttagtaataaccagcacctcacaccataa

SEQ ID NO: 144211 - DNA, 456 bp, Enterobacter cloacae
atggcgactacccctggattttcttacgcgctctctgaggaaagcgcagttcatcacctcatcagcacttcaatttccgattccgcggatcttttcgagctggccgacgcctgcactgcgtatgtaagcgtgctggtggaaactgacgacgcagtgacgtttgccacgctctgtacgcgattgctggctgcgctgaagcggctgcgggagtgctgcgatgccgagctgccttcgcatctggttgaacagttgattgcgggggaaaagatgacctcctgcgtaccggactgctggcaggagacgacgctgcaggtggactatgccgtagcgttaacgcttgcggtaatgggagggacgttgcctgtgagcgtggcgaaagaactcaccgggctgctgcatgatatggtctggctgctggcggagtttgtgaaggagccttatatttcggcacattga

SEQ ID NO: 144212 - DNA, 177 bp, Enterobacter cloacae
gtgattaaagggaatatctatattttttgcgcccagagtaacttgttggtatatcgtagcgttaacaccaattttagatgcaccaataacaatgccctgcgaatgaggaataaagaaaccaccacctatttcgcaattagaagcaatctcaacaccaaagacaacaaaatttattag

SEQ ID NO: 144213 - DNA, 192 bp, Enterobacter cloacae
atgaatatgagtgatgctgaacggcagctggttgtttctgttatttctgactgcttacgccagtccgggggagactccggtaagatgatgctggatgcttattatctggccgtatccgagacagatccctgtgtcagggagtgcatgctggcgctccttgaatcagttcgtattaaatatgtcaccggctga

SEQ ID NO: 144214 - DNA, 183 bp, Enterobacter cloacae
gtgagttcaaatgctgaatggtatatcggtcatgctgtggttgagttgcttgtacaggagcgtgttgtctcgatgttctctgttattgatatccttgagcgacgtctgcagagcggtgattcttcaaaagacgagtttatggagattctggaggcgatcgaaaagctactgggttatgtctga

SEQ ID NO: 144215 - DNA, 243 bp, Enterobacter cloacae
atgacggaattctgttttcacttagaaatgataaccagacagggaaaaacacacgtgaaccgtcaggaatctgccgctctcaacatggctaaatttatccgcgcccagacgctgcttttgctggaaaaaatcgaccagctcgaccttgatgacgaagcgacagactgtgaaaaattacacgaacaggcagaaaaactttatcagaaactccaggcaagactggactcagacataacccagtag

SEQ ID NO: 144216 - DNA, 1038 bp, Enterobacter cloacae
gtgttcggaaaacaattattaaactacatgccaggtttacaaactttgttagcctacgataaaagctggctaaaacatgatgttaaagccggcttatccgttgcggctgtcgcgctacccgtggctattgcctatgctgaattggcaggtgttggggcaatagtggggctttattcctgcgttttaccgatgatagcgtatgcactgtttggttcttcacgtcagcttattgtgggccctgatgccacgacctgcgcggtgattgcggccgtcgtgtttcctctttctgcaggtaatcccgaactgcactggcagctgaccattatcatgacgttgatgatgggcgggtggtgcctgcttgccagtaaattccgcctgggcgcacttgccgatctgctttctcatcccatccttacgggtttgcttaatggcgttgccgtgacgattattgtcgggcaattaggcaaggtgttggggataaaactcgacgaagcgcaggttattgagaaaataatggccttgccaggacgtctttcagacagccatttattaaccgttggaatatcgcttttaacgttaattattttaatagttattaaaacgtatcgcagccactggcctgcaccgttgattgccattgtgatgacaacgctactggtatgggcgacatctgcacaacagtatggtattgccactattggaggggaaggcttccagcctggtttacccgtcgttaactggggcgcgttccagcccggtccgatgcgtgatttagtgatcccggctttgaacctggcgctggtcagctttgtcagcctgatgctgaccgcccgcagtttcgctgcgaaaaatggctatgaaattaatgctgatgcagagttcagagcgctgggtattgcgaacattatgtctgggttatctcaggggtttgctatcagtggagcagattcccggaccgcggttaatgattcagtgggtgggaaaagtcagctggtttctgtagtcgcagccggtgatgctgccaacttactgatttag

SEQ ID NO: 144217 - DNA, 1608 bp, Enterobacter cloacae
gtggtgctgggacttatcttcctcaagtatgtgtccgatgccttcgaggcgcgtcagcaggagctaatcaccttgttccgcgatgtcggcaacccggacaacatctatgccatgtcgcgcgacggttacgactctgatgaagagtacgcacaggcgattgtggatgaactggaggtggaagattactacaccgaaaagaacatcttctgggtgccgaaagccgcgcgctgggacacgctgaaaaacaaagccatgttgccgaccggcaccgtgctgtgggtggatgaaaccaccggcaaggatgtgacgctgcgctctgtgtcctggctggtggataacgcgctcgatgaaatcgaaaaaaccaacccgaagctgaaaggtattctgaaccgtatcagccagtatcaattgggcaacgaagtgttgaccgggctgattaatactttctctgacgccaacttcagcaacccggaatataacggcgagaagctcaacttaaagagcaaagatattctcggtcacgtgtacgaatatttcctcggccagttcgcgctggcggaaggcaaacagggcggccagtattacacgccaaaaagcatcgtgaccctgattgttgaatgcctacagccgtataacggccgtgtgtatgacccggcgatgggttccggcgggttcttcgtgtccagtgaccgttttattgaagagcacgcgggcgagaagcagtacaacgccgctgagcagaagcagaaaatctccgtttacggtcaggaatccaacccgaccacctggaagctggcggcgatgaacatggcaatccgtggcatcgactttaattttggtacgaaaaatgccgataccctgctggacgaccagcatccggatctgcgcgccgacttcgttatggctaacccaccgttcaacatgaaagagtggtggagcgcgaagctggaaaacgacgtgcgttggaaatacggcacgccgccgcagggcaacgccaacttcgcatggatgcagcacatgatccaccacttggcccctaaaggttcgatggcattgctgctggctaacggttcgatgagttctaacactaacaacgaaggtgagatccgccgcaacctgatcgaagccgatttggtggagtgtatggtggcgctgccgggtcagctgtttaccaacacccaaatccccgcctgtatctggttcctgaccaaagacaaatccggcggcgacggcaaagcacaccgtaaaggcgaagtgctgtttatcgacgcgcgccagattggttatatgaaagatcgcgtgctgcgtgatttcacgcgtgaggatatcgccaaaattgtcgacaccttccacgcctggcaggcggataaagactatgaagacgaagccgggttctgcttctcggccacgctggacgatattcagaaaaacgactttgtgctgacccctgggcgctatgtgggtgctgccgagcaggaagaagatactgaaccctttgccgagaagatggcgcgactgacggctcagcttaaagaacagctggcagagagcgcgaagctggaagcgcagattaaggcgaacctgggggggctgggttatgagttttga

SEQ ID NO: 144218 - DNA, 1239 bp, Enterobacter cloacae; identical to SEQ ID NO: 26659

SEQ ID NO: 144219 - DNA, 225 bp, Enterobacter cloacae
atgaggcgtaacagtcccgttacacaaaacgagtatttacttaacgatggctcgacgttaatgtcgaccaccgataccaaaagccatattacctatgctaattccgcttttattgaagccagtggatataaagaagaacatcttggtaatgactccaaattattgatagtgttttatgttcagataatgcccgatgactttatcatgcagctccaccgattttga

SEQ ID NO: 144220 - DNA, 405 bp, Enterobacter cloacae
ttgctttctgatattgaacccattgaagggctggttaacgctattcgggcaggtagcgaacgcgcagagcgggtaagccaggcgttgttaaccccggaacctcaaagtacgggggaagaagacgaacaggttatcgcgctcacgcactccgaacgcaaagtattgcggctgttaggtaaaggatgggggattaaccaaatcgccacattgctcaagaagagcaataaaaccgtcagtgcgcagaaaaacagtgcgatgcgacggctgtcattacgcagtaatgccgatatgtacgcctggataaacagtacacagggaatgcgagagctgagtttgatgtcagcctatggagagttcgaggaatggaaaaaaccgattcaacaagacataggctttgttgaataa

SEQ ID NO: 144221 - DNA, 561 bp, Enterobacter cloacae
atgggctggtcttcgttggttaggataaccattggtacaattctattagctggtttgtcgttttctgcatacgcgaagaattgcaagaaaggtataccatgcggtaattcatgtattgcagcatggaaaacatgtggcggtagttcgcgttcatcttctacatttaaaaattactcttacccgtcatcttctcttcacagttcaatccctaaatcctcttcgcattccccatcagctaaggttgacggtaaaaatacggcttcaaccacgaaaacttacctgtgtcagtatgctattgcagcaatacagaatggcagaacaggcgctttacgtgtgcttggtagtgccgaggtgacgttgtatgtcgatagcttcaaagctaaccgtttaaacggtacatacctgctctcgccaaagctgaaaactaacggtaagttgatgatggcagatgataaaagcaaagtgtacgcctatgatccgtcgctgatgaactttgcaattagtgaccgcatcgcaagaagcactgagcaatgggataattgtcaactggttcacaattaa

SEQ ID NO: 144222 - DNA, 615 bp, Enterobacter cloacae
atgcctaacaattatgaagagagatccgctttagttatggggcgacttttcgctttacatcttactccagatcgtttgatgaaaattggagcatttgtggttcagtatgggttatttgaaacgacacttgagcgagcggtttggacattaactgaaactgatgtgcaaggtgtaagaccttttacagagaaattgaatgctgagggtatgttcaatgccttcggtgctgggaatgcgaagttaagcgaaaaatgcaactcggtattacaagccgcttcattaactgccattgatttgtccaactacagaaatagccttatgcacggttatcttatgccatttgaaacaaacccttgtttcttaagaaacccaagctggaacggcgaagttagaaagaaaaaaccaggtgatgcttatgtaggagaacctctccttgatttagccattatttcagcatgtactttgtacagaatagctattcatgcgtctgctgtatttgatgatgctgaaaacgaaaaagaaattgaggcgttagagtcagacgttagagaggccggaagttttgcaaatgagttgcgttatctgagaagtttgatgaacgaagagaagttttaa

SEQ ID NO: 144223 - DNA, 198 bp, Enterobacter cloacae
atgaaacgcttacttgtgctgacgctggcgctactgccagccctggcgaatgccacacagataaccctgattcttagtgatgaacaggagactgacaattctaaggtgtgcatctacgaaagcgccaactttacggagacagttacggttaagccgtcgcagcaatgccgctacactatgacctttgaagaggagtaa

SEQ ID NO: 144224 - DNA, 315 bp, Enterobacter cloacae
atgaaaaagattcttatggcggcagtattgattgcaacggctactaacgcttacgcgttgagccacggggatagagccaccctaaaggaaggtacatttaactgtaaaaagctgaccgatttttacgagatggtaagtaacattcaggacaaagaccaacaaggtatgattggtctcattacttccggtaaatgccgtctcctaaaagaatcgatgacagttgagattcagaacgtagacgaaaagggttttgtttccttcatcaccccaggtggtcacggtggctgggcagttcaacagttttttgaagagtaa

SEQ ID NO: 144225 - DNA, 387 bp, Enterobacter cloacae
atggcacgacgcaaaaacgcagtattcgaagactttttccagaacgggcgcaaggcgcaacggttagaagaggttgagcgccagctaataaacgcagaccaccagcacagccgccagcttgaagcggaggagtgcagcgcggaaaacatggaagaccattttcctcgtattattccaaatacgccgctcatcgagtggctaccgggctactacatccatcgccttgagtgggaagcgtaccgcgacgggcgcagcgtgatagacgcgcaagaaccgcgccagacggttgacccggagctaatctcgtaccagtggaatcactttgtagttaactcacgctttccgtggaagctggaagatcacgccatcgtttacaccttcgtttag

SEQ ID NO: 144226 - DNA, 1224 bp, Enterobacter cloacae
atgacacaaaagcaacaaataagaacactgattgaccatttacaagcagaaaaatacgcgtttatcagcgcccaaggtaaaatactcctccaccacgtccccactaacaccaatcatggaacggacattctccgcaggttattcaaactggctactggtgcaaggtggcagcaacattatttagatgatctgctggtcgaagtacctttcatcatggtgcaggactttaatccagcgaagccatgcggcatcgatcagaatggaacactgaacatgttcaggacgtggcgcagcgacaagccaccagcggcagatctcaccctatggcttgagtatctggcgaggcttttcccagaccaggcagaccgcgacacagtgagcgcatacatggcgcacatgttccagcacccggaacagcgcccgagctggcacatcgttattccgagtgataccgggacaggcaaaggttttttgttcaatcaaatcctctcgccgctcctgatgcaccagacaacgctttactccaactacggcaccctgatgggcgtccacaatgatgcgatggcccgaacaatcctgatcctgttcgatgacccaccgccagccaaacataacatggcagatcggttaaaaagcatccagactgaaccgatgatcgagattaacaggaagtatgagcagcctcgaaaggtagccacttacacccggtttttcacgttcagcaacagcgagagtccgattgaagtggaggcgaatgatcgccgccattactgcacccattacatacgccaccgggtgaacagggaagaaacagcagtgtttattgcccgtcttgctgattggctcgccgtgggcggtctggaagccgtacacgcctggctaatggcttacccgttggaatccttcaatccgtatcgcccaccgttcagcgtggcacttgagcgcatgaaacaggccagcataagcgaagagcagaacgaagcggagatcttcaccggagaaaatccggcgtttgcattccaggcattccatgacgcttgcccatccttcccgcgagcacaggacgcgagtcaatggctacgtgataacgggtacatgagcgccagagtgaacacccgcgccgggttaaaatcagtctggtatcgagcgccgcaggacggcagcagcaagatcccggagagcgttctctcctggtttgttgataagtattacccgacccaatga

SEQ ID NO: 144227 - DNA, 153 bp, Enterobacter cloacae
atgttgaaactcattattgcacgcgatgtgctcaactggattgatgcaaacaagggcgaggacagccgccctaccttcattataaaaactttacgaaatgctatgaacgagggcatggatgacacaaaagcaacaaataagaacactgattga

SEQ ID NO: 144228 - DNA, 210 bp, Enterobacter cloacae
atgaccaaaaacccgcaacaatccttagcctggttaaagcactattggaaccaccagcgacaggaagaagtgcagaaatcagaaatcaagctcgaaccactgaacaagcccgtgttattcgataaggtagttgaccgcctcaccattggtgaattctatcagtggctcttatcagagggttacatcttcaaagctaaggatgacaaataa

SEQ ID NO: 144229 - DNA, 435 bp, Enterobacter cloacae
atgttcattcactatgcgcagaaacgaaacacgttaaagctggcccagaaaaacgcccacgcctaccgccaaatgatgaccgccgagcagaacggcaaagattttataacaggctcaccactgacagatccggttattgaccatgaccacagaacggggctttgccggcttatcctgaaccgggtgacgaacgccattgaaggcgattttaatcgcatcttatccggcattgcctaccgcgaagactttaccccgctcctgtgggaagtgtatttcggtcatcatagcgacctttacgacgagttatacgacgcagcgctcgaacgcagaaacggttatctgaaagaagatgacttcggatttatcttaaaacagtttgcggtgtattacgccgtccgctttgaccaacttcaccacctggagtattaccgatga

SEQ ID NO: 144230 - DNA, 465 bp, Enterobacter cloacae
atgactaaactaccagccgcattaatgcgtgaagtaaaagcagaatttaaggcccagcgcgaaagttacgttgcgggacacattgaaacccatctggctgatgtgttcagcatctcagacttttacccagtgatcctcaccatgctacagcaagctatcctcgacgggtacaccatagccgactatgaccgccagccgttctataacgccggggaacctgcaattcgcattgtgttaaaccgcaagcaagatgaaatcgaggctgaccgtactgccctcaccgcagaggcagaagcccagcttatggcgtcccttacgtctcaagcagaagaatattacgcccaagccgtagtcgaagaggaacgccgtcaacgtgcagaagcagccgcgcaagccgcagcagcagccgaggcccagactttcgccagccgtttacgtgtcgctctcgcagagacttcgaagtaa

SEQ ID NO: 144231 - DNA, 375 bp, Enterobacter cloacae
ttgaaaagtcagacattaaaaaccattgccgaatggctcccccgctttgagttccacgtttaccgcgacaggctgcgccagtacggaatgccaaccaccccgcaacgagtggcgtttatctactgggcagaagaagtgatgaaccactgcttcacctgggatgatttcgtaaacgaatggagcaatggcaacgaccaccgcgagatcaacaagtggctgcaatccgggtttatcggaatggaatactacgaagggcgcgttcattacgtcacgtcttacctcgtagggggaaagagtccattttattgcccacgctgcaaccgcatcaacatcaaacgcctcttagaaatcaaggagaaacaaaagaatgactaa

SEQ ID NO: 144232 - DNA, 1059 bp, Enterobacter cloacae
atgagtagccgaaacagcggtcttaagcccataggcgcggtaataggcgactctggcgggctactggaacgccttgaaaatatcaggaagcggaacagtgaccgaactccggctgctgaacgcggtagaccgtctaacgtctcgaccgtgcatgaacagatggaaagggcaaaagagcgggacaaagcgttgtcacttgtccgcaagcctccacaaggcgacgctcagccagatttttttgcgcccagcctttatgacgtgggcggccgcgacaatcgcagcgtcatggatgtggccgtgttccgtttatccaagaaggacaagcgagccggagaactgatccgctacgacctgccggatggatacgtggaagtgtccgcaggagcgcacggaatggcctctgtttgggactacgacattgtgctgatgatggtgtctcacttgaccgaagctatgaaccgctatcgagaaggaaagggtggcaagccggggagagtgtttcggctgcatgttagcgacatcctcagatttgcccgacgtggtaacggtagtagtcaggttaagggagtggaagccgcgctagatcggttgcggggtactaccatcaagacagtgcgcgaaagcggcaagttccggacaaccgaagccgaggggctgatcgcgcgctatcgtgttctgtcacgcacggacaccaagaagataagttctgtcgagattgaagccccggagtggatttatcgagaagtcaccgagggcaagcggccggaggtacttacagtacaccgggactactttctgatcgagccgggcataggacgctttatctaccgactggctcgccgtgccgcaggcagggatagcgctaaatgggctttcaagaccctttacgaacgcagtggaagcggtggctcgttcaaaaaattctgtttcttccttcgcgggatcatcaaagccgatgacctgcctgaatatgccttgtgcgaagaagcggggaaggatggccctctactggtcatgaggcaccgcaattcctcgtcggaaccgctgggcggttcctaa

SEQ ID NO: 144233 - DNA, 309 bp, Enterobacter cloacae; identical to SEQ ID NO: 16561

SEQ ID NO: 144234 - DNA, 174 bp, Enterobacter cloacae; identical to SEQ ID NO: 16562

SEQ ID NO: 144235 - DNA, 1500 bp, Enterobacter cloacae; identical to SEQ ID NO: 16563

SEQ ID NO: 144236 - DNA, 792 bp, Enterobacter cloacae; identical to SEQ ID NO: 16565

SEQ ID NO: 144237 - DNA, 1077 bp, Enterobacter cloacae; identical to SEQ ID NO: 16568

SEQ ID NO: 144238 - DNA, 1791 bp, Enterobacter cloacae; identical to SEQ ID NO: 16569

SEQ ID NO: 144239 - DNA, 198 bp, Enterobacter cloacae; identical to SEQ ID NO: 16570

SEQ ID NO: 144240 - DNA, 927 bp, Enterobacter cloacae
atggctaacgacattaaaattccttttcaatactgcaatattgaacgtgcttcgagattgctgggttgtgaggttagcgacctgattaatttaggtgttactaaaaaaatatctttaagtctaaatttgtttgatgctcgcgctgttttatatatgagaactgacagcaaatctgcatgcgactggtttgataccagaaaggcaaactccaccacatccatgatgggaagcaatgttactgaattttccagacttcatctctacagatgcgattacaatgaggaaacggaagaaacgattcacgtgcctttatttggtcaagatacagaaaatgggtgtttcagttctattggtaaggcttatgggttgtggcgtctttggagcggattagaagagctacaaaattttggagagtatgccctaagtggttttgaattaaccccgtgccatccagaaactgataatcccgccgtacagcttttaatggttggcgaagatagcgattatgatgaagaagacgatcaagtattcaaaaataaaatctctataaatgatttgtggattactgctcaggatataaggcggcttcttgactgtggtggcgattatttcacgctgacagatgatattgaatttgtagaacctcataagatgaatggcaatgaaattgtgcatcattctgctgaaagacatgcaagaaatcgagagcaaattttaatggcagccatgcgcttcaaagaagagcagcaaaatgcttttaatgagagttgcagaaaaacagatggaactattaactattctgcctgggcccgtgagttgatcgccagacctgactggttcatcaatggtgaattgccaataaaaacagaaacgaaaatagcagcaatattaaacaatgcgcataagaggccgagcgaaagaacatag

SEQ ID NO: 144241 - DNA, 693 bp, Enterobacter cloacae
atgaaaaagattaatgccctccacgggcagggattcgctcaccctgtagccagccaacacgatatttcagcgaaccgtaaacaggttatttccggtgactggtcgcccattaatcgcggtgaatttacgcttgccgatctggggttgcgccacaacggtaacgggctggtgtggctgcgttccggcgtgtccgtgcatgaggcagaccatgatgcagggataagcggcaaggacaagaccaaaggaagggttaacggccttccttttgaatttgtcggccagtggcaggaatacccgactaaacgcagctttgccgtttcagtatctacggaactacggcgccagtattacccggacgatgccgcattcagtaaggcaatgcatgaggctggttatgttccggtgcgcactcgcaaactgaccggaaaggatgctcgtttttggctgtaccgtgtaacgggcaatgataagggggttgtcgcagcagaatccgcgccacacaaggcttccgcgcccgttgtccagaccatgacaaagccgcatccgtggtttaaacgcgtggcgctcgatggtaaatggcagcacgtctacgccgaccatatccgctttctggcgaagaagcgtcaccgtgtagatggtgtacgtgtgcagggttataccgctggcgggctgaaagtggaggctattgtatga

SEQ ID NO: 144242 - DNA, 213 bp, Enterobacter cloacae
atgagacaggttccttttgaagtcctgatgcacgccgaagacgcactggcatacagcaatcaggctctggctatgctggaaatctggatggactccctcggcgaaggtgatgaacacgaatctaactgtgtggccgccattttcagcttggttcatgagtcaaaagatcgtctgcagaaagcgcaggaggcttacagtgaaaaacgcgcctaa

SEQ ID NO: 144243 - DNA, 339 bp, Enterobacter cloacae
atgagagccggggggctgagaagccgcgtcactattcgggtattcactacccacagggagccgtccggtcaggttgttcaggtctgggaagacggggaaaccatatgggctgaggttaaggggatcagtggccgagagttaatggcgtcaggtgccgaggttgccgaagcgacgatccgcgtttgggtgcgtttccgccgtgatattaccgcagccaaccgtctgaaagtgcttactggcccgtttgctggcagcactctcaatattatcgggcctcctattcctgattcggaaggtacccggctggaaattctctgcaagacaggaacggaaaaatga

SEQ ID NO: 144244 - DNA, 783 bp, Enterobacter cloacae
atgtctgtaattcaggatatcgatgcaaactcagttaataccaagaatcttgacgctttaggttttgcgactgatgaacagatgatggctctaagagaacagcaattggaagaacagattgcacgttacaaagaacagaaccaacagatgtacgatgcaggattaatcagtcatgaagaatttttgaaacagaaagaaactcttgataaggcttattcagttaaatcaaaagctatcgctctggcagaaattcaaaccaaaatgcagatgtatgatggattcgcacaaggtatgtcaggtgttatcagtggcatcgctggtgaaaatagtaaagctgctcaagctgcattcgcagtagctaaaggaacgtctattgcaaccggtatgttaaacgcttatgagtctgcgactactgcaatggctaagtatccaggacctcttggttacgctctggctgcttcgtcttatgctcaagttatcggacaagtcatgcagatgaaatctgttggattaacaggtatggctcacgatggtctgagtgaagttcctcgcgaaggaacatggctgcttgatggtggtgagcgtgttgtggatcagagaaccaacggtgatctaaaagatttcttggataataacaaggatacgggaggtcaacagacaattgacgctagtattcatatcaatggcaacgttaccgatcagaaatggttcgctgaacaattgaagaaacagcaaaaaacaatttcgtctattgttcaagaccagaacagacgcaaactgtga

SEQ ID NO: 144245 - DNA, 198 bp, Enterobacter cloacae
atgacagtagttcttacagcaaaacagattgaagacttggctgtcttcgcaaaagaagacggcgcgcgtcaatacaccatcacaaccgcaacaattccagaacttgaagccgatgatggcgagattatcccggaatacacgggactggtcgcttactcagattcgctggagcatggtgtgttgcaactcgacgactag

SEQ ID NO: 144246 - DNA, 348 bp, Enterobacter cloacae
atgctgctatgttcacattcaaccgtgggtaagtttccatacccgccaaaaagagaaaaaccaatgagcgaagctaaaccgcaggacggcaccaccgttaaaggctatcgaacccttaccgctgacgatatcgcgcaaatgaatggcctgaaagaaattagccgtgatttttgcgagcagttggaccttgaacgcacacacctatctttgcaggttgtagatgccggttctgatgaggctagggaacgttcagaggcgctccgctgtctggcaatcgcgcgtacaaaaatgcaggaagcctgtatgtgggcctgccgcgctgtagcgcgtccttaccccgattgttaa

SEQ ID NO: 144247 - DNA, 591 bp, Enterobacter cloacae
atggcgagcaaggggcaacatcgcaagaatcgcaggggaaagcacaacgtgaccaaagacgaaatatttaatgccatcctcggcaaagagggcgggtacgttaatcaccccgacgacaaaggcggcccaacaaactgggggatcacgcaagcggtagctcgcgcacacggttataacggtgatatgcgcaaccttacccgccagcaggcgctggatatcctgactgctgactactggacagggccacgcttcgaccttgtttctgaggtatcaccagccatcgctgccgaactctgcgacacaggcgtaaacatgggcccatcggtgcagaccaaatggtttcagcgttggctgaacgtgttcaacattcagggcacgctctatcccgatctgattgcagatggttttattggtccgcgaaccatcagcgcgttaaaaagctatctttcccggcgcggaaaagagggtgagctggttatgcttcgggccctgaattgtagccagggtcagcgttatcttgagcttgcagaacagcgcagcgcgaacgaaacgtttgtttatggctgggtaaaggagcgggtggttatatga

SEQ ID NO: 144248 - DNA, 294 bp, Enterobacter cloacae
atgaacgtaacctccctaccaaaaccaaacagcatggaatttgatattcacgccaagctcaaagcagcaaattcgcactggtcttattgctatgctgtgcagccttgtgagaaaggatttaagtttcaatttaatacaacgtttgttggtgagatagagttcgccgtttacgaacgcatcgataactatttcgttctggttgatttttttaagtcatacgatgaagcatgtgctgatgctaaaaaaatcattgatgaccatcctgacattaagaaaatgttctctgctatttaa

SEQ ID NO: 144249 - DNA, 222 bp, Enterobacter cloacae
atgatcgtattaaaaagacaagatattcagagtgtgaatatcaaagctgagcaactggcgggtctatcgcaaacattatttgaatatcacgacaagctcgaccacttccaacttaaaacgatttgcgctcttgtttatgacctagctgctgatattcatgactggaccgaaaaagaagaggaaatagtaatgaatttggaggaggaacagcgcaatggataa

SEQ ID NO: 144250 - DNA, 255 bp, Enterobacter cloacae
atggctaaccaacaaacaacgctctatcagggtgtgcagatcccccgccccgtgttgaacgtggatcttcatgtcctccctgattttaccgggcgggtagtcgtgcacatcgagaacgggagggtgatatgcgaccgccagctgttcgacgacgagcacatttgctcactggccacgtttatggaaatggcgcgcgaaatggagctgagatttgaggaggtagctggtggcactgacagcgatacgaattcctga

SEQ ID NO: 144251 - DNA, 342 bp, Enterobacter cloacae
atgaaacctcaatctgcagcaacttcgcgggcggtaaaaccctgcctgtcacccgtggctatctggcaaattctactgacacgcctgctggaacaacactacggcctgaccctgaacgacacgccgttcagggatgaatccgttatacaggaacatatcgatgcaggtatcacgctggccaatgccgttaactttctggtggaaaaatacgagcttgttcgtatcgatcgcagaaggtttagttggcaggaacaatcaccttatcttcgggcagcagatattctgcgagcacggcaggcaactggcttgttgcggcaaagccgtaacaacgtagtacggtga

SEQ ID NO: 144252 - DNA, 318 bp, Enterobacter cloacae
atgagcaacatcacttggggcttgcagcgcgatatcacgccgcgcctgggaacacgtctggtgcaggagggcaaccggctgcactacctagctgaccgggccagtatcaccggtaagttcagtgacgccgaatgccagaagctggatgaaacattcccgcactttatcagccagatggaatcgatgctgacctccggtgaactgaatcccctacacgttcattgcgtcaccctgtaccacaccggttttacctgcgaagccgacaccctcggcagttgcggctacgtatacatcgccatttaccccactaagcgctaa

SEQ ID NO: 144253 - DNA, 477 bp, Enterobacter cloacae
atgaaacagctttcctttttacccggcgagatgacgccacaggaccggcgtctcattcagcgggcgctcagggctctggaccgccacctgcatgagcccggcgtggccttcacctctacccacgccgtacgtgaatggctgcgactgcatatggccgcgcttgagcgggaagagttccgtgtgttgtatctggacaaccagaatcagttgattgcccatgagacgctcttcacaggcacgattaaccgtaccgaggtgcatccccgggaagtggtaaaacgtgccctgtacttcaacgcggcggcggtgatactcgcgcacaaccatccctctggtgagacaacacccagccaggctgacaaaaccctcacgcagcgactggtgcaggtgcttcagctggtggatatccgcgtccctgaccacttgattgtcggcggcaggcaaatctattcgttcgcagaacacggtctgctgtga

SEQ ID NO: 144254 - DNA, 459 bp, Enterobacter cloacae
atgacgacagaaactcaatgcgaattgatatccgctaatgaacctcaattagaccttactgcaacaccagtacctgacgaacaacgcatccgcttctggccactgcactttggcgctatcccgcagtggataacgctggaaccccgtattttcgcctggatggatcgcttctgttcgacctacagcggtggtatctggtccttttacaccctcagcaatggcggggcgtttatggctcccgagtctgacaatgatgagacatggcgtctgtttaattgcctgaacggcaacgatgcccaaatgagtgcagaagccgcaggtattgctgtctgcctgattgcgtacagccatcacgcctgtcgcacccaatgcgatgccatgactgaacactattaccgcctgcgggactacgccctgcagcatccagaggcccacgccattctgcgtattatcgactga

SEQ ID NO: 144255 - DNA, 864 bp, Enterobacter cloacae
atgaaaaaatctgaaggttttcagtcgttgcagcaatcgctttctggcctgccgcagtgggcatcagagcgtattctgcagcagataacgcagttaacccactacgaaccagtgattggcattatgggcaaaaccggggcgggaaagagtagcttgtgcaatgccctgtttgccggtgaggtgtcgccggtcagcgatgtggcggcctgtacccgtgaacctctgcgctttcgtctgcaggttggcgagcgctatatgacgctggtggacctgcccggcgtgggggaaagtggtgctcgcgatactgagtatgccgggctgtaccgtgaacagcttccccggctcgacctggtactgtggctgattaaggctgatgatcgggcactggcggtggatgagcatttttaccggcaggtgattggtaaggcataccggcataaggtgctgtttgttatcagccagtcggacaaggctgagcccaccagcggaggagaacgattatccacagagcagaagcaaaacatcagccgcaaaatctgcctgctgcatgagttgttccagcccgtgcatccggtgtgtgccgtatcggtccgtctgcagtggggattacgggtgatggctgagcggatgattaagtgtctgccacgcgaggccagcagcccggtggtgacgcaactacagcatccctttcgcacgacggtagtccaggagcaggcccgtagcgattttggtgaaaccgtcggtgccgtactcgatagcatcagtgcctttcccctgatacccgccccggtgcgggccgtcattcaggccgtgcgcaccaccgtggtgtcagtggcccgcgccgtctgggatttcttcttctga

SEQ ID NO: 144256 - DNA, 198 bp, Enterobacter cloacae
atgaaaaaaatccttgtgcttaccagtctgtttgccgtttcagcagtactgacagggtgcgattcagatcgtgaccataaagaacgttgtaccgagttgcagcatgaagctacagaagctatgaaggaaaaaggtgaacatcaactcgctgaaataagaaaagagtgggacaggctgcagtgtaaattgttctggtag

SEQ ID NO: 144257 - DNA, 276 bp, Enterobacter cloacae
gtggcttctgtttctatcagctgtccctcctgttcagctactgacggggtggtgcgtaacggtaaaagtactgccggacatcagcgctatctctgctctcactgccgtaaaacatggcagttacagttcacatacaccgcctctcaacccggtacgcaccagaaaatcattgatatggccatgaatggcgttggatgccgggcaaccgcccgcattatgggcgttggcctcaacacgattttacgtcacttaaaaaactcaggccgcagtcggtaa

SEQ ID NO: 144258 - DNA, 276 bp, Enterobacter cloacae; identical to SEQ ID NO: 144257

SEQ ID NO: 144259 - DNA, 321 bp, Enterobacter cloacae
ttgtccttcttcagtgaactgacggtagaaatcaaccttatcgatgaaaaacagggtaagaaccttgatttgctgagtattcaggcgaagttctttatccagatgttcacggattgtacgtctgatcatatgacgctggatgagcatagggtcaatatcccccacgacatcaccgactttcatatagtaggtatcagaaggtgtttccagtgtaagataaccctctttacccgttcggatctcgcttatccggtaaccctgataaatatcacgtcctgtttcgtcatcgagtgtcataccgtcatatacggtaatctctga

SEQ ID NO: 144260 - DNA, 1425 bp, Enterobacter cloacae
atgcctgtgttcacatataaaacgactgaccggggctgggctatcctcagcactggtgcttcattgattattctcctggtggtcagcgtctggggctttacccttatcagtgactggatgcaaaaacggacctggctgaataccgcgtcacaggtatctcgctttacacaagctgtgaagagctacactggccgttattacgatactttgctttcaagtgccaccaccacgaccccggttacggttacacccgctatgctgaaaaacaccggatttctggagcaggggttcagcgagacgacagtagacggacaggcttatctggctgctgttgttcgtaatgccactaatacagatcagctgcaggcactggtttacactcaaaacggcgcggcactgccttttctcgcactgcgccagatatcaatggatatcacctcgggtatgggcggctatatatggacatcaggtactgctaccggcgctatgggcagctggactattcctctttcacagtttgggataagtacaactcagggacatattgcggctttactgaccacagatgaactgggcgctgctcgcggtgaaaatgatcgcctttatcgtttttcggtaaccggcaagccagacctcaacacgatgcataccagtattgatatgggaggtaacaatcttaataacgcaggcacgattaatgccgtaacgggtaatttcagtggcgatgtggcggccactggaaatataactgcgaatggaactgttacaggacagaatgttactgccggttcaaacgtcaccgcaggaaatacaataacggctaacaacgacatacgttcaaataatggctggttcataactcgagggagtaagggatggctaaatgaaacgtatggcggcggtttttatatgtcagataatgactgggttcgagtcataaataataagaatatttacacaagcggtcaggttcgtggcggaagtgtgcgggctgatggaagactttctacaggagaagttttgcagctcgacggagtcaatactgctggcgcagtttgttcaccaaacggccttgtaagccgcgacgccactggagccatactttcctgtcaatccggtgtgtggcaaggaaatgaaatttctactgtttacccaggatttattgactatggatcacatgtagaaatgttcggaaccatatacggtattggcgacgatagctgtgtcaacagcggatttccggtactggtaagccaggttctatcgcttacaggaagtgtatctgatcttagttctctggctaatgctggagtaacctctgcttactttacagtcataaatggaagccaatttcgcgtttgcgtaaaaaacaaagattcaagccgcagcaacaacattgcgtggcgtgcattagcaattaaataa

SEQ ID NO: 144261 - DNA, 648 bp, Enterobacter cloacae
atgaatattaaagaaagatttgctgaactctgcaaagacgctgaatttatcagcgcttataacgatttcaacgggactaatcttaccgttctggatcagtctcagttattcagtgtaggcacgttgtttcaccttgttacgatcaagatgaaaaacaacactgagttgttactgactgatgcgtattacgatatcgaatacaaagcgaagaattatatcgccactggtgactttactgatatcagcacaatcgatgaagaaaaagaaatcaacaacaacggaatgtcagttaagctggctaacgtgagaactgagtatatcaacttagtcagaacgaaacagcttgatacagccgaagttaatattgatatatgttttctgagtcctgaaacaggcaaagtaagagagagttttaatctgttcaatggtgagatcgataagctcacgattaacattgactatgatgataacgaatcgaagaacgaaaccgaagttcaactgaactctatctgggctgttctcgaaaaatcagcacgaaaccatgcgtctgatggtgttcacagaagctataaaggatcagagaacgattcattcttttcaagaatcggtaaatggaattccgagcaaaagtggaccagcaagaagtaa

SEQ ID NO: 144262 - DNA, 558 bp, Enterobacter cloacae
atgcttagtaagaatatcaaaatcaccgatgttaaattaacgtcgaacgcaccgtttttctctaacagagcaatcagcggtaaatttcaaaaacgattcaccggtgttcagttctttgaacttgaattcagtctgaattatcaatcagaacaaacagcagaagtaaaacgctttatcgctatgcatcaacaagcacaaccatttgaatttgacttgagctatcaaacgaaatacgaaggcacagcccaaggacttctacgctcacaacagaacgcagcaccaggagcgcgtcaggtgactctaggaacgtttgcaggtgttcttgaagcaggaacaatagttcagtttcagaatcactccaagctttataccgttacggaggacgtacagactggaggtcagttaaaactgtttccgaatcttcgtgctcaagttcagcttggtgaagaaatcaaatacagatctcctaaaggtcgattcgtactgactaacgaaagttatccttatgacattaaatcgctgagtaaacttcaacttaaagcaacagaggttatctaa

SEQ ID NO: 144263 - DNA, 486 bp, Enterobacter cloacae
atgaacataacagatatgattatctatgacgaaggtgaaaaactcacgatttataaagataccgaaggatattggacaatcggagttggacatcttctgactaaatctccgtctaaagatgaagcaatcagacaacttgataaacttgtaggcactggtcattacggttatatcaacaagcaagaatcacgtcagattctggaaaaagatattaatcaaacgattaagcaaatcggaagaaccgagcttatcaacgtttatacttctcttgatatcatcagacgaacagcactggttaatatgtgcttccaacttggtgttcaaggtgttctacagttcaagaaaatgatcggttatctcgaaatcggtgattatcagaatgcagcagacgaagcactgaacagcagatgggctaaacaaacacctaatcgcgctcgacgtgttaccgaagttctaagaactggaacttacgatagctataaatga

SEQ ID NO: 144264 - DNA, 1500 bp, Enterobacter cloacae
atgcaaaaacaaaacgggttagcattcagttacataagattctcaagcaagaagcaagaacaaggtgactcagttcgtcgtcagactgaacttgctgagaagtacgcacaggcgaataatttaattctatcagaaaagaacttccaagacttggggatctctgcattcaaagaaggcaacagagcatctttggctgacatgcttcaagctatcgaacaaggttctatctctccaggctcaacgatcattatcgaatcactcgaccgattgagtcgtagaggcatcgacgtaacacaacagatcatcaagcagattctacagcatcaagtttatatcgcttccctcgtcgatggacttttgctgaacagagaatcagtaaacgacttagtaagcgtgattagaatcgcgctggctgctgaccttgctcacaaagaatccgagaagaaatctcaacgactgagagagacaaaaggacaacaacgtcaacgagcattgaacggtgaagttatcaacaaatcattaccattttggttagaacgaaaagacaacgcttatgttttttctgacagactcgacgcggtgaaaagaataatcgaactcaagaagaaaggtcttggcaataataaaatagccaagactctgaatgatgaagaatttgccccgctacgttctgctggctggaatcatacgactgttgcaaagacgattaaatcagttgctctttacggtgcatatcaaacatctgaaacgacaaaagatcgtaaagtcattcttctggatattgtcgaagattattatcctgccgttataagcaaagaagaattcatgttgcttcaatctgatcagaaacagaataaacccggatataagtcagaaaagaacgctttcacaggtttgctcaagcatgaatgtggaggtgctcttgttagaaaatttcatacagtcagtggcaaagtatatgaatatcacgtttgtgcaaacgctcgcgatggaaaatgtagcgtaacgcagaactttaaaaatattgaaaccgcgatgtttaaaattcttcgtgaactaaagatggaaaagaaaacatcactcgacgcaactttattacaagaacgctctgatgttcaggaaaagattcaagatctgaacaatatgctactcagtatgaagaaagttcctgcaagtgttttgcagacaattggcagtcttgaagataagttacaggcgctcgaccaagctattacagaacaaaacaacagggttatgaacgaacaatccgttgatttgaatctgttgcaggaggtgcaagatcctgttgaattaaacatgatgcttaaacgtgtgataagagaaatcaccgttttcaatctgaaaaagtcatggagaataaaagtgtcgtacatcaatggacattcacagagcttccgatgggattctaagaatatcagttttaaatctgacacggaaaaactattggatttcatgaactccgaaagggaagaagaataa

SEQ ID NO: 144265 - DNA, 144 bp, Enterobacter cloacae
atgcgatctaatttttcccgccaaaaattgaccaccgccctcattgtgattttaccctacctcgttctccttactgaaaactctctcgattctgttactaacttcggctggatgttaatcgcactgatggatcgtttgcaatga

SEQ ID NO: 144266 - DNA, 441 bp, Enterobacter cloacae
atggtcacgattaacaaaacatacgagaagatagctccgaaacttgatgacatggtgcgccgtggattcagcgacatagagctaaagtatgggggccagaacgaaatctacgcctacggggaacggaaactatcagcagaggatttccgcaagctctaccctgaaaaggtgaatgacattccgcaagacttcccgccagatgctaccgtgatcgttgaagacatggttttgctctataaaccccgcaacggacaattcacaaagacagcttctgaaactcagctaaaacatcatcaggctttcagtgcctggtgtcatgccaatgttggcaaagggaaaggatacactcagacgacgaagagcacgattaacgtgattaacattattggcgttctcgtattggttgggttggtcatctggggtctatcgcacatccgttaa

SEQ ID NO: 144267 - DNA, 186 bp, Enterobacter cloacae
atgagtaacaaaaactacgaaagccaccgtaaagcaattgttagcaagggaatacctaccgacctgttaaaacggatcactaattcagacattcaggtgattaataccttcttaacacgggtaggcaagctggaattatctccacaagagaaagagtggatcataaaaagcatctctaacgtttaa

SEQ ID NO: 144268 - DNA, 192 bp, Enterobacter cloacae
atgaaacatttggtgctgacactggcactgctgccagccctggcgaatgccggacagataaccctgattctcagtgatgaaatcgaaacatctgatggtaagatttgcctctacgagaacgcagttagaactgagcaagtaaaagtggctgccagcgctcaatgtcgccacacattgaccttcgaggattga

SEQ ID NO: 144269 - DNA, 1281 bp, Enterobacter cloacae
atgaaagtaaacaaagatgataggtatctaacggtagacagttacggcgtgtattactgccggatagtgcttccggcgtatttgcatgacgctttcggaggaaagaagactcttgttcgtagcctcaagacaagcgatctacgtgtggcacgacgcaagcgggatgcaattgtgattgaatacgaacgagtgagagagatcgccgcaccgccgaagcctgacagcattcaggacacgatcagctatctccagagcgtggcgaagtatgccaaagcctcaccagtggcgcaaagtgcaggaacaagagataacaggcgggaaccttccacaactcccaataataacaagggtaacaagctcgcgccgtcctgcccttcactggtcaagatgctggatgtttatctcctgcaaaatgccaacgttttgaagctcggtacgctgtcaaaaacgaagaaagctgtaaagctattccttgattacctcaagagatccgacattcggctaaatgacataaaccgaactacggttacaggctggcttgatgcaatgaacggtgtcaaagctgtacaaacacaggctaactatctttcagcgctggcttgcatcctcgatcttgcatctgcacgttaccacgacgcgccacccatccaaaacaatccgttcaggctgcataagctccacacagcgaagagccgcacgagctatgaggcattcactgacaacgaagtgatcgcccttcttagaggcttacaggaagccggagaggtggagttattcgacgttgcaagcattgccgcttacagtggaatgaggatcggggaaatctgcaacttgcagccacagcacattattgtggtcaacggtgttaactgctttcaagtgctggaagggaagacagctaatgccgccaggattattccactgcatagcagtttgatcagcatggtgtcagaacgctgtaagaagccctacaacggctttttgttctatcgtgccagcatcactaaacgtgaggacggcaagcgctcaagctggcatgtaaaccgctttggacggcttaaacgtgacattctgccggatagtgaaaacaaggtgtttcactcgtaccgccatgccgtcataagcaaactaaacgccgccggagtgcccgaatctcgtgtttctttgctcgcaggtcactcatttggagaaacggagagtttcaccacttattctaaatccgttcctgagcgtattgtgaaagaattacagggctatgttgagctaataagctacaaatga

SEQ ID NO: 144270 - DNA, 1161 bp, Enterobacter cloacae
atgaaaaaaatcctcgcactctcagtgctggccctgtgcgtttcccatagcgcggtggccgcgaattacgcgctcggtaacgacaatatagccctgtcatttgatgatgcaaactcaacggtagtggttaaggacatcagagctaaccatccgctcacgccgcaggagctgttctttctgacgcttccggacgagacgaaaatccacaccgctgattttaaaatcaagcatgtcgaaaagcaggacagcggcctggtcatcgatttcacccatccggactttaacgtaacggtgaagctgaacctggtgaaggggaaatacgccagcatcgactacaccgttgccgccgttggccagccgcgagacgtggcgaaaattaccttcttcccgaccaaaaagcaggctcaggcaccttacgtagacggggcgattaacagctcgccgatcgtcgcagactcgttctttattctgcctgacaagcctatcgttaacacttacgcctatgaagcgaccaccaatctcaacgtagagctgaaaacgccgattcagccagagtcgccggtcagctttaccacctgcttcggcaccttcccggagaacagccagctgcgccgcagcgtaaaccagtttattgatgccgtccgcccgcgtccgtataagccttatttacactacaacagctggatggatatcggcttctttaccccatattccgagcaggacgtgctggggcggatggatgaatggaataaggaatttatcaccgggcgcggcgtggcgctggacgccttcctgcttgacgacggctgggatgacctgaccgggcgctggctgtttggcccggcattcagcaacggttttggcaaagttcgggaaaaagccgacagcatgcacagctcggttggactgtggctctcgccgtggggtggatataacaaaccgcgcgacactcgcgtctcgcatgcaaaagagtacggtttcgaaacggtagacgggaaactggcgctgtcaggcccaaactattttaaaaacttcaatgagcagatcgttaaggaaggtgcgaataagcaggtcatttcttcccaagctgactcgctgattaaaatttcgcggatctgggccgatttttttcccgcaaacacatcgaatcagcctatttag

SEQ ID NO: 144271 - DNA, 537 bp, Enterobacter cloacae
gtgccctacccgactaaccagctcaacactcgcttccacgccaccaacacggcaacagggctcagctcaacgcagcaaaaaccggttaaccgcgatacccagcgtcaggccgcgctgagccagatggagaagtccacgggtaaaaccttcccccaaacggcgcgcaccggaacgaaagacgtgcagcgtcaggcctcaggcgaacagctgaagcagatttcgcagcgcaacaactaccgtggctacgacactaaaccgcagacggcgaagcggagcaccacgcagcagcgagaaaaccgccagaccaccgcgcagagacaagagaagcgggttgcacagcccgcgcagcaacgctctctccagcagcgaagcagccagccccgggccaatgcactgagcggtaacgacagccgctcggcgaactggcaggcgcagcagcagcgcggtgcgcaaagcagacagctcgctgcgcgccagcagcagccgcgtcaggcgtctggtggacgtgctgaacgccgtgaaattcgacatcgctaa

SEQ ID NO: 144272 - DNA, 483 bp, Enterobacter cloacae
atgaataagatccagcaacacaacgtcgccctggtcgcaggcgccagcggcatagtcggcagacagctggtcagcacgctcctgcaccatcagtgggaggtgatcggcctcagtcgccgcgaggtaacccatccggacggcattcccgtggtgaacgtcgatttactggacgcgcaggacaccgcgcgggcgctggacgccctgaacggtgtcacccacattttttacagcgcctgggcgaacgcggcgaactggacggacatggttgagccgaacgtcaccatgctgcgtaatctggtcagcaccctcgaaaaaacggcacctttgcagacggtaagcctgatgcagggggacaaagtctatggtgcgcatctggggccgtttaaaaccccggcgcgggaaagcgatcccggcgtaccgggtgccgaatttaacgccgcgcagctcgcgtggctcagccagtttcagcggggaaaaggctga

SEQ ID NO: 144273 - DNA, 276 bp, Enterobacter cloacae; identical to SEQ ID NO: 144257

SEQ ID NO: 144274 - DNA, 1110 bp, Enterobacter cloacae
atggttaatgtcagtcatatcaggaccttaagtagcgttgagtcaactacttcaagtccatccatccgtcagacagtggagtccatctggaactacgcgggcaataccatcatcaaccagcactccgatatcaataaaactcacgatatcctgcaggatgaaagcaagtgcgaaatgattgtcgtcatcgacaacttcatgacctcgtcagcgaagtatgccgatatcgtgctaccggacctgatgaccgtcgagcaggaagacatcattccaaacgattatgcgggcaacatgggctacctgattttccttcagcccgtgaccgcaccgaagttcgagcgtaagcctatctactggatcatgagcgaagtggcgaaacgcctcggcccggatatccatcagaaattcaccgaaggacgcacgcaggaacagtggctccagttcctgtacgccaaaatgctcgcaaaagatcctcagcttccgtcctatgacgagctgaaaaaaatgggcatttataagcgcaaagatccgaacggacattttgtggcctataaaaaattccgcgagaacccggaagccaatccgctgaaaacgccatcgggcaagattgaaatttactccagcaagctggcagagattgcggccacctgggagctggaaaaagatgaaaccatcagccctctgcccgtctacgcctcgacctttgacggctgggacgcacccgatcgcgcgcagttcccgctgcagctgtttggcttccacttcaaagcccgtacccactcgagctacggtaacgtcgacgtgctgaaagcggcctgtcgccaggaggtgtggcttaatcctgtcgatgctgaaaaacgcggcatcaagaacggcgatacggtgcgcgtctttaatagccgcggcgaggtacgaattgaagcgaaggtcacgccgcgcatcatgcccggcgtgagcgccatgggccagggggcctggcacgatgccaatatgagtggcgatcgtatcgaccacggctcctgcatcaacacgctgacgacccatcgaacttctccgctggcaaaaggtaacccgcagcacaccaatctggtgcagattgagaaggtgtag

SEQ ID NO: 144275 - DNA, 1386 bp, Enterobacter cloacae
atgcgtcagagagagcttgcagccacagctaaggcattcatgttggataggcctgaagtctcgctacaggagcttacggctcatctgcggtctatggctgagcagttcctcacagacgctagtgatgactactggaatggacttgaggtcgctactctggtggacgagaagtcgaacctgaaggagatagccgctacgcaagcattgagtctggaccagcagaagggcataaggatagcgcttgaagttctgaccgcagcacagcagagggtcgacactggtgatacgtacagtctgattaagctgattactgataataaccctacacagaagtcaactataggcgactctacgtcgattctgaagaatgagcagggggataggccggaagtattcacacaggttactgctccttgcagtcacagggagcgccaaccggaggtcgatatctgtagtttttctaagctggtgtcctcactgctggctgagaaggcccagaccttgaagccctcaagctacaaggacctgtcgtcctcgctgaataccgtctctcggttcctgcctgaagacatggacctgatgtcccgctctgagtggctggctgtgagggattccatgctggctgctgaggtgagaccatcgacaatcaataagctgctgactaaagctaagatgtgtcttgattatggtctgatgaatggacagcttgagggccgcaaccctattgaacggatgaagctgaccaaggatgttgactccaggcgtagagcgttcacagacgacgagctagagagacttctggtccgtgttgaggatgaataccagttcacacgacatacggctcacacgacctctgaggcccgtagatgggcagcgctggtctctgtaatcacaggcgctcggtctgctgaagtatgccacctcactaaacgtgacattgtcacccttgataacgcccgtaacactagcaacgggctggtctgcatcgacatcaacgaagctggtgaaggtaagtctgtgaagaacaaacattcagtccgacttgtaccgctgaccgatggtgcctgtggattcgacctgaagtccttcctctcatgggtagacactcagcctgctgatgggtccgccctcttcggtatgacaccgagtgcctactcaagctggtttaactcaagggtcctcacagcggccctaccagacgccacggatgtctctcttcatagtctgaggcattggctagcgacccgaatgaaagagcgtggagttaatctggtggacgctcaaggcatcttaggacatagcagtcagagcattacgtatgacctgtacgggaaaggacacgctgttggaagactcgcggaggtgctggctgtgagcctactttaa

SEQ ID NO: 144276 - DNA, 468 bp, Enterobacter cloacae
gtggctattacaatccaatgttactcagagtcagacaatgcggccttcttcggtggagacctcgaccatgagcaactacctgcaccaacttatgacgaacccaaggcccgtacaggtaagccgcccgtggtcatcgataaccgctcggtgagactatggctgattgaaaccgggtgtctctcctattcacagcttgctgaagcttacccgtgggccgacgatgtgttcacaggactgtcacgtgctaccagtggcgcggtaggctctggactccctgtctcaaaggcttacctgtttgctgccttatatggcaccaacgatgtcttctcccgcaacactgacacctcctacagggcaatcactggtcgctccccgtctccacgctacctacgccacgttaatagtgtgcttcaggctacctctgtgaacatgaagaaggtgctccgtgataaagagctgatgaactga

SEQ ID NO: 144277 - DNA, 1533 bp, Enterobacter cloacae
atgatttccaaaaataatctgttaattctaagtgttatttttttacttatgttggtgccatacctacacacgccagtattgtcagacgattattattattatttccatgcaagcttgcatgagcaaattggtcattatttagtctggagcggaaggctgattactaacatatttagctcgtatatgctcaaatatgtcaatcatgacatctatcaatctttgacagctgctgcgctagttgccagcgtttatcttatcgcagcgataccatctgcattatttgttggtaagcctaaaccaagcgccatttcgataataattatttttttatctttttggatatcaaatccagcccttggcgaaacttttttctggtttgttggtgcgtcgaattacttatggcctatattttacatatctttattttttgttattctggctcgacaaagaaaatcacacacattacttagttattctggggctattttagttggttttttggcaggttgctcaaacgaaaacacgtgtattgttgcaacgatactgacaattttatactctatttgttttagccgctttaaactgtcagcaccatatttgattgggattatcttaggctctgcggtacttttattcagcccaggctctgccatcaggtcgtcttattttaaagagtggcattcattaacattaatagaaaaacttgatcaacatttatttgaaagactgcctgcagcgctggatagcttatggccaatatttctaatcattattttcattgcactttcatttggagtgctcaaaatagaatcaagggcttcattaatttgtgcactagcatttttcattggtgggatattgtgtgaccttgcatttgttgcttcaccatacatgcctgaaagagctggtattggtgccttgtttatgtttttaataacactttcatttttaattcactctgctaatttttcaaatgaaaaaatatttaaaaactcgatatatggcattatcattgtgttcgctatgacttactttttaccatcttacggcttaatttcctattctaatttaagagcgtcaaagcaagatgcaatacgcatggccatgataacacagcaaatcgacgaaggaaaaaaagagatcgtaatacctgacttttatctaaaccgacttttaaaaaaatcagatggtttccctactttcaagaactcatatatgtttaattattttaaagtagataaaatcactgaagagccaattaattctggtaaaaataagcttatatatcgtatctcaggtgacataaatgcttatttgatgcataacaccgccattttttctcatgttactttaaaaaacaatgataataaaaacatggatactattgttaaggcgattaaagtagggagtgattggtatacttatagtgaagcaggaaagttagatttatccgaaataagtaaaatcaatatcggaatgtacactactgagccagtaaaaatactatctagcaattatttagaatttaaataa

SEQ ID NO: 144278 - DNA, 183 bp, Enterobacter cloacae
atggaaaaatattggctgcctctattctatggcgattctaatatagaagtgatagatcagagatgtgacagtattgttacctctggtattattgagaaagttacatctgggcttgggaaagttaagggtataatatatctcacagccttgtttttttgtttttattattttttcatgaaatga

SEQ ID NO: 144279 - DNA, 1182 bp, Enterobacter cloacae
atgatttatcagtgtgatacttgcagtagaacgacttttgaggttaattgtccctggtgtagtggagtttcgcctgtaaaaacgtctgcatggggttcagcatcatcgaccgcacaagcaatagacatacaacgtatgacaccattgaatccatcgttttatcccgaatttcagtatcgttcaaagggtgttctaaaagatctatttgggaaaaagaaagagcaaactcagcttaatcaattgcttgaaaatgttctcgaaaaatactccagtttaaaagatccatattttactaacttcatttacacttccagattctcacataataataaatcggaagcagattactcaacagataatggtacatactccgaattacaacttttccgtgaggtgttggtcagaaaagggttcaatgagcttgagcagttacctgagctattagataaattactccttaccacgtcatttaacgctctttattatggtttcgctaaggaagttaaacggcatattaaatccacacttactgaatccttgaagtcatggattgaggaagcgggtaccacttttagggcagatctttcattgtttctattctatatatggagcaataaaatagagttctcatcagtagagttcaatgaaaaagcggaggctacgcctggtgttcctttagtttcatttgatgaagttaaaaaatacttagctgcgtgcgaacatatttattttgatattctggttgatagattagctacacggctcgaacattttaaccctaacaaattcgtcaccatgtatttagttgatgcaatggacggtttccagtttgaagatttccttgtggaagtattccagactatgggctatgacgtcaaagaaaccaagagaacgcaagatcagggggcagatctcttcgtcactcgatttggtaaggatatggttatccaggcgaaaaattattctggttctgtaggtaactcggcggtgcagcaggtgatctctgctaaaacattctatggttgtgatgaggcgatggttgtgactaattcctacttcacacgctctgcgaaagagttagctgaatcagccttggtacgtctgatcgacagggatgaactgcaaaagtatctggatgattacaatcagaagataatcgaagattttcagtcgaactcataa

SEQ ID NO: 144280 - DNA, 549 bp, Enterobacter cloacae
atggaaatccaagattttgtaggtcattataaaaatcatccagtgcttttcatcggcaccggttttagtcttaggtatcttcaaaactcttttggctggaatgaattacttgagtttatatccaatgaactcacgggtaatgaggagttttactatgaccttaaagcagaatcaatggagaatggtgaatatagttatgaccttttggcaacaaggcttgagatagaattcaacaaatgtcttgcaactgatcggaatggcaaattcgaagccattaacgatattttttataaaaacatgaaagaaggcaagaaactgagccgttttaaaatttatataacagaaatacttaacggcttattgataagacccgaaaaaagcaatgaaattgacgctctaattagagcacgtaaaaacattggttccgtcataaccacgaattacgatcgtttatgtgaaaaagtttttgagttcaacccgttaatagggaatgatattcttctcatagcaacccctatggctcagtttacaaaatacatggttgtgtaa

SEQ ID NO: 144281 - DNA, 855 bp, Enterobacter cloacae
atgattcttcgagaagtatttctcacaagcaaaactcatgggatgagtgctctacccccgatggagtgcgaaagaaagaaggtatccagaatgacaattcttataaaaacgttaaaaatcatggcgtcaggtgttgttttcgtttcaggtataaccaccgcctccagtaccgtctatttcttgccagaggcaaaatcagcaggtgtcgcaagcagcgacaaaaacgccctgatgtttctcgggatggacagggatgtaaatctgaaggggatatgcttcgcgatgacaaagcaatcctcatcaatcgttccgctggtagatatcactgctacaactgataacggcagattcacgatgcacggactgcgcccaaagaataacgacgatacgaaggaattggtctgttctcttggttcagaagccggggatttattgacgggcatttcgaagtcaacagtcgttaacgtgaagctggatttcaacggcgagatccgcagttacagcttcaacactacagagttcggaaagatattgactaccaatgggcaagacgtgtgggaagaagcagctaaaggctacgctcagggagtacgtgcccccgttttctatggaagcggcagcgaggcccccaaaaacaataaagtaacctcaaatgtcgatacacccagttatgaagcaagcgatgagaaacttaatgctgtctggaaaagacttagtcctgaaacacgaaaacgtttactcccttctcaaagagaatggataaagcaaaaatccgcctgcaataatgagcagaaatgtcttatcgacatgacgaacaatcgcattcgtgaactggaatctgaacatggaaaataa

SEQ ID NO: 144282 - DNA, 594 bp, Enterobacter cloacae
atgcttattggatacatacgcgtgtcaacaaatgaacaaaacaccgccttacagcgtgacgcgctgcagcgttcaggatgtgagctgatttttgaagataaaatcagcggtaaatcgacaaacagaccgggacttaatcgtgccctcagacaacttaatgcgggagatactctcgttgtatggaaactcgatcgtctcgggcgcagtatgcgccaccttgtttcaatgaccgaggaactacgccagcgaagtattaatttccgcagtttgactgatagcattgatacctcaacgccaatggggcgtttcttcttccatatcatgggggcgcttgctgaaatggagcgtgaactcattgtcgagaggacgtgcgccgggctagccgcagcgcgggaacagggacgaattggtggcagacgccctaaattgacgcaggatgaatgggctcaggctggcaggctgattgctgccggggaatcccgacagcgcgttgcgttaatttttgatgtgggtatttccacgctttataaaaaattccccgccacgatagtcggacaatcgttgtgccagcggccgctggacagggatggttag

SEQ ID NO: 144283 - DNA, 195 bp, Enterobacter cloacae
atgcgcctatttaatccgatcacgatgacggaggtcattcttggtttccacgatactggaggtgctattcaactccctgaggataactggtttttcagaatacaggaaataccggagggaatgcggcttgcagttaatgaaaaaggcgaaccaatccttgtggaaattaaacctgatgtctctggcaacgaataa

SEQ ID NO: 144284 - DNA, 600 bp, Enterobacter cloacae
atggcgaaggcaaaattaaacaatgagcttattgctacagtggccggtgatataactgtgttcaactacgatggcgagacgcgcgaatatatttcctcctcggttgaatatttagcggaaggtgtaggtattccagccttgtcatgcattgatgcgcccggtgaaattaaagaaggttttacaatttgccgcacctttgacttaaacggatgggagtacatcgctgatcatcgcggtaaaactgtatatagtacaaagtcaggtgagaaagtcacgatttcactaccgggtgattatccgaaagatacgacgacacaagcccctggaacgccatataataagtggaatggcagcgagtggataaccgacgtaaaagcgaaacactctgcggatgtggcaaaggctgaacagcagaaaactgcattgctagcggaagcgtctgcaattatcgcaccattggtagatgctcaggctggaggctacattgatgataaagatatcccacgtctgactgaatggcagcggtatcgttataagttaactaaggttgataccgataccgctccgaatcttaaccttccaccgaaacccgaggtatag

SEQ ID NO: 144285 - DNA, 1068 bp, Enterobacter cloacae
atgaccgcaaaatattttgccatactgacgaatcagggcgcggcgcggctagctaacgcgacggcacttggtacgcaactcaacctgacgcaaatggcggtaggcgacgccaacggaacgttgccaacccccgatccggcgcagacgaagctcgttaaccaaaaacgcatagcgccgctgaacctgctcgctgttgacccaaataataccagccagatcatcgctgaacagattattcccgagaatgagggcggtttctggatccgagagatcggtctctatgacgacgacggcattctgatcgccgtggctaactgcccggagacatacaagcctcagctgcaggaaggcagcggtcgcacgcagaccatccgcatgattctgattgtgtcgagcacatcgtcaatttccctgaaaattgatccctcagttgtgctggcaacgcgtcagtacgttgacgataaagttatcgaggttaaaggctacgctgatgatcagatgaaaaagcatattgctgctgataatccgcataaacagtacccattaatcgccaatgcgttaaaagaaattgccgatgcggggttgagcgctgaggttctcaaaaaccttggtttaggaggaagctcggctttaccggttggcgtccccgttccgtggccgtcagcaactccaccgacggggtggcttaaatgcaacggagcggcgttcacagcctcccagtaccctaaactggctcaggcctatccggctctcagactgcctgatttacgtggggagtttctccgtggctgggatgacgggcgtgggattgatgctggtcgcgggctgctgtcattccaggaaggtactattgtttcgggctttgatgacaatgatacgggggatatcagctcaatcggatcagccgactatgggttcggcgatgtaataaccgcagcacaatgggaaaaaatcaaaggaaaaaaatggatcggtagtccggcaaattcgcaacgctacgattggtgggcttatgtttcagcccgcccccgtaacatcgcatttaactacatcgtgagggccgcataa

SEQ ID NO: 144286 - DNA, 318 bp, Enterobacter cloacae
atgattgataaatatcgtttagatgatttacggcttgaatccggcgaaaaaggagatctcgcccgctgggttattcagttgcaaacggaactcgatagagagcgtcgcaaagctggcaactctccggtgattccggattggcaagccaaagctgagaaactggctgaactccacggatgcagtttcgttgttttccggaatggagaatctccacagtgtgctgacccgtcaaaagtgattatttcgttcactgatgagggtcttgggcatggcgcagcagcaccgcagcaggaggagacggcaaaaccaaaaaagtag

SEQ ID NO: 144287 - DNA, 243 bp, Enterobacter cloacae
atggctcgctttatcgcagttattcacggttggttcgtatccagtaacggtttcaatgtcgttgaactcaccgctacagaacgtgaagatgcagaaaaagaagctgcatttctctgtcaccggcgtgcagcgactttcgacaaatgcgcgggtgtcgttattgaaattggtgaggctgagatattaaaagcccctcgaaaactaaccattcgcgaacgcctgatggggaggactaacccatga

SEQ ID NO: 144288 - DNA, 456 bp, Enterobacter cloacae
atgagcaacatcgacaaacatccgtaccacgctgacggtggcgatatcggaaccggccgcatcagagagattgccgataatccatacggcgatgaagagaaatgctggctggcgaagcgagtgatcacactgcaggctcaactgggggtagaagttctttcaaaagcagctatcgatgtacttacggagagacaacggcagcagtcggttgagggatggactcctgagcatgatgaccagtatgaagatggtgaactggttgatgccgctgcgtgttatgcgcaggattcaagtctttgggattgtgttggtgagccgccatgcgattggccgtggcccgatgaatggtggaaaccttcaaatgacatgcgcagaaacctgattaaagcgggggcgctgattctggcagaaatagaacggcgggatcgcgctgctgacgccagtaaaggagagtga

SEQ ID NO: 144289 - DNA, 1110 bp, Enterobacter cloacae
gtgccattattaaagctaccagatgtaggtaacaacatggcaaatgcacagtacgagaagggaaaaatagtactcgaacactcaaaaaaccaggtaaaaaaagctggtgagtgtatacgtaagggaaatggcgatatcgaaaaagctatcgaaattatccagcagtatcgcgccgcacatctttacccattgatgattataaaaaatctggtatggaagcatgcccagaagataaataaaaacgcgattatagcgcggcgtttaaaacgactcccgacaatcattgataagcttcgacgcaaaacgctggatggcgtcaccccaaactctattgccgtaacacgaatgagtgatattggtggctgtcgtgtaattgttgaaaacagaatgcagcttcttttgttagattcatcccttgataaaagccgcacgactcataagtcaaaagttaaagattacataaaatcacctaagcctacgggttatcgtggcattcataggatttatagttgctacgataaagatgatactcatcaatggaaaggttttgatattgaagttcagttgagaacaaagctccaacatctatgggctactaccattgaagtggtcgatttgtgtgaaggtcgaacattaaaaacaaatccttttgagtcaaacccatcatgggtagattttttcaggctaatgagtgagtttatagctgatgaagaggagtttattactttaactccacaaacaaaaaatcatatcaaaactagacttatcagccttaataacaaacttaacgcaattgaaaaattaaaatcatttaacaggttattctcggataaaaacctagatttatctagaatcaaaggtggttatgtaataattgccctaaagggtaacaaaatttattacaaggcatataccacatcacaaaaacatcttgctgtggaagcttattccattgtcgaaaaggatgaagatgcgaacggattgttcgtggaaatggatgatttgcgaaaattatcatacgcatacccaaactatcttattgacacaaggttctttatagataagtttgagctttataccagtacaaactattggactaagcccaggtaa

SEQ ID NO: 144290 - DNA, 207 bp, Enterobacter cloacae
atggacagaaacgagttggaagaagaccgcgcagcattcatggctggcgaagttggcggggcagtttttagcctgatatctaacggcatagtgataagccgtgatgcaatcgttaattgcctggaggcaaaacgccgcgtggtaggtaatgtgatccacaaggggattttgagagatgcagctgaatatgtgagaaaggggcaatga

SEQ ID NO: 144291 - DNA, 243 bp, Enterobacter cloacae
atggaaacgttaagaaattacctaaacgctttgtcgctcgaaaaacagagggagtttgcagctcgatgtgaaacctctcttgagtacctgcgtaaagccattagcaaaaaacaaaagttaggagcggcactgtcagtgtctattgaaactcattctggctgctcagttagtaggaaagaccttcatcccgatgattgggaaaagatttggcctgaacttgataataagcaaacagcggcatga

SEQ ID NO: 144292 - DNA, 588 bp, Enterobacter cloacae
atgattgggaaaagatttggcctgaacttgataataagcaaacagcggcatgagagtaaccacagaaacaaggggttaaccgtgggtaatcaaccagagtggaaagttgaaaagcagcctgcatggctggtggccgcaattaaaaagacaattgcggaattaccaggcggatatgccgaagcagctgaatggcttgatgtaacagagaactctttgttcaaccgcttacgtgctgatggcgatcaggtcttcccgtttggctgggcaatagtgcttcagaaagctggtggctctcaccatattgcccatgcaatcgcgaaagcttctggtggcggttttatcccgtttgctgatgttgaacaaattgataacggtgacataaatcaacgccttatggaatccattgaatggatcggaaaacactctcaataccttcgcaaagctactgcagatggggttattgatgcagctgaaagagcgcaaatcgaagagaacagctatcaagtcatgacgaaatggcaggaacacctggcgctgttgttcagggtcttctgtgccccagataaggttgccagaccaccagactaa

SEQ ID NO: 144293 - DNA, 342 bp, Enterobacter cloacae
atgaaaatgcataacgatccccactcctggacggagtttatcgaactactccacagctggtggcgtggagatacaccgatgggtgcggttttgctgtcgatagtgatggcagtactgcgaatagcttacggtggcggcggttggaaaaagatggtgctggaggggttgatgtgtggagctttgacgctaactgcggtatctgctctggaatacttcagccttcctcaaagcctttcaattgcaataggtggtgctcttggcttcgtcggtgtagagcaggtccgtacagtggcaacacgtgtattcaatgtccggttcggaggtggcgatgcaaatcagtga

SEQ ID NO: 144294 - DNA, 3096 bp, Enterobacter cloacae
atgccgcatttttttattgaacgccccgttttcgcctgggtagtggcgctttttatcgttctggcgggacttctgtctattccccgtttgccggttgcgcagtatccggcggtggcaccgccgggaatcattatttccgtcagttacccgggggccagccccgacatcatgaatacgtcggtggtgtcattaatcgagcgcgaaatctctggcgtagataatttgctctactttgaatcatccagtgacacaaccggttcggcatcgattaccgtcacgtttaaaccgggcacggacatcaagctggcgcagatggatctgcagaatcagattaagatcgtcgagcctcgtctacctcaggcggtaaggcaaaacggcattaacgttgaggccgctaactctggctttttaatgatggtggggctgaagtccgcgacgggtcaatttgaggaagccgatttaagcgactattttgccagaaacgtcagtgacgagcttcgtcgcgtgcccggcgtagggaaagttcagctgtttggcggcgaaaaagcgctgcgcatctggctggatcccatgaagctccacggctacgggctttcggtgagcgatgttcttaccgccgttggccagcaaaatgcccttgtgtcgcccggcaaaacgggagatgagccagcatctgcaggacaaggggtgacgtatcccatcaccgtgaagggacaactctcctcggttgaggcgttcaggaatatcaccctgaaatctgacgcatccggcgcccgcctgaaactgtccgacattgcgcggattgaatctggcctgcaaagctacgcctttggtatccgtgaaaatggcgtgcccgcaacggcggcggcaattcagctctcgccaggcgcgaatgcaatgagtacggcttccggcgtacgggcgcgcatcgacgagctttcccgggtgctacctgaaggaatggcatttacgatccccttcgacaccgcgccatttgtgaaactttctatcatgaaagttgttcagacatttgtggaagcaatggtcctggtcttcctggttatgctgctgtttctgcacaagatacgctgcacgcttatcccggcgattgttgctcccgtcgcacttcttggcaccttcaccgtgatgctattgagcggctactccatcaatattctgacgatgttcggcatggtgctggcgatagggattatcgttgatgatgccattgtggtcgtagaaaacgttgaacggctgatggaggaaaaaagcctgtccccgcgtgacgccacgcggcaagctatgcaggaaatcaccccggcgattattggcatcacgctggtgcttaccgccgtctttatccccatggggtttgcggaagggtccgtcgggattatctaccgacaattttgtatttccatggcggtctccatactgctgtccgcgtttcttgccctgacgctgacgcctgccctgtgcgcaacgctactcaagccgcatcaggcaggaaagagcggaggcggaaggttcgcggtcgggtttaacgcgcgctttcgtgcgctcaccgcctgttacgaagccgggctgggtgccgttctgaagcgaaccgggcgtatgctgctcctgtacgctgcgctttgtgctgcgctatttctgggattgtcttcgttaccgtcgtcctttctgccggacgaagatcagggctactttatgtcctcaatccagctgccttctgatgccacgatgcagcgcaccctcaacgtggttaaaaaatttgaagaggaaattgcggcccggccggatattgaaagctacattatgatcctggggtttgggttttcaggttcaggaccaaactcggctatggccttcaccacgctgaaggactggaaagatcggcagggctcgacggcccagggggaagccgaccagatacaggccagcatggcgaacatctctgatgccgtcacgatgagcctgctcccgccggccatttcggatatgggcacttcgtcgggcttcacctggtacgtgcaggacagagcgggactgggctacgaggcgttaaagcgcgctgccgacgcgctggtcatgcaggccaaccagcgccctgaactgagtgacgtgtatatagacgggcttccggaaggaacaagccttgcgctccaggtggacagagaaaaggcggaagcgatgggcgtctcatttgatgaaatcaaccagacgctctccgtcaccctgggctcaaattacgtcaatgactatacgaacaacggccgcgttcagcaggtgattattcaggccgatgcgccctaccgaatgcagcctgagcagatactgacattatcagtgaaaaaccggatggggcagatggtgccggtatcaacgtttgccacgctttcctggcacgttgcgccgcagcagttgacgcgttatcagggatattcggctattcgcattaccggaagtgcggcgccgggagcgtccagcggcaccgcaatgaaggttatggagagtttgtccagagatttacctctgggcatggcgggcgagtgggccgggagctcattgcaggagagaaaatcggaatctcagcttccgggccttatcgtcctgtcgatactggtcgtgtttatggtgctcgccgccctgtatgagagctggtctattccatttgcggtcatgctggtcgttccgctgggccttatcggcgcggtgatagcggtgtctgttgccggcatgacaaatgacgttttcttcaaggtcggcctgattacgcttatcggcctgtcggccaagaacgccattctgattgttgaatttgcgaggcagctccatcgccaggggcagcccctgctggcggcaaccattcatgccgccggccagcgcctgcgccctattctgatgacgtcgttagccttcaccttaggggttgttccgttgatgctggcccgtggggcgagcgacagtacgcagcatgccatcggtaccggcgtatttggcggcatgattagcggtacgcttctcgccattttcttcgtaccggttttctttatcgtcatcgcgcgcttcatcgacaacctcaggaaagcgtga

SEQ ID NO: 144295 - DNA, 2034 bp, Enterobacter cloacae
atggctgagattttccagttcaagccaaaggctattctgacggcagcagaaaaccttggagcattcatagccaagtgccgagatcaactgactgtattcggatccgaactcaattgggatgctcctgtgtggccaaacataacagtgttcgccaagttgggcgttactactcgcaaaccaaaaccccaagagatgcaagatccagagttcatcgatttcgctaaagcttatttccgttaccagcaggggcatcatcccacggggacaaaaaatgaaagtaaggccctccgagcggttgaggcgtctttgcttcaagtaaacgggagtgcaaatattgatggcctgtcaattactgtgcttgatgaagcagctgaattggcaaggcagcactactcagatggctcagcatatagttgcggccgtgagattgagcggctggctaagtttgtagttgaaaaccagcttgtaccaaacgctatacaagattgggtcaatccaattcagcgtgctagtgataagaataaaacaggcagagaggcgaagaaaaatagagaggagaaactgccctgtgatattgctctcaatgcgctggccgaaatttttgccactaatccaattaatgagagggatatattcacatcatcggtgtttgcgatgctgatgtcagcaccatcacgcattactgaagttttggctctacctgcggattgcgaggtatttgaaactgatcgcgaaggtatagaacgttatggctggcgtttctttgccgggaaaggttacgagggtgatataaagtggataccaagcgttatggtcgaagtagccaaaactgccatcgccagagtgaaaactctatcacagaatgcccgaagcctagccaagtggattgagaataaccctaacaagttttaccgtcatattgactgtcctgatgttgctgatgataagccattaacgatggaggagtcttgtatagctctcggtcttgcttgtgaatccaaaaagcaatgtcattcttctctttataatcgaggactagtccaaaaagatggtgtgcacacgctaaatagtttgtggcagcatactttggcgcgtttgcctgatagttttccgtggttcgataaagacaaaggtattatgtacagtaatgctttgtttgcactgaatgctaatcagtttcatggaaaccgaggctgcctgccggttgaattgcacaaaccaacccataatttttttaacaatgatcttacgcctcgtgaggccattgaaggaaaacatgccagtatctttgatcgccatggttatcgtactgaaaatggagagcgggtcaaattgacctcgcatcaggctcgacacctgctcaacaccattgcccagcgtggaggactgtcaaacttggaaattgccaagtggtctggacgggcagacgtgaagcagaatcgaacctacaaccacatgactgaatacgaactggttggcatggctgaacgccttgatcccacaaaagcgctatttgggcctgttggcgaagtggcaaagcatctgcccgtgactatgcaggagttgaataccttagagcatgccgcagtccatgtgacggagtatggctactgtgtgcatgattacaccatgagtccttgtgagaagttccgagattgcgtcaactgtactgagcaggtttgtatcaagggcgatgatacagaaaaatcagaccgaattaaaaagcggctggtgaagtcggaacgattattttcgcttgctgaaacggctgtggcaagcggcgagatgggggctgaccgctggtatcagtaccataagaagaccgttaccaggcttcgggaactagtcgccattttagaagatccaaacattgaaaatggtacccagattaagctcttgggcaatgatttcagccagcttcgccgtgttgtcgcaaagacttctattgaggccatcgagcaaaaaggcaaagaaagtgaagaagctgtgatgttagataatttgacaactttgttaggggggggccttggctaa

SEQ ID NO: 144296 - DNA, 2187 bp, Enterobacter cloacae
atgacgcccgccgacctggcgaagttcgagccgcagcggcgttacgcgaccctggtggcgctcgccatcgagggcatggccaccgtcaccgacgaaatcatcgacctgcatgaccgcatcctgggcaagctgttcaatgccgccaagaacaagcatcagcagcagttccaggcatccggcaaggcgatcaatgccaaggtgcggctgttcgggcgcatcggccaggcgctgatcgaggccaagcaagcgggccgcgatccgttcgccgccatcgaggccgtcatgtcctgggatgctttcgccgagagcgtcaccgaagcgcagcggctcgcgcaacccgaggacttcgatttcctgcaccgcatcggcgagagctacgccacgctgcgccgctacgcgccggaatttctcgacgtgctcaagttgcgggccgcgcccgccgccaaggacgtactcgacgccatcgaggtgctgcgcagcatgaacagcgacaacgcccgcaaggtgcccaccgacgcgccgaccgagttcatcaagccgcgctggcagaagctggtgatgaccgacaccggcatcgaccggcgctactacgaactgtgcgcgctgtcggagctgaagaacgcgctgcgctccggcgacatctgggtgcaaggctcgcgccagttcaaggacttcgaggactacctggtgccgcccgcgaaattcgccagcctcaagcaggccagcgaattgccgctggccgtggccaccgattgcgaccagtacctgcatgaccggctgacgctgctggaaacgcagctcgccaccgtcaaccgcatggcgctggccaacgagctgccggacgccatcatcacggagtcgggcctgaagatcacgccgctcgatgcggcggtgcccgataccgcacaggccctgatcgaccagacggcgatgatcctaccgcacgtcaagatcaccgaattgctgctggaggtagacgaatggacgggcttcacccggcacttcgcccacctgaagtcaggcgacctggccaaggacaaaaacctgttgctgaccacgatcctcgccgacgcgatcaacctgggcctgaccaagatggcggaatcgtgccccggcacgacctacgccaagctggcctggctgcaagcctggcacatccgcgacgaaacctacggggcggcactggccgagctggtcaacgcgcagttccgacatcccttcgccgagcattggggcgacggcaccacgtcatcgtcggacggccagaacttccgcaccggcagcaaggccgagagcaccggccacatcaatccgaaatacggcagcagcccagggcggacgttctacacccatatctccgaccagtacgcgccgttccacaccaaggtcgtgaacgtcggcgtgcgcgactcgacctacgtgctcgacggcctgctgtatcacgaatccgacctgcggatcgaggagcactacaccgacacggcagggttcacggaccacgtcttcgcgttgatgcacctgctgggcttccgcttcgccccgcgcattcgtgacctgggcgacaccaagctctacatcccgaagggcgatgccacctacgaggcgttgaaaccgatgatcggcggcacgctcaacatcaagcacgtccgcgcccattgggatgaaatcctgcggatggccacctcgatcaagcagggcacggcgacggcctcgctgatgctcaggaagcttggcagctacccgcgccagaacggcctggccgtcgccctgcgtgagctgggacgcatcgagcgcacactgttcatcctggactggctgcaaagcgtcgagctgcgccgccgcgtgcatgccgggctgaacaaaggcgaggcgcgcaacgcgctggcccgcgccgtgttcttcaaccgcctgggggaaatccgcgaccgcagcttcgagcagcagcgctaccgggccagcggcctcaacctggtgacggcggccatcgtgctatggaacacggtctatctggagcgggccgcgaacgccttgcgtggccacggtcaagccgtcgatgacggcctgttgcagtacctgtcgccgctcggctgggagcacatcaacctgaccggcgattacctctggcgcagcagcgccaagatcggcgcgggcaagttcaggccgctacggccgctgcaaccggcttag

SEQ ID NO: 144297 - DNA, 168 bp, Enterobacter cloacae
atgcatcttgatagcctgcactttttaccgcttcctccaaaatacaaaaaaagattgattttctttacaaaccactcatcaagaattttctcgacaaccgtatcatctgaaacttttgataaagaaacaaaattagagttcatcaaacccaccattaaaatcaattaa

SEQ ID NO: 144298 - DNA, 528 bp, Enterobacter cloacae
ttgatttttgaagatgactcttttgttagcaataatgacctgtatattgatataaaggtacttgattcttttcttcctctttttgactccaaacagagtaaacacgttgattttatacttgaaaagtctctctcgagtaaatttttaacatcaaaatacaacatcgcactttatttgatgatgaacaaacttgttgtaaggagcggtgatactcctgttgtaagtaaatttaaactcgactacgacgaaatgtggaaaggaaatgtttctgaaagcacactctgcgagtggtttgaaaagcctgagttgtatatagaaaaaaggcagcgattgacgcctgagaagaagaaagggttgtatttattcctcaccctctttattaagaaggaagggataaaaaataccaaggagaaagcgtctgtaatcgcggaaaaattaaacgaactggcgcttcaggagtatcaactggacgaagtgattttcactgctaatcatgttaaaccttggctagaaaagccccttagctaa

SEQ ID NO: 144299 - DNA, 237 bp, Enterobacter cloacae
atgaccaaatcttttaatcaacccacagctgaccagcgcttgcaggcgctacaaaactatggcgaaccttcagatcgcttagtaagggagaaagagcgccaatatatcacatcgatttcccggtcaacagcttggaagcttgaacaaataggcaagtttccgcgacgtaaaccactgggggctaagtcgtgtggctggttgcttagcgatcttctttactggatcagtgagcgctaa

SEQ ID NO: 144300 - DNA, 1407 bp, Enterobacter cloacae
atgtcgggagatcgagagttccccatacatgtgcttcccgcaagggcgggacatgcaatctatgaagtagtgcaacaaactcaggcaccactttccatggttgctgcagatatgcttggtgtcatttcccttgtttgtcagaaccgaattgatgtttgtagattgaataatctgcggagcccgacatcactttttattgtgacaattgcggaatcaggggaacggaaaagcacggtaagtaagttgttaatgaagcccatttaccaactagaggaacggctatttgacctatataaacaagaaataattaagtggcggtataacgtaaagattttcaaggcggaagagaaagctttgatgtcaagactgaagtcagagatccgtggtggcaaagatccaaccataacacgtgaaagtctgagtatgctgcaagatagttatcctgtagatcctgtcagatataagttgacgtttaatgataccacaccagcggcgataaaagagtatctctgtggtgactggcgatcagttggcattttatcagatgaggctgggaccatatttaatggttatgcattaaatgaattgccgtttgtcaacaaaatgtgggatggcgcaacgtattcagtcgaaaggaaaaatgcacctgagaggttaataaaaaatgccagattgacattatccctacaggttcagtctgtagttatcaatagatatattgaaagaaaaggggatatagcaaaagggataggattttttgctcgtacacttatttgtcgtcccttttccacacaaggatatagacaaataactaatcctgttgtctcaagtgaacatttgcctgtgttccatgagcgattaatggagatcatcaatgagagtattgaaaacaaagatgaacgtatttgcctgcatttctcgccagaagcaagacagagatggattgcattttataatcaagttgaaacagaaatgcggctactcggatttctttcagactttaaagattatgcatctaaaatcgctgaaaatatggcaaggattgctgcattattacactattttaatggtgatgaaggggatgtatcacttaccgctgctgaagctgctatagaaataagtgcatggtacgtagatgagtatataaaattattttccaaacaacagaagttagatatggtcaatacagatgcagatgagctttattggtggataaaagaatattgcaatcaaaattttttaccatatatgaggaagaataccatactgcaatatgggcctaaccggttcagggaccgcggtaaagtaaatgaattattaagcactctttattctcaagggaagataaaggctgctaaaaaaggaaaaactatctttatacaggcgatggatacctgggggatttaa

SEQ ID NO: 144301 - DNA, 621 bp, Enterobacter cloacae
atgaaactttaccaaggtactcatggcgatcatattctcgcttacagagataaaattgctctgacagtcagtaatgctatcaatcagtttccacgtactatggcattaagagcggatcttcattacccacctattttagataatggtgatacggtatgctgttttcctaaccttgaacccggtgcaatatcacgatttctggattcgatgaaagcgattttggaagcacatgaacatcgcagaaagtttgctgggatcagagtcaataagaacgttgtacgtaatgtctgggcaagagaatactcaaagaatggcaaatgccatttccacatttgcttgttctttaacaaagatgcttactaccatctggggcatctcaaacatagtggtacacttagcaatctgatagtcagggcgtggtatagcgctctcggcttggaacttgaagattgtcgtgaaattgtacattttccggacaattgcaggtatgtgctcaacgtaaacgatcctgattttgacatcatatacaatgagttgcttgaacgactggattacttgaccaagcttgatacgaaggtatttggtgagggagatagaagtttcgggtgtagtcggggataa

SEQ ID NO: 144302 - DNA, 666 bp, Enterobacter cloacae
atgatgcttaaggctgttgtattcgatctggacggtgtgatcaccgataccgcacacctccattttctggcctggcgtgcagtggcggatgaaatcggcatcaccttcgacgaagcgtttaacgaacagctgaaggggattagccgcatggattccctgcagcgcatcctgaagcatggcgggaaagagaggacgtttagcgatgagcagtgcctcgcgctggcgacgaagaaaaacgcgctctatgtccagtctctggcgtcgctgacggaggactcactgcttcccggtattcgcggcgtgctggcggatatccgtgcggcgaaggtcaaaattgggctcgcctccgtttccctgaatgccccggggatcctgcacgcgctgggcattcatcaggccttcgatttttgcgccgatgcttcccgtattcgccgctcaaaaccagacccggagatcttcctcgccgcctgtgcaggcctgaatgtgcgtcctgacgcggctattggtatcgaagatgcacctgcaggcgttgaggcgatcaacgcggcgggaatgctatcggttgggattggagctggcctgaaccatgcgggattacaacttcattcaacgcgggaactgacctggaaatgcctgaccgagttttgggcatcccggacgtattga

SEQ ID NO: 144303 - DNA, 375 bp, Enterobacter cloacae
atgaagaacgcaactcgccttctggtgatttcgctcgccctcatcctgagtggctgtgcatattccccgaagcaggttgaagcctcaagaccgcttgtaaatcaagccgcttcgaccgatctccacgctatggcagctaacctgcaacaacctctgaacaccctgccgcagggcgctactcttagcgccaatggcaccacctttaccctgggtcagcgctatgtctctgccctggggctggaatgcattgaactgctgcctaaccgtaactacaaccagtcgcagcgcggcgtgacctgcaagaacggtgatacctggtatctgataccgcaactggaacaggcatctgccagcaacttgcttgccgttcaataa

SEQ ID NO: 144304 - DNA, 1764 bp, Enterobacter cloacae
gtgaagataacgaaatttcggcaattgagtgccattctgctgctggcctgcgcctcttgcgccgccattgccgccccttctaaggaagatgctcaggcctttggaatgaacaccccggcagataccggcgacggccgactgcaactcggcggtgaccaggcgatgagcggtcaggcgaacacctcctctaccaccgggacttttacgcagcaaaaccgccagggcatgttactgccgggcgagtccgacgtgcgtaaattactcccgcagtccgagtccggtctgccccctccttacggtgccaacctgtttgccggtggctatgaaaccgagcgcagcgacggtctgactgataattacctgatcgctcccggcgataagctgaatatctggatctggggcgcagtcaatttctccaacgtcgtcaccgttgataatcagggtaatatttttatccctgatgtcgggccgattaatgtaaaaaacgtagcggcaagtaaagtcaataacttagtcaccagccacatcagtgaagtatttaccaataacgttaatgtttacgtaaatttacttacggcaacgccggtcagcgtatttgtgaccggcccggtgatccgtccggggcaatatgccggccagtcttccgacagcgtgctctatttcctgaaacgcgcaggcggtatcgactccgatcgcggcagctaccgtcatattaaggtcttgcgtcagaaccgggtcattcaacagatcgacctgtacgagtttatgcagcagggcaaaatgccgaagctggcgctgaaggatcaggacgtgatcctggttgaaccgcaggggccgatgatcaacgtggccggtaaagtgcgcaacccgttccgcttcgagttaaagaacagcagcgcgctgggctccgagcttatcgattacgccctgccgctcgcgaaggtgagccacgtgggcgtgattggcgatcgcgccagcggcccgttctcggtctatatgccgtataaagattttgatcgcattcagctgagcgacggcgacaaagtgctgttcaatgacgatatgcatgcccaggtttacgacgtgcaggtgatgggcagctaccgtgggccatcttacttcaccgtgcgtaaagagacccgacttcacgatctgctgaaccatattccgattgacccgaacatggcagattacggctcgatctacatcatgcgtaagagcgtggccgcgcggcagaaagagatgctggaagactccctgaaccgcctggagcgcagcgtatttaccgcgccagcaaattccgacggtgaggcttccattcgtaccaaagaagccgagctggtgatgcgcttcgtggaaaaagcccgcaagatccagccgctgggaaaagtggtggtgtcggataagggcgtgattgccaacatcctgctggaacagggcgaccagattgtaatcccgaacaagaccgacctgattcaggtgggcggcgaagtgatgatgccgcaggcggtggtctacaacaaaagcgccaccctggaagactatgtggcctgggcgggcggctttaccgaccgtgcgaacgacaagcgtattgccgtggtacatgccaacgggctgatggagtttaaagacggcggtgatgtgatggcaggcgatcagattctggtcatgccgaaagtggacagcaaaatgatgcagtccatcaaagatattacccaggtcatctatcaggttgccgtggcggccaacgtggtcctgaattaa

SEQ ID NO: 144305 - DNA, 801 bp, Enterobacter cloacae
atgcttaaacctgttctcaatcaaacgccccgcagctcattccaggtgctgcgcgatgtaacgtttggcctgcttatacgtgaactgaaaacacgatttgggagttaccgactggggtatgcctgggcgctgttggatccgctgttgatgattggtctgtttagcgcgatttttgggatgcgcgggcacagtggttttggtggcgcgcctgcaccactctttattactgcgggctatctgccgtttatcttttttaagaatgtggttaataagctacaatcggcagtcaatgctaacaaagggttgttctgctatcggcaagtgacgcccttttccacctttatcgctcgttttattctcgaaaccattgttggcatgatggtcggcggtattctgattttggggttattgtggtttgggtttgatgccgtacctaatgacccgctacaagtcattcttatctatatgctgttgatgatattttcgttttcattgggcatcgtcttttgcattacgggcaacttagttaacgaggccgaaaaattcctcagtttgttgatgatgccgttaatgtttatctcctgcgttatatatcccctggcaagtatcccggcacagtatcaacactggtttttatggaaccccctggtacacgcccttgagctaatacgctctggctggattgctggctacgttagcccgaacgccagttggacttatctgtttggggtgacactggtactgctaacgtttgctatgagcagctatcgcctgagccatcgccgactgattgccagctag

SEQ ID NO: 144306 - DNA, 651 bp, Enterobacter cloacae
atgattgttctggaaaacgtctctaagtattaccccaccaaatttggccgcaattatgttttgcgtgatgtaaacattactctccctcgcgatcgcaacatcggtattttgggtgttaacggggcaggtaaatctaccctgcttcgcctgctgggcgggatggacatgcccaacaagggcaaggtcacccgctactgccgtgtctcctggcctctcgctttgggtggaggatttcagggaagtatgaccgggcgggaaaacacccgctttgtttgccgtattcatggcgtgcgcgatacgcaggcgattgaggagtgggtaaaagagttctcggaaatcggtcagcactatgagttgccgattaaaggctactccagcgggatgagatcgaaattttcttttgctgtaagtatggcttttgattttgatatctatcttactgacgaaatcatgtctgttggcgatgcccgttttaaacaaaaatgcattgatacgtttaaccataagcgtgaaaccgccagccttattatggtgtcgcatgatatgaagaacttacgtcaacagtgtgacatgggaattttgttgcgcaatggcagccttgagatcttcgataatatcggtgatgccatccgtatttatgagaatttataa

SEQ ID NO: 144307 - DNA, 1203 bp, Enterobacter cloacae
atgattcagtcaattcgttccaacaaatcttccaaattaatgcgcaagctgcataaattaaaaacgaaacctaaacatttcattatcgattctagtggttatcgtctagctaaaaactcttggcaacagagccttaaacttggcagttttatgtgggtagtggcattttttgctattgccgtagcctattttggtttcattgcttcggatcgctatgtaagtagagcagacatcgtcatcaaacaagccgaccagattaaaatgttgcctgatgctttatcgatgttaggtataggtggcagcaaccatgaggatgtacttttaatccaagattatctcaagtctgcagatttactcagaaaactggacaaggagttgggtctaaaagcccattaccaaagccacaaagtggattatttttcacgactacctgaggatgttagtcaggaagatttcattgaatactatcgcgatcatttaacattacgcttggatgaactgtcgggcgtacttacaattgagttacaggcatttgaccctgcttatggtcaacgcgtagtaagcctaatgctgaaagaatcagaaagttttatcaataagctcggacatcaggttgcactggaacaactggcctttgttgaaaaagaggttaatcgcgcctatcagcgggttcaggatgaaaaagctaaggtgttagattttcagaacaaacataatttgataagccctgaatcgaccagttcagcccgtttgggtgtggtcagccagattgaaggtgaactggcgagccagcaagcgcaactgaaacaactgcaaagctatatgaaagacacggctcctgcagtgatttcagttaaggccagaacagaggccttgactgagcaactggcacaggaaaaagccagactgacaggaacagaccagaatgcaatgaacgaagttaccgcccgttatatggatgttcaaacccaggctactcttgctgctgatatttataagacaggtttaattagcctggagcaagccagagtcgaggcatatcgtaaacttaaacatctactagttattagtcagcctactttggcagaagacgctgaatacccgcgacgactttataatcttgccaccatcggcgtcattctgtgcctgctctatggcctgattgtaatgggcctggctaccttgcgagaacatcaggactga

SEQ ID NO: 144308 - DNA, 1515 bp, Enterobacter cloacae
atgacgcgaggtgagcgtgtaatagcgttcattgagcgcttttgcatcgtgccggaaggtaagcttatcgggcagccaatgctgttggaccccttccagaaagaattcatcctggatctttacgacaatccagccggaacggatatggcgatcctcagcatcgcccgaaaaaacggtaagacgggtttaattgccggaattctgctggctcatctggtggggccagaagcggtacagaacacgcagattgtcagcggagcacttagccgggaacaggccgcaattgttttcaacctcgcggtgaaaatggttaacctgaaccccaagctgaaggagattgttcacattacgcctagcggcaaaaagctgatcggcctgccgtgtaatgtcgaatacaaggctttatctgctgagggtaaaaccacgcacggcctttcaccgattctggcgattctggacgaaacagggcaggtaagaggtccgcaggatgattttatcgatgcaataactaccgctcagggggcgcacgaaaacccgttgctgattgtaatcagtacgcaggcggcaaacgatgctgatctgctgagtatctggattgatgacgcgatcaaatctaaagacccgcacatcgtatgccacgtttatgaagcgccaaaagatgccgatatcagtaaacgtgaaacctggctggctgcgaacccggctctggggacattcaggtcagaaaaagatatggcacgccaggccgagaaagctggccgaatgccaagcttcgaaaacaccttccgaaacctaaaccttaatcagcgcgtgtctaccgtatcgccgtttatctcccgcagcgtgtgggaactgtgcggtggtaatccactaaacacaccgaggaagtggtttgcaggtcttgatctgtcagcccgtaatgatttaacagcccttgttattgctggtgaggcagatgatggtgtctgggatgttttccccttcttctggacacctgaaaagactcttgtagaacgcactaaaacggaccgtgccccctatgacgtttgggtaagggaggggcttctgcgcaccacaccaggtgcttccgtggattactcatttgtcgttgcggatatcgctgaaattatcggtgattttgaccttactgcgatggcattcgaccgctggcgcattgaccagttcaggaaagaggccgattccataggtctgagccttccgctgatcgagttcggccagggctttaaggatatgggacctgcagtagacacccttgaatcgttgatgcttaacggccgcgtgaggcatggcatgcaccctgtattaacgatgtgtgccgtgaatgcggtggtggttaaagatgctgcaggtaaccgcaagcttgataaatccaaagcaacaggccgtattgatggcatggtcgcaatgacaatgtccgttggtgctgctaatggggaagttaccgaacagggtggtgacttcgaagacttcatttttcgaccgctgagcatgtga

SEQ ID NO: 144309 - DNA, 258 bp, Enterobacter cloacae
gtgcttgggaaaggcgatcaggttgtcgtcctggtcctgatgctcggttttggtgtttcgtgcatcacgatcattctgattgcgtttcttctggtcgcggctttcaccgttggttgcgtgggaatggatctgcaggtcacggcgctgagccaggatagttcgctgcaaatcaggaatttgtttgcggaggtttttaatcagcgcctcatttctcgcttcaccgcgcgcgcgttcttcttttcgcaaatctctgcgtaa

SEQ ID NO: 144310 - DNA, 810 bp, Enterobacter cloacae
atgaaagtagtaagcccttatgaagaattaaaaagctggtttagtctcgaaaactatgagcagttaaaatcacttacaatcaaagaactgcatactgagcttgcctttagagaagcgattttcgacagtgtaaattttggatgggaagatgataatcaaaatttaaggtctatccttgaaggtaatcctattttaagcagacaagataataatcatggtcattttggcaagggtcaaagacatgttgcgcaggttagctttggtgatataaaaaaattagagaacaagttaataatgtttagcatggaattttttgaagaaaatggcgatttcaaaaaagagttgaaaaagaaaccaataacaaaaactatgagagacttttttctaaaccaaaatagcagcaagatgtatgtttcatttgatttaggaatgtccagcgatgaagaaattataacagccttacaaacgatgctaccagatcttaggaaggaatatgaaattgacccagtaaaaacagaaaaaattggactggcaaaaataagaaaacttgtcgattacaatatcattccaatgatggacctattgatttggtcaaaattcaaaaaagtaaaaatctcaaatatggtcttgtctcgtgtcttgtatcctgatttcactcaggagattaggggcgaagatcacattaaagatacagacaggcccgtagcagagaagtcattaaatggagaaacaacccgtagtctggaatattttatcagcaaaaacagccatctcctcaacataccgatttcagaattcggaactttctag

SEQ ID NO: 144311 - DNA, 1293 bp, Enterobacter cloacae
atgattttacgctggcaatggattctcaggcagacacttaaaaaactatggttcagggcaacgttatttgcaatggtagcaataataacggcccttttatctattctttttagatcaatgatcccagagtcagtatcagtgaaggttggtgcggaagcagttgataatattctgaacatactggcatcgagtatgctggcggtgaccacattttcactgagtatcatggtcaccgcttacggttcagccactactaatgtgacgcccagagccacgcgtttagttgtagaagacgtaaccacacaaaatgtactggccacttttatcggttcttttctcttcagcctggtagggattattgccctcaatatgggagcctacggagaaaggggtagagtcattttattcattgtaacactggttgtcattgccttaataatcatcacattgcttcgctggatacagcatttgacctctctgggcagggtaggtgagacaacagcaaaagtagaacaggcggcgatcgagacatttattgcgagagcaaaaagtccatgtcttggcggatatccatggcttgagaacaatgaacaaccaaaaggaactgttgccgtatatccggagaaaattggctatgttgaatatattgacatggtcaagctcggcagtctgctgagcaatgatcctcgtcatgtatatcttgtggcgcagccaggcagtttcatacatccatcgatgccagttttgtacctgagttctggtcaggagtcatcaatctgtaccgatttacttgaaacgatcattgtctcggatgtgcgttcatttgctcaggatccccgattctgtctcagcgtcatggccgaaatagcctgcagggccctttcgcccgcagtaaacgatcccggtactgcgattgatgtcattggcagaggtgttcgaatactctccgcttacgcgcagaataaaatagatgaaactgaagtgatatatccttcagtacatgttgcgccacttcagatcaaagacctactggaagactttttcttacctgttgcacgtgatggtgcgagtatgagggagattcagataagagtccttaaaggactgtctatgctgagtaagggttggcctgggatgtttgctgaagccgcacatatactggcatctgaaacattagagcatgcaactcgtactggtcatatagcccatgacgaatatcttataaaatcaatttattataatttattcagtggcgaaaatcctaaggaaggtgcgaacaagttcctgatatga

SEQ ID NO: 144312 - DNA, 1245 bp, Enterobacter cloacae
atggaagagcaagctatccgccatctgctgaatggccgccgatatcttttattacaaggaccgatgggcccctgcttttcacgtctggcaagctggttgcagagcagcaagcgtgaagtgaagcaggtctgctttaatgccggggactcatggtatgccgcgaaagagaccgcgctgcactacaccggctcagtaaaaaattttgctttctggctgcgcgagttacataaaacctaccccttcgacaccatcgtctgttttggtgactgtcgcccgatgcatatcgaagcgaagaagtgggcgcgcagcaaatccatcgattttctggcgtttgaagagggctatttccgtcccttctacatcaccctggaaaaagggggcgtgaatgccttctcctcgatgcccattgatgcgaagtattatcgcgagcagccgctgccggagctgaaaaccccaacgccgtggaaaccaagttcctttaaccgtgccgcccatgccatgctctactatgcggcgggctggtttggccgccatcgctaccggggctaccgccaccacaagtcgttctccccgtggtatgagatgcgctgctggttccgtgccggtcgtcgtaagctgtggtatcgctggcagcagcgccacatgctgagccatatcactgaaaaactggataatcagtactacctggcaattttgcaggtctacaacgacagccagattattcatcacagcccgtataaagacgtgcgtgactatatcgaaaccgtgatccgctcctttgcccggcatgcgttgaaagagcgctatctggtgttcaagcatcacccgatggatcgtggtcaccgtttttacggcatcctgattaacaagctgaccgaaaagtatgacgtcagcggccgggtgctctatgtccacgatctctccctgcccgccctgctgtcccacacccggggcgtgatcaccgtgaacagcaccgccggcctgtcggcgctgatccataacaagccgctcaaggtgatgggcaaagcgctgtacgacatcgaagggttaacctggcaggggccgctgaaccagttctggcaggcggattttgctccagatgcaaaactgttccagcgttttcgtacccacctgctctatcaaacgcagatcaacgccgtcttttacggcaagtccgactggctgaacatcccgacagaaattcccctgacgacaccgcttgccgattccgagctcgaacgctaa

SEQ ID NO: 144313 - DNA, 1959 bp, Enterobacter cloacae
atggcctgtctcggacaaccggtgcgctatcaatctcatagtgctgcccttaatgacgatgatattgctattggctggggtaataaaaaaaacagcgatcgtcttcgccttcaagcagcctcgcagaaccgaccattctggcgtctcgaagatggatttataggttatcagggccacccagctcaagggggtatcccgcttggactggtatgggatgatgagggcatctattatgatgctcgcagcccgagccgtctggaacggctgatttctcaacagctctccggaaatgaacaagttcgagccaccagattgaccgcactgttgtgccagcacggcatcactaaatacaatgtctacccgggtcttgatgaggctcacaccttgcctccagaactgacgcatcgcttcagattggactctcgcccacgagtgttgcttattgatcaagtagctggcgatctttccatcactggagccctggccgatgagagcagttttttagccatggtcgctgccgctcgtgagcgtcatccgggtgctcgcctgatgttgagaacccatcctgatacccgtttgggaaaaaaaaatggggcgctggcccgtctcaatctccctgatctagaaatagttagcgaaccctgccatccccatgcattactccgtgaggtcgatgcagtttataccgtctcctctcagatgggatttgaggcattgctgcttggtaaaccagtgtattgctttggcatgcccttttatgctggctggggattgaccgtcgataatatgttttgtgaccgaaggtcaccagttactcttgagcaattaaccttcgcgactttgattgcctatcctcgttattttgacccaatactgcaaaaaccttgtgaagccgaagatatcattcagttgattgttgcccaacgtaacccctcccctcgctatcgccgtctgtatatggtgggcttctcgctgtggaaacgcgcctttatgcgcgccttctgtcagccgctggctgaggagctgcgctttgtgcgcaccccgcccaaacggctggccgctgacgagcaggtgctggtgtggggcagtcgttatcccgaactggcaaacgcaattcgggtggaggatggttttatccgttcccggggactgggctcgaacctgtgccgcccttcctcgctctccatcgacccggtggggatctacttcgacagccgccgtccgagcgggctggagcagttgctcaaccagcagcagctcagcgaacaggcgctggaacgcggcgccgcgctggtggacctgctccgccagcatggggtcagcaaatataacgtcggcaccgtgcagccgttcacgccgccggccgacgggcgaacgctggtgctggtggtgggccaggtcgatggcgatgcctcgatcctcaccggcagtccggtcattcgcagcaatgaacagctactgtgggccgtgcgtgccgcccggccagaagcgcatatcctgtttaaaccgcatccggacgtggtggcgggaaaccgggccggtgccatctcggccgaatgcctggcgcgctgcgttgacagccaggtgctggatctcggcctcaccagtctctatccccatgtggatgagctgcataccatgacctccctcagcgggttcgaagcgctggtgcagggagtgaaggtcactacctggggccagccgttttacagcggctgggggctgaccgaagatatccatccggcggagcgccgtcagcgcaccctgcccctggcggcactggtttacctgacgctggtcgcctatccgcgctatatcgactggcagagcggcctgtggatgagcccggaacaactgatccgccagctggcagcgcagggaaactcctcatcgcagaaggccagccgctggcaacgctggcagatcaagctgagctatctggcacaaacatttcgttag

SEQ ID NO: 144314 - DNA, 1293 bp, Enterobacter cloacae
atggcttctttaaagataaaatatgctgcaataattatcagcagcctcatagcaggggggctgatatcggttactgcctggcagtatgtaaactcatcacaaaaaacagtacaaaccgaacaaaaggcaccggagcgaaaggtacttttctggtatgaccctatgaaaccggataccaaatttgataaacccggaaaatcgccttttatggatatggaccttgtgccgaaatatgctgatgaaagtggcgataaaagcagtggcgggatccgtatcgatccaacccaggttcagaatctgggattaaaaacgcaaaaagttacgcgaggaatgctgaattattctcagacaatcccggctaatgtcagttacaacgaatatcagtttgtcattgtgcaggcgcgttctgacggtttcgtcgaaaaagtgtatcccctgacgattggcgatcatgtgaagaaaggcactccgcttatcgatatcaccattcctgaatgggttgaggcacaaagtgagtttctgctgttatccggtacaggcggtacgccaacccagataaaaggggttctggagcgacttcgtctggctggtatgccggaagaggatattcaaaggctgcgttcaacccgcacaatccagacccgttttaccattaaagcacctattgatggtgtcattactgcatttgacctgcgcaccggcatgaatatttccaaagataaggtggtggctcagattcaggggatggacccggtctggatcagcgctgcagtgccagaatctatcgcctatctgctgaaagatacgtcgcagtttgaaatttcggtaccggcttatccggataaaacattccatgtcgaaaaatggaacattcttcccagcgtggatcagacaacccgcacgcttcaggtccgcctccaggttactaacaaggatgagtttctcaagccgggcatgaatgcctatctcaaactgaatacccaaagtcaggagatgctgctgataccaagccaggccgttatcgataccggcaaagaacagcgcgtgattactgttgatgatgaaggcaagtttgtgccgaaacagatccacgttctgcatgaatcacagcaacagtccggcattggctccggcctgaatgaaggcgataccgtggtggtcagtggcctgttcctcattgactccgaagccaatattacgggcgcgctggaacgtatgcgccaccctgaaaaaacagaaaacagtatgccagcaatgtctgagcagcctgtaaatatgcattcagggcactga

SEQ ID NO: 144315 - DNA, 243 bp, Enterobacter cloacae
atggcctggctgctgccgtgggttcgaataagcagacagccgaagcaattatcggcaatgctctggcaattgctgatgttgttgtgcggcagactgcgcagcagggcgcaaactctgcgacattcgaacagcttcgggaggtggttgccactgagacggaggcgcgagttactgatgttacccgtcttgaggcaaaaactgcgcagaatgaagccggaattactgatgttcgccaggcgttag

SEQ ID NO: 144316 - DNA, 729 bp, Enterobacter cloacae
atgaaatttgcaatcttcgataacttaaacggaaccactaacgttagtctgaacagaaaaatcgttaagactaacgaaatgactaacaacagaaacttactgaaaaactttatcaaaagctttaacattcaccgcaatcttcaagcgaaacttctttctaaaattgaaaacgctctgactgttaaaaacattcgttctttcgaaatcggtatgtcagaactgaacgacaaaccagctatcgtagcgtatgcgaaagacttatcgaaagctgttatcgtttgctgtgaaagtcgcaactggaaagctctaggttcagacctgactatgatcaaagcaaatgacaaacaagagttcattcaacagtacgttggtgattttgtagagattaaagaagaaattgaatttccgactgaacagaaagttgatgttcttgcttctgaaatggaagaattaagaaaggagattgaagctctaaaacaaaaaaacgctgaactcaaaaaagagaacagcgcttttagaaagaacatcaagggtgagaaattatcttttgacgaagaattgattattgcaatgattgaaattgaatcagaagcgccaacttctgaaatcgttacaccaatttctaacgaatcatctgtatttattgtatcaaataccgaagagaattcaaacgagccgacagatgtttgtaacgatcaatcatgcgttatcaaactcccgaatacttaa

SEQ ID NO: 144317 - DNA, 543 bp, Enterobacter cloacae
atgccccatcacaaaaaaggtgtccgtaataattgctttcatcaaaattatactcatgacgtattgtttcccggcgcaacattcagaacccgacataatggagaatgcgccattcttggtcgctctgatgataaatcaaggcgaggctattatgtcgtggaattcaaagacagtggcatcatcaaggaagcctatggctcgcatattaaaactggttctgtatcagacgaagcttttccatcatcggaggaagaacgacgaaagttactgatgacaccaaaatattacggcgtcggatatattggtaatggatgtcattcaaccattgaaaacacccgaacacaccaaagaacgagagcattcatactctggcataacatgctggcaaggtgctacatgacaaccaaaggaaagcagtattttaaaggctacaaaggtgtcactgtatgcgagcgatggcataactttcagaacttctgcaatgaccttccaaaattgcatggctacaacaaatggggtgatgctgccaacttactgatttag

SEQ ID NO: 144318 - DNA, 663 bp, Enterobacter cloacae
atgaaaaaattaatcacccttcccttattgatatcaatgaccggtttgttatttgcaaatcagtcactggcgattacgcaatcacagatgcagatgagagcgactgctacatgtgattcttacgcaagtatgtccagaattgccagtccaggcgtggtttatgaagtgtgtctgaatggagctaaagaatcgatgcagggtcgaaactcagcatgcgaaagcaaaatacgacaattcaataaacaggcggatacattgcatggaatggaacgcgctgagtatattgaaatttctcaggcatatcgcatgggttgcaatgttggaaagcaaacacccaagataaatagtgaaaacaagcaagcaatagcgaaacccttatcacaaaaggaaatagaggaaaggcaagaaatacaaaattatagcatggaaattcgtaatgcatttagccaaatcaggagtggcgcacctgacttaacaggacaaaagtgctctattaaagtatggttctctcaaagtggtaatgtgttgtcaataaaagtagagtccggtgataatgatgcatgctcttatgttttaaagagaacccaaaaaatcaagctcagtgcaatgaatgatagtcagtacaaagtgtttagaaatacacctattgattttagtttttaa

SEQ ID NO: 144319 - DNA, 405 bp, Enterobacter cloacae
atgaaacgattgattccaatccttgcctctgccgcaagcatgaccattccggttgctgcaatggcagacaatattgtttgtcatggcggctggagcattgagcgacacgttaccggtagtgccagtagtggattcatgagctacatgaaagatgttggcgtcataaagttattgcataacggcaagctcatttcacaaaaacgcattcaggacattcagcaatcggtgtatcagaccagtggtgctccacttgttaactacgagtttgatgttgataaaaacagtttctatatccttgctctggatatgagcactcagggtgcatcaggtggcgagccggatatcaaactttggggtactgacgtaatgggaattgattgcatcttacaggtaggtgctgaatga

SEQ ID NO: 144320 - DNA, 927 bp, Enterobacter cloacae; identical to SEQ ID NO: 128534

SEQ ID NO: 144321 - DNA, 1284 bp, Enterobacter cloacae
atgcgtgttgaagttgacctttcaaaaaacaataatggcagcgtagtaaaatttaaatttacacttgaagaatccgaccacagagaaagtataagcacaaatgcaggacgagcaagaattatcttaggcgaaaatgaagccaccttccacattcctgaacagatcaatcttccgcatcctgatttatgtgctctggctgcattaaaaataattagcccatatgttggtaatcgttttgaaatggatagacctgtatcttctacattcgcagaagcaataaaaattgcctatccggaaattaaagaggtaacagttgatagtaatttagtccctcgtatcactccaacaattgagcgtcctgttgtatcgttctctggcggtgcagacagtgtagcagctgcggcgcttatggatgcaggcactcctctaattttaagtgcaagaacatggcatccaaatataggtgaatttgaaaaatggtataatacagatgctaatattgaaacacttaatcgtatgccaagtcgtttcaaaaaaatagctgtaaaatcggactttgaatttcttagtacaaacggcaattattgcatctatcctgattcttacgcatttaccattccatgcttactattagctgactcactccaaatatctcacatcattactggtgatatttgggtggcattcaacggcgatgagacgatttttaataaaaatctaacaagtaaacattacggtatatttaacgctgttgggttaagcttagaacccgttatcaatggaatcggtgagcttgggagtttaattatttgcgatcattacaatttattagatatcgcaactacatgtcagtatggaagcttccaaaaaccatgtatgaaatgtattaagtgctttaggaagacattatattcctgggccctatttggcaagtcgctgtcacaatctgatatcgacaaatttaattcatccgtcccagtgcaatctttctcaaaaaacaatgatagaaaaggactatctcttggaccatcatataaatatgttttcgataaaataaaccacccattctcaggggcaatcaaagaaatacaaagccgtatgacaaatatacctatcgatacgacttttgtaaaaaaaatatatacacctgcatatttgatcaaccgaccagagtttaccaaaaatgcatttattaaaatatctcaactaatggaactcatgaatagtaaagatcttgatagtttttccggacttgattatagggtaatgactccaaattattga

SEQ ID NO: 144322 - DNA, 1110 bp, Enterobacter cloacae
atgtacgattatttggttgttggggctggtttatttggtagtacttttgctagattagctactgatgctggtaagaaatgcctgatcatcgataaacgcgatcatattgcaggtaactgctatactgaaaagacacatggaattcataaacatgtgttcggtccacacattttccactgcaatgatgaagctatatgggattttgttaatcgttttgctcagtttaataactttgtgaaccgccccattgctatcaataacggaaaagcgttttccttaccattcagcatgtatacatttaatgccatgtggggtgtaacaacgcctgaagaagctattgaaaaaatagaatctcaacgattgaaactggacagggaacccttgaatctagaggagcaggctctgacccttgtaggagaagatatctacaacacgttgattcgagattatacaaaaaaacaatggcagaaagatcctaaagaattaccgccaaccattatcaaacgtttgccagttagaatgtcatgggataataattatttttacgataaataccaaggtattccaatcggtggctacacagccatgttcgaaaatatgttggaaggaattgaagttaaaacaaacgtcgattattttgctgataaacaatactgggatagccttgctgaaaaagttgtattcactgggaaaattgatgagtactacgacttccaacatggagaacttgagtaccggtcattaaaatttgaaactgaaattatgccaaacagtaattatcaaggtaacgctgttgttaactataactctgcggatgtcccttggaccagaataatcgaacataagcattttgactcaaacagcgcagccgaagatgttaccgttgtgactaaagaaatccctgatacatggtccagggataaaacgccttactacccaatcggcgatgatatcaatatggccattttcaaaaaatatgaggatatggcaatattagaaactaatgtcatctttggtgggcgcttggcagaatatcgttactatgacatgcaccaagtgattggttccgcattcaataagttcaaagatgagttggcagcaacagtttaa

SEQ ID NO: 144323 - DNA, 1314 bp, Enterobacter cloacae
  misc_feature (1301)..(1310): n is a, c, g, or t
atgcttcataacgagattattgtaccggacgagcaaacaacgtacttttatcaagctagtaatccatgggaaagtagcctgatagacccatctctactgacttcaatatggccaaatttacatagtctcaatcgcgaacccgtaaacgatgggataaccttgaagacatttgttcagaaatatacgacttcggttaactggctaataattgattgcttacctgctgctcctttgtttgagagggcacacgagcaaatcactcaacttgatattgttatagtacgtgtgcttcttaacgacaaccccctctcagccagcctggctcaggttgattcagtactgagtaaagcaggtatgcgtcgtttacaactcttatctgagcgccatccagatctggcttatgccatttatataaaagatcaattggcgcttcaggcaggaatggccaaagaaattgcacaattgcaacatcaattattgcaggcagacaatacaatccaatcgttacgtgaaaattatgagttgcaagtagaaaaaataaaatctcaggttcaacaagaagagattcagcaacttaaaaatgaatgtacaacacagactcagattctgttaaaaatagaagcccttcatgaaactgcgcagtccacccaaaagcgtggtatagaacaagtcatctcggcgctcgatgaattgcatcatcaaggcaatactgaaaatgaattattgaaatcattggcgattcaattcgattcggaaagtatcaaacgtaaagaagaaaatgatcttttaatttcacaaaatagtgctggacaagaaaagcactatcaaattattgaaaagatattagctcttactaccgaacaatccctccaacaggaaaaacgtcataaagaatggcagtcagttttgaaaagagaattgaataataaacttgtaaacactgctcggcaaattgagtccttcattgcaattcaaaattatctgtccaccggcgatggtattgccagtttccatggatggcctatcagcgctgatataggtttgttcctcttagaaaaaatgaaggaacggcaatatgatgcgattattgaatttggaagtggcacatcaactctattaatggcgaaggctttaagagcactcaatctcgacaaaaatattacttataaatcaataattacattcgagcataatgaagagtacttcttaaaaacccaaaatcagttggctcttcataaagttgaaaacttagtaaatctttgtttggcaccgcttaaagaatggagcgacgctacagggannnnnnnnnngtga

SEQ ID NO: 144324 - DNA, 1551 bp, Enterobacter cloacae
atgtcgttgaaaaagtcgtcccttgccattctgctcgctttgctgtttttctttgttgccagtgccgcaaccaatgtcttgctggccattaaaatccatgattcactggataacgtggataaagagatccaggtggtgttatccattatcgatcccattaaccacagccgtaccctgcgcgtgcgggtcatggagtacatgaagcaggcggagagcggagataccgccggtcttgcggagaagctggactcggtaaagctggcgctgaccaaggccgatggcgcgtttgccgcctttaatgccgcgccgcgtctggcggatgaagctccgttagtgaaaaattacgacgacgcctggcttgcctaccgtaatcagggactggcaccgctgattgatgcggcctcggcgcatgacgcggcaaaatttgatgccctgatcccgcagatctcccgtctcgaccgccagtacgaaatcgtcctcgaccaggtgctctccgtgcaccagaaatacgcgaaacagctgaatgacgatgcgcgatcccactttgcctctggcttaaccattattgccgcctttgctgcgctgtttgtggtggtgattatcggcgtgagcgtactgatgaagcggtttgtctttgccccgattaacctggcgcgggcgcactgcagccagatcgctgccggtcagctgacggaagcggtgccgcaaaaagcgggctcgaacaacgaaatcgatctgctgatgggctcgatggagcagatgcgtctggccctgctggagactatctctcaggtgcgtgaagcctgccgtaccgtcaattacgcttcgcaggaaattgcctccggcaacatcgatctggcctcgcgtaccgagcagcaggcgtcagccctgacggaaaccgccgccagcatggagcagctgagcgctaccgtcgccaataataccgacaatgtgtatcaggccgggaagctggtgcaggatgcggtgaataacgcccgcacgggggaggccgtgacccgcgaggtgatcgagaccatgaacaccatcgccgctaactcccagcgtatcgaagatattaccagcgtgattaacagcatcgccttccagaccaatattctggcgttgaacgccgcggttgaagccgcccgcgccggcacccagggacggggatttgcggtggtggcaacggaagtccgtaccctggcgcagaagagcgccgtggcggcgaaggatatcgaaaacctgatcgcccagtcggtctccagcgtgaaaaacggttctcagctggtgaatcgctcgggggaggtgatccatgccattatcaattcggtcaataaggtgaacgcgctgatggagcagatctcggtggcgtcggaagagcagagccgtggcatcggccaggtcggccaggcggtaaccgagatggacggcgtcacccagcaaaacgccgccctggtgcaggagtccgcggccgcggccgcctcgctggaagagcaggcgaaacacctgacccagagcatcgccagcttcagactgccggaaccggcataa

SEQ ID NO: 144325 - DNA, 174 bp, Enterobacter cloacae
atgatttcatcaatcattggggtagatgcacaagaagcgatgatgttattgcaggcaatgattggattaaaaatgataaaaattgatttatcatatccaatactcgaaaccggtctgataaagataatatccaatggccactatataggactgaacgcaaatggatattattag

SEQ ID NO: 144326 - DNA, 243 bp, Enterobacter cloacae
atgccagtctcgccaatagaaatcaaaggaatccacaacatagccgcgaaagacccggtcaatcaggttgcccatggcgccaccgaggataagactgtaagcgatggcttctcctttatgacgattttcaaggatcagcttgatcagaaaaatcgagaccactaccgcgattccgataaaaaagtagcgctgccagcctccaccattcgcaaaaagactgaatgcggcaccggtgttccatag

SEQ ID NO: 144327 - DNA, 1935 bp, Enterobacter cloacae
gtgagtttaataaacggaaataaatacttaaaaagcggcaattatgatttagccttaattgagtataataaaatacattctgacagccctctctatcctcaagctaagtttaatatagaaaggatgaagagtctcggttttactacggaaaagaaagtcgaaaaaccagtaacaaaaaatacgactcaaccattgctttcaattgtgatgccagtttttaatgttggcccttatttagatgccagtattctttctgttctatcacagacgctggaagattttgaattaattattgtcaatgatgcatcaaccgataatggtaaaaacattattgagatgtatcaaaatattgacagtagaataaaatttattaatttaaacttcaatacacttggtggagcgggtattccaagcaacattggtatcaatgctgcccaaggtaaatatatcggatttgttgatagcgatgactgggttgtaaatgatgcttttgaaaaattggttacggaagcagaaaaattcaatgctgaattagtcattggtgatttcaatacgtttaatgaagataatcgtgtcgttagccctgcatatgataaaggcagatgggctaatattccattaaatgagattacctctggtttgaaatgcgctgaccttttcaggatgtctcctgtaccatggcgcaaactttatctcacaaacttcatgaagaagaaaaaaattgcctatccagagggtgattatttttatgaggataatccactacactggtttgtgttatctgaagcagagcgagtcgtaattatagataaagtaattagttatcacaggatggctcgcgaaggacagacaatgagttcttcttcatacaaactaggggcgatttcatcacatattaacactactgcgaatttcttattgcagcagacaataaaaaaccagttagtatttgatgagttttatgactattgttatcgaaccggttggattgctgataatcaaccagacatcatgacaaaaaacatccttaaacgcagactgtatgatatttataacaaaactaagaaggctttgcctcctgctaaactcagggacaactttttaaaaagatttaacgaatataacgaagcttatcctcaattagatttgacagttgtaataccggtttataattgtgaagacctgattgcagaaagcattgaatctgtattaaaaatgacagcattgaaattcgatatactgatcattgacgatggttccactgatactacagcagaaatttgtcaaacctatgcagataaacacagtaacattcaattttataagcaaggcaataaaggtgctggacgtgcacgtaactctatcattcctctttgtaccggtcgttacactttcttcctcgatgctgacgatgttatcaacgcacaggcattagaaacctcagtgaaaaaagcaactgcggaaaatgccgatttattatttatgcggtatcgtattgagtactttgaggaaaactcatcgcgtggaatgtttaatgctgatacaaagttatgggaagcattcccatcaaaagaagacaatatttcacttaaaaaacaggttgcatctctcattaactatccatggaacaggattatcaaaactgatttaattcatgatgaaaatatattctttggacctactgtcgtccataatgatattccatatcattggcacagcataattgcagcaagaaacatttcctatacagatctggaagtctgtactcacaggaagttttcaaagcgggatcaaataacgaatatttctgatagtcgtcgtcttatggtctttgaagcacttcgctatacacaagaaaggatcatgcaatatcctgagttttcaaatatcaaacaacagtggactacatttagtctgtctcttatacacatctga

SEQ ID NO: 144328 - DNA, 1170 bp, Enterobacter cloacae
atgcatatttcaatcactggaaccggttatgtcggtttatctaatgcaattcttttctcccaacacaataaggttatagctttagacattgactcaaataaagtccagctaattaacgatggaatttctccgattattgatacagatatccaggaatatttatcaaatcgcccgctacacttgcgggctaccctcgataaattcgaagcataccgggatgcagatttcgtgattattgccacacccacagattatgatccggtaacaaactattttaatactagttcggtcgaagcagtagtatgcgatgttatggccatcaatcctgatgccgtaatggtgattaaatccactgtgccggtaggatttacagagcgccttaagcgcgagttgggctgtgaaaatttaattttttcgcccgagtttttacgagaaggtaaagcgctgtacgataatctctacccttcacgtattgtggttggcgagcgtagcgagcgggctcaggtcttcgctaatctgttacgtgaaggagccatccgcaaagatgctcctgtgctgttaaccgatagcaccgaagctgaagccataaaactatttgccaatacctatctcgccatgcgtgtagcctatttcaacgaactggatacctacgccgctattcatgggcttgatacccgacagattattgaaggtattggtttggatccccgtattggcaatcactacaacaacccttctttcggttatgggggttattgccttccaaaagataccaaacaacttctggcgaactatcgtgacgttccacaaagtctaattcgtgcaattgtggatgctaatacaacacgtaaggacttcgtggcagacgatattttgcgccgcaatcctaaagttgttggcatttatcgtctgatcatgaaatcaggtagtgataacttccgcgccagcagtattcaaggagtgatgaagcgtctcaaggccaaaggcatagaagtgattgtgtatgaaccggtactcaaggaagaacagttctttggttcgcgggtagaacacaatattgaagtcttcaagcaacaagccgatgtcatcgtagccaaccgccacgtccctgatctggctgatgtagaaactaaggtctatacccgcgatctctttggtaccgacgcttaa

SEQ ID NO: 144329 - DNA, 723 bp, Enterobacter cloacae
atgaataatattattttgttcaaatcaaaaaaacatattcttgtagaagaaaattataatgagttcataaaattttgtcgctatcaactgtccggactaacccaaactcaggattgggagcagtatgcctggaaaggatatgtcacatttagaaaaatagggattggaaataaaatctttgattccattgatgcaatgcacgaagattatatcaattttgcgaaagcatatatcagatatcaacacacattgaaaccattaaaaaattatggggttattatgatggccttgcgatgtctcgaacaggcccttttgcaggttcagaacactggtctcatttataatgttacagccgttgttttcgatgaggcaatgcagatcgggagtaaatattttgaaggtaacgttttggctaaatgtggaatacagcttgaaaaaatatcaaagtttctgtgtgaacataatcttgtgaagtcaggatatatctcatggaaaaaccatgtaaaacagaaagtcaaaaacaattatcttcctgagattgaggattatcaccgaagcgataagttaccagatgaagaagcattgctcgctattgctgatattttttctcaaaatgatgagttactgagtccaagggataagttcaccagttcagtatttgcacttctactttgttgtccgagcagaatttctgaaattttagccttacctgggctttgttga

SEQ ID NO: 144330 - DNA, 366 bp, Enterobacter cloacae
atggccagactctttcagtcgggttatcactgcttttttgccatccggcagaatcccggcttcaacctcatctattcccagtttccgtgcgactgcttcagcagtaagctggttatccccggtgagcataacgatgcggatccccgcctgacgcaaagctttaagcgcatccggcgtggttgctttcacgggatccgagatagctatcaggcctgcaaggttcccgtctgtggccacatagataacggtagcgccttccatccgcaacgtatccgcaacggccttttgattatcaataacgatactgttttcctgcatagccagttcattaccaataacaacccgttgaccttcgacatcgcctga

SEQ ID NO: 144331 - DNA, 1299 bp, Enterobacter cloacae
atggcaatatttcatatgagcgctcaaacaataacacgcagcaaggggcatagtagcgtagctgcggcagcttatcgccacggcgaaaagttaacggacgaacacacaggagagatccacgactacagcaaaaagaaaggtatttcagacagtgtgatattaattcctgaaaacgcagaccgtaattttttaaaacctgcgtatttatggaacacgatagaaaaaagcgaaaaaagaaaagatgcgcagttagcacgcgagtttaatattgcgctccctgtcgaaatgacagacgaacaaaaaaaggtgttagcaatagatttttgccaagagcattttgtaaaaaatggaatgattgctgatatagcttttcacaagctcgatagcgacaacccacattttcacgtaatgctaaccacccgcagccttacgccggacggttcagggttcgggcataaagtcagggaatggaacagcaaggagcagctcgaaggctggcgcaagagctgggcagacacagcaaacgagcacatgcaaaaggttggcatcgatgcgcatatcgatcacagatcgctgaaagaacaaaaagcagagcttgacgctatcctcccccttctcagaacggttgagcaagaggcgcaggctatcagcttagacagaccgccgactatccatagaggccatagccgcaatccagagcgacaagcacgctttgacgtgctccaagaagtgaaagtatcacaagaagcaaaagcacttaaccacattgaacagaaacagcttaagccctcgccgctggctccagcttcctcccctgccgcatctttgcaagatgctacacagggaggcaatgaaaacaacccgcaaaatagactcggcgaagttggcgaatatcttcaatctaaactcaataaagaagataaagcagatcttaatgctgataatgaaatcaaatttcacacggctaaagatgctaaaaataatgataaaagcagttcagcagcagccataggatcaacatcccacatcaatttaactgatgatgataaagataagaatctacatctaacagaagcacaaaaagaagagttggaggacttagaaaataaagaagcagccgcgaagaaaaaagcttatttgatgggcggcgctgccgttcctgactttagcgaagaaaacaaaatacagtcaaaaggtgactttaaaaataaatttaataagatgaaaaagtcaataactaaacaaataattgatgaagggtgtgatgtatatcaaaatagaagaaaaatattaagataa

SEQ ID NO: 144332 - DNA, 798 bp, Enterobacter cloacae
atgaccagtctggcttcctccatgaccgtacacagcctggatcagcgtcttaatcccgatttggctccgccggaaatttctgagaccatgcaggagttcaataacatgttcgatcgcctggaggggtcattccggaaactgtcagatttctcgtctgacatcgcgcatgagctgcgcacaccggtcagtaatctgatgatgcagacgcagtttgcactggctaaggaaagggatgtttcgcattaccgcgaaatcttattcgcttacctggaagaactgaaaaggttgtcacgaatgaccagtgatatgctttttctggcacgttcagagcatggtctgctgcagctggataaacatgatgtggatctggccgccgaactgaatgaattacgtgagctgttcgagcctctggcagacgaaacaggaaagacaatcaccgttgaaggagagggcgttgttgccggagacagcgatatgctgcgacgtgctttcagtaacctgctttccaatgcaatcaagtattctcccgataacacctgtacagcgatacaccttgagcgtgacagtgactgtgtgaacgtgatgattacgaatacgatgtccggccaggttcccgctaatctggaacgtttgtttgatcggttctatcgagctgattcatcaagggtccacaacacggaaggcgcggggctgggattatcaattacaaggtcgatcattcatgctcatggcggcgagctgtcagcagaacagcaggggcgggaaattgtgttcagtgtgcgcctgttaatggattaa

SEQ ID NO: 144333 - DNA, 798 bp, Enterobacter cloacae
atgaccagtctggcttcctccatgactgtacacagcctggatcagcgtctaaatctcgatctggctccgccggaaatctctgagaccatgcaggagttcaataatatgtttgatcgcctggagggggcattccggaaactgtcagatttctcgtctgacatcgcgcatgagctgcgcacaccagtcagtaatctgatgatgcagacgcagtttgcactggctaaggaaagggatgtttcgcattaccgcgaaattttattcgctaacctggaagaactgaaaaggttgtcacgaatgaccagtgacatgctttttctggcacgttcagagcatggtctgctgcggctggataaacatgatgtggatctggcagccgaactgaatgaattacgtgagttgttcgagcccctggcagacgaaacaggaaagacaatcacggttgaaggagagggcgttgttgccggagacagcgatatgctccgacgtgctttcagtaacctgctttccaatgcaatcaagtattctcccgataacacctgtacagcgatacaccttgagcgtgacagtgactgtgtgaacgtgatgattacgaatacgatgtccggccaggttcccgctaatctggaacgtttgtttgaccggttctatcgcgcagactcatcaaggttctacaacacggaaggcgcggggctgggattatcaattacaaggtcgatcattcatgctcacggcggcgagctgtcagcagaacagcaggggcgggaaattgtgttcagtgtgcgtctgttaatggattaa

SEQ ID NO: 144334 - DNA, 387 bp, Enterobacter cloacae
atgttcccttatatctctcatctgctcgcagcgatgctgctgggcgcaattattggcgcggaaagacagtggcgccagcgtatggccgggcttcgtaccaatgcactggttgccacgggtgcggcagtgtttattttaagttcggtatcgacttctcctgatagcccggggcgtatcgcagcgcagattgtctccggaatcggctttcttggcgctggcgtcattatgcgtgaaggaatgaatattcgtggtttgaataccgccgcaacgctgtggtgctcggccggaattggcgtactgtgcggattaggccagttctggaatgccgccatggccagcctaattattctctgcgctaaggaaggtgcgaacaagttcctgatatga

SEQ ID NO: 144335 - DNA, 441 bp, Enterobacter cloacae
atgaaaaaaataattttaatgaccctggcttttggcctttcacttcctgcaatggcaggtgaaaaagtaatagacatgtacaagtctgaaaactgtggttgctgttccctgtggggcaaggcgatggaaaaggacgggtttgaggtgcggacccacgtcatgaatgatcaggccctgtcagccctgaaagaaaaatatgctgttcctgctgagctgagaagctgtcataccgcagttactggtaatttgatcattgaaggccatgtgcctgcagccacgatacataaggcaatgctgtctggttcagggatttatggtcttgccaccccgggcatgcctgcggggagcccgggaatggagatgggggcccgtaaagaggcttacgatgttatttcattctctccggagggcagtaaaaaagtcttccagcgaatcgaatag

SEQ ID NO: 144336 - DNA, 774 bp, Enterobacter cloacae
atgaagcagcagatcacgctgggcgatgtcgcggatattaaggtcgtttcagggccgactatgctgaaaacggaaaatgcccgtccagccagctggatttacattgacgcgcgcggcagggatatggtgtcggtggttaatgatattaaaacggctatcagtcagaaagtgaaacttagaccgggtaccagcgtgtcattctccggacaatttgaactgcttgagcacgccaacaagaaacttaaattgatggtgccgatgacggtgatgatcattttcatcctgttgtatctggcgttccgccgggttgatgaagcgttgttgatcctgatgagtctgccgttcgccctggttggcgggatatggttcctgtactggcagggcttccatatgtcagtcgcaaccggaaccgggtttatcgccctggccggtgtggcagcagagtttggcgtggtcatgctgatgtatctgcgtcatgccattgaagcgcatccggaactgtcaaacaaagaaacgttcacaccggaaggtcttgatgaagccctttatcatggtgccgtgctgcgtgtccggccgaaagccatgaccgtggcggtgatcatcgcgggtctgctgccgatactctggggtaccggcgcaggttcagaagtcatgagccgtatcgcggcccccatgattggcgggatgatcacagctccgctgctgtccctgttcattattcctgccgcctataaactcatctggctgcgcagacataaaaagagcgtgtcataa

SEQ ID NO: 144337 - DNA, 321 bp, Enterobacter cloacae
atgctggaaaagttaacagcaatcgttgaagatcgtcgtgaggaagaaagtgccatccgtaaagaacaagaagaacgtcaggctaagctggaagccttccgtcaaaaactgttagacgatggtattgatccagcagaacttcttgcagcggttggttcatctcagcctaaagccaaatcgactcgtactcctcgccctgccaaatacaaatatacagatgaaaacggtaatgagcagacttggacgggtcagggccgtactccgaaagcaatcactgctgctattgaagccggtaaaacactggaagacttcgcgatctaa

SEQ ID NO: 144338 - DNA, 351 bp, Enterobacter cloacae
atggattttgaagagaaaaaagaacgagccatttccattatgaaaagcaagaaaatgtggagcagtaactatgccccccctctgctacgccttgcatggaaaatgggtatcaggatacctccgttgcctttcgctcgattctggcaagttgctttgttaatgggaataccgattggctctgtctggggtatactgatgtggttttttacatggaaggaatcggggatggatccaactgatgctattgctagaagtttgttatttgacgtttggatggggatttctatggcgttgtaccattggtggagaagagtagccaataatcttcccgactgggatagtcttagatga

SEQ ID NO: 144339 - DNA, 459 bp, Enterobacter cloacae
atgggtattgatatacttgttgttgaagataatgaatacaaacggaaacgaattgttgaagttatcaaatctgatttcaatgattgcattgtgactgaatcatactcctttacttcagcttggaagtttatatctgaacatgtttttgacgttattttattagatatgagcttgcctacttttgataaaacagactctgaccctggaggagtttttagaatttttggagggaaagagttagcccggaaaatgggaaaaagaaatgtaaaatcaaagtttatttttattacgcagtataagagttttagtgataatattaactcttattcttatgatgatttgaagtcagaactattgtgtaagtacagttctaattgcctaggtttcatactctacagtaatactaaaagtgaatggcgtgatgaacttgttaagtcaataaaagagttagaaaagtga

SEQ ID NO: 144340 - DNA, 1023 bp, Enterobacter cloacae
atgcaaatagcgggtattgatagcggaatgaccagaactacatcaaatgcttttggttatggtggtcaatggtcagaaacttctgccaatttcaataacattacctctgcagggcaattagctttccgtgtaggatttaatagcgcgttatattctatctatcttcgtcgtgatggaacgttacccatgaccggaaaccttaatatgggtggtcaaagcgtttataatgctcaggatataactgcgaatggaacaactacaacaggaatattaaaaactaatgctgctgctacagttggaacaacattaaatgtagcaggcgtaactactttaggatctgatttaaatgtttctggaaatggacaaataaatggtaatttaaactcaaataataccgtttctggaacaactgtaacatctcgtggcgaaacctatactcaaaactggttcagaacattaggtgatggagggatttatttccagaaatatgggggaggattatacatgcgagatactgcaactataagtgctggaggatctaaccttcaaacttcttctggattatatggagcatatgtaaattcttctggtaatatagatgctgctggaacagtaaatgctgcttacgtatgggcatcaggaaacctcaactctaactatgttcattctaatggcaatatagatgcaaatggtcgaataaacgctggtgaatttgtttatataaatggacaagccaatataggatggggatgttctcctaatggattacagggaagaacgccagaaggggctattttatcttgtgttaatggtgtgtggaaaagtagttctgcaagaattgagagaactcaatttttagtttctagtggtagtaattatggagatatttgtcaatccaacattaatagtaatggaatggcagcacaaggttgggtcgcaagtgggtctgatgcttgtactgaggacgggaataattgttcagtggacaatgttagatgttttgcaataagaattgtaaattaa

SEQ ID NO: 144341 - DNA, 438 bp, Enterobacter cloacae
  misc_feature (393)..(402): n is a, c, g, or t
atggctcgtaaaacttatgtaagcatgactgaaatggctaaacgttatggttataccctcaacgctatcaagagctggcgtgcagaaggactgccttactctgataatccttctggtattccagaagacgaaggcactttatggattgttcagaacaaaattaacccaatgcgaaatatgtccatcaaggacgaattcgaacgagaaaaactccgtgaacaggtggctaaagctgacttggcaacttatgcagcacaagaaaaatctggtgaattaataccagtggattatgttcaagctgagttgaaccgtttttgttcgcaactgaaagacaaaatcaggttaatgccgaaacaacacgctttggagattcttgaatctgccgtttcagtnnnnnnnnnngaatctccaaagcgtgttgtttcggcattaacctga

SEQ ID NO: 144342 - DNA, 420 bp, Enterobacter cloacae
gtgccacaggaacagggcacagacgatggccaccacgaaaaactcttccagaagtttggaactgaggttatcaatcgcccggtcgatcaactggctgcgatcgtaggtggtcacgatttcaacgccttccggcaggctggccttcagcgtctccagtttatccctcactgccgtgataacgtcgcgcgcatttttacccgaccgcaggatcaccacgccgccagcgacttctccctggccgttcagctcggcaataccacgcctcatttcgggcccggtctgcacgcgggcaacatcccgcagataaaccggcacgccgttctcacctgttttcaggacgatgttattaaaatcatcaatgctctgaagataaccgctggcacggaccatatactccgcttcggccatttcaacggatga

SEQ ID NO: 144343 - DNA, 540 bp, Enterobacter cloacae
atgaagtttgatcgtgtatatctggaaggtaaaatttccggagaaatgtattccaactatgcagcagcacttcagttggtcgataactggtatgcaatatgtattctgtttgtccaggcaattgcaccaatttttatatttaaattcattgatataacaaacattaaaagaaaattgccattctgtgttttcgctacacttgcagtaacctgcgcaggcgcattgtttacaacagttcttgcagacatgattattcatattctttatggtgcaaagcttgttaatgcctatagttatttgcgaacgtttgtctggttaaccccaattttagctatagatcaattgctcagcatggttctaattagaatgaatcagctaaataaattagctattaagtggttgatagctttctgcctggtagtggctgttgtgcctgctatttttcattatatgggtattagtaacatcgtcttcggtttagcagtagtttacgccttcaatataatttattctacgaggtgcattggtgcagtacaatga

SEQ ID NO: 144344 - DNA, 198 bp, Enterobacter cloacae; identical to SEQ ID NO: 19856

SEQ ID NO: 144345 - DNA, 258 bp, Enterobacter cloacae
atgatgacgggaatgcccaaaacagcccctaactattacctgctctttaaaacagccgatacaagctactgcggtggcatggtatggctggattactactctggtattgatgatgcagttcttacctataagaaaggccagaaaatcagcgtcaccggaactgtaaataatttcgaagtccgtgggttcgctaccgtcaacaacgccgatatggcagttcgtctggttgttctgagaaacggcacaatcaatcattaa

SEQ ID NO: 144346 - DNA, 216 bp, Enterobacter cloacae
atgaaagacgttttagacactttgcgccaagtgcgtgaaaagagcaaacacactgtagacaatagctctttgaaaaaactggatgatgcgattctgacccttgaaaagagaatcgaggagaattctaaaggccacacagccttagattatctttcttatatcgcgaagatctttgctttaattaaacttctgagcggtgattctgattttcattga

SEQ ID NO: 144347 - DNA, 258 bp, Enterobacter cloacae
atgcctcaggaaagtgacatccgactttccctctaccagaactatcccctgcgccctttccataccggtctctggcagcacccccaggctttcagtggcttccttcagcacagcgtcatccggcatttttactacgggttcacccgcctcatttcgggtgacataacgtacgccttcgacagggatcaatccggccagcgccgggacatgggtggtgacgataatctgacggtgcggctggcctgccagtgccagtaa

SEQ ID NO: 144348 - DNA, 168 bp, Enterobacter cloacae
atgttctatatcaagaaccatattaaattcatcatctatatttctagagcaataacaacagcagtgtttttggttctcacgcaaataatctttaatttttcttttgatagcttcgagagagctatcactccagaactgatggccctgcgcgacagcatgatccattaa

SEQ ID NO: 144349 - DNA, 252 bp, Enterobacter cloacae
atgagaaatcatcaggttccctcgttgccgcaagggacgttcacccgcgctcaggccgaagctattgctgcagcgtacagcaatgtcaccattgaggatgaccagggtactcattttcgtctggttatccgcgacaacagcggcatgcttatctggcgcgactggaattttgccccggaggctggtgtgatgctcaaccgctatattgccagcaacgacatcccaatggctcctgcaactgatgacaattaa

SEQ ID NO: 144350 - DNA, 672 bp, Enterobacter cloacae
atggaaaataacgatgagattgatgttgagtatgacgatgagatgcctgcagaggaacacaatccccgcagtattctggcaatgatgggctggttctatgacaaagccgtcagagggattgccgggatcgagtcggctgaaaccctggcagaacgctatctcgccgatgcgaagggagatgtgatgaaagccgcccacgcgatgatccgctgggagagcgtcaaggcgggcagtaccggctttttatccggtgtgggcggggtggtggcgatgcccgtcacgctgccgctgaacatcaccagcgtactgtttctccagacccgactggtggcagccatcgcctgccttggcaaacgcaatctggctgatgaacgtatccgggctctcgccgggctgtgtctgtgcggtaacgctgccaaagcactgttgcaggaagtggcgctacaggcgatggagaactggacccgccccttcacacggaggattgtggagaaaaccctggtgctgatggctgcccgtgccggtatgcgcaccggtggtcagtttattcgtctggttcccttggccggtggtgtggtcagcggggcggtggatatcaccaccacccgcacgattggtcgtattgcctgcaccacgtttctgtcaccttacccgggacaacggatatcatga

SEQ ID NO: 144351 - DNA, 390 bp, Enterobacter cloacae
gtgaatgcgttctgtaccctggataacgggaaaaatgtgggtgtctttgccgccgcaggacaggattatcgctacacctactcggataaaaacgataaacccgagctggagttaacggaagggctgttcggcgtgaaagccttccactaccacgcgccgctgggaatgggctctgctagttatatccgctttaacaaaggggtatacgactacattctgctgagtaaagacaccggtcatgaagagtttcagggcatccgggtgtacaaaaacggtgacctggtttcggctcatgagtgcaaaacccgtctgacgctcgatacccgcctgcttcctcaggacggtcacgtcgacaacgaaaaaatgggtgaacacttcatcctgaactga

SEQ ID NO: 144352 - DNA, 723 bp, Enterobacter cloacae
atgaaaaaataccgtccacatcagaaaaccatgttggctgttgtgctcagcatggcagcgtttaatgcctctgccgcatggaccgtcaatggtaccttctgccagtcgtacagcgatgacggtcaggttctgctacgggttaagccgtcaacgattggtatcattgagaataagccacagtgcggcggtcgtggcaccactgaacttgccggtagtaatttcaggattaataacacttcttatccatccagtgtgatgtgtaacagccagtcccaataccaggcagtgcaaacaaccgtggcaaccagtgatattcagtcagttattaattcattgaaagaaaacaaaaaagtcaacatgagcacgtttggttcttcttttaccttcagtacagctgattttgccagcgtgtgcggctcagtgattaatcagaaggtggctgatttcgatccccagtcgaaatacaagcaggacatggcgaagatgggttacaaacaggatgaaaacggccaatggcataaacaatcaaagcaggcatattcacgcgaagctgacccggaaataacttccaactacaatccaaaagcgggcgttgctgaaggttctggaaaaggtgggttccatggggacggagccagtaaaaatctttatgggccaggtagccaggcgcaaaaggatgctgaagcggcaaacgaagcccgccgcctgccgatttcccggtga

SEQ ID NO: 144353 - DNA, 945 bp, Enterobacter cloacae
atgcagcataaaattgatatcagcgtcattatccctgtcttcaatgcgcaggccactattggctatctgctacacgaactcctcagcgagttggcactcagcattgaggtgattgttgtggatgatggctctaccgacgaaacgtcgcccatactcagcaccatcaccgatgagcggatgatacttgttcatcaagaaaatcagggtgtatatgctgcaagaaatgccgcactggcagtacaccggggtgaatgggtggtctttctggatgcggatgaccggattgaagagggttttctccgggagcgactgaagagcgcacgagcggctcaggccgatgttgcccttttcaatggctggcacacagacagcagttgcctgcagcggcgaccagttcatcgcaaacagccttgtggtcacgcgctcaacgggcatgcctggatacagcattgcgtggcgcaaaaagagtggccgcactatctgtggctgcagatgattcgctcatcttacatcaggaagaataatctgcgttttcaggagggtaaaagtcacaaagacattctctggacgattaaccttgcctctacaaacggcctgttttatttcgccgacaggaaggactatttttacatcactaacccggcatcgattactcaccgtcaggactactacaatatccgtgcacacagctacattgatgtcatcggcgacattctcgtactctcatctctgccacagaaccatgcaatcagaacatccctgagaaggcatgcgctggttgagtgccgtcattttctcgggttgttccgacgtaagattgccaatcggcaggctgcccgacagctgttcaggcagcgaatcgcgctgcgtcagttggttgcaggggtcagcagcctgagcgatgtcttttttctgctgaaattcgtggtaaaaatttatctgtga

SEQ ID NO: 144354 - DNA, 1275 bp, Enterobacter cloacae
atgacgaaaaatactggagagtgcaaaaatagaaaatgtaaaaaacctatttctgagtatggagaggccaatgaaaaacgctattgtgaagagcactatcaattatctttagaaaaaaacaatatcaacaaaggaaagagagtaagtaaaatagctgacaaaacaatatcgattcaacagcttcgtaagctagaggctttgatatgcaatggtagtgtaaaagaagcattagacagaaaaagaataaacaaaaaatggacatctgaaagtattaaaaggaaaagtgatgttaacgatatattaaagtctagggaatggaaaaacacacaagaactcatcaggagaagaaattttttttgtgaaaaaaaggaattcatgaattatgtccaaaatgtatttcaactatactcattaaaattattatttagcagggagtatctaaataaagataatccatataaaaagcatgtagaaactccattgataaacttcattcctgttgttacaattaaacttgaagtggcttttacatttaacattcaatctagtgttagcatgagtagtgatgatgtcattttagtgcctgaaaaaataagaaagatgataacactgaaaaaggcattacttaataagaagagagggagttacgtacctaaaaattcaaaagacaaaaatagcaagaagaaagcaaaaggaattaaatttaagagaaataagataaagcaaaaaaggaatggtatctatcaacaaataaaacgtgaaaatagccaggaggatgttaattcatttatggataacttaagaatggatttgaaacatgaacatagaaatactttaagaatgtttccgcctttttttaatagcacaatagaaatgtccctgccgttcttccgtttggcacaatctcaatatgtaagagtttttaaaaaagacgctgaaaatgtgtttattttactaggaaaagaactatctacttttggtgtttatttagaggcatatggattgttaggtttacacgcattaatgtcgggaagagcgattggtaatgatctgataaataaaaccaggcaatggattgaaaatgaacaaaaggagaaaagtgatctttacaatatcatggtaaatatacagactgaatttaattttatatttaaaataaaggttaccgataagaatacattttcaaaaatgtacaactcatattttagtgaggatgttgtgcaagtttcacctacaactggtgaaatagtttccataagaaaaatcaatatttaa

SEQ ID NO: 144355 - DNA, 636 bp, Enterobacter cloacae
atgtttgattcagcattgcttgaccaccgacatggttcattgaacgcccattatctgaggagaatagaaaatgttctccactatgctctcgatgaacatccccgtacattagccgtacgcgttgatttacgcttatccccgcagtggttgcaggaggattccgttacctgtcatccaaacctgtctcgtgatttagtttcgcggttcgtctgttcagtcaaagccagaatgaaggcttaccgaaaacaacgtgaaagagaggggataagagcccatccctgcacgcctcgctatttctgggtgagagagatcgcaaccgctgattttccacacttccacctggtgatgttttttaacaaagatctgttctggaggctgggtgattttagttcggaagagaacaatctgaggagcattattcagcaggcatggctgagtgcgctgggcttgagtggatacgatgaatataaatcgctggttcatttcccatcagatggcgtttatatccttgattgcaacgatcctgattatccccgtgtcctgaatgaacttgtatttcgcctgagctatctggccaaagatgacaccaaagagtacagcccgaaagcgcgttccatgggaggaagtcagaagtag

SEQ ID NO: 144356 - DNA, 234 bp, Enterobacter cloacae
atgcctagcaccactcataccgtatccaccacgacactgctgaacgcagacgatccgttaattgatatgaatttcatcaccgcatacaccggcatgacggacaaatggttttatcgattaatcagtgacaatgcgttccccaaacccatcaagctgggccgcagttcccgctggcgcagaagcgaggtggaagcctggatgcaacagcgtgttaacgattctcgtggcatctga

SEQ ID NO: 144357 - DNA, 1113 bp, Enterobacter cloacae
gtgaattggcctatggcgaagctaggagatttggtaactattaaaacaggtcgattagatgcaaatgctgctgaggatgaagggatataccctttttttacatgctctcgagaaccattaaatatcaattcttatgcttttgattgcgatgcaatactgatagcaggtaatggagatttgaatgtcaaacattacaatggaaaattcaatgcttaccaaagaacatacgtaatcaccgtaaattcaagcgatactttgaatactcgatatcttttctactttatggataaatacgtcgagcgccttaggactatgagcgttggtggagtgattaaatatattaaaataggaatgctgactgatgttgcgatccctttaccctctataattgaacaagagcgtatcaccgcaattttgaataaaactaattgcatacgcaaaaaatgcgaacaagctctcaaattggctgatgattttttgcttgccacgtttttggcgatgtttggtgatcctgctgaaaacccaaagggatgggatgtagcttctttgttagaatatggttcatttaaaaatggaatgaattttacaaaaggtgagtcgggatctgcgctgaagtgcctgggagttggcgatttcaaatcactagcaacgattacctgtatggataatatcggtgaaattgaattaaacactcctccttccgatgagtatcttttgaaagatggtgatattgtatttgttcgatctaatggcaataaagccttggtcgggagatgtctaacgatttacccaagaaaagagagagttacatttagtggcttttgtatccgatatagagtagaaaacacttcaattaccccagaatatcttaactttcttttccgtacaccatccatgaaacagaaaatgttgagtgggggccaaggagcgaatattcagaatattagccaaggcactttatcttcactcaggatacctattcctcctttagaaaaacaacagtctttttctaaagtcgttagtttccactctgaactaatggaaaaaatggatattaatacagttgaaataaatgatatatttaactcaattagtcagagatattttaattaa

SEQ ID NO: 144358 - DNA, 1269 bp, Enterobacter cloacae
atggccctaacggatactaaagttcgttctgcgaaacctgaggagaaagagtattcacttgttgacggtgacggcatgtttttacttgtaaaacctaacggttccaagtattggcgatttcgtttccgttttggcggtaaacagcatttgatggcgttcggtgtctatcctgaaatttcactggcggatgccaggaagaaaagggaagaagccagaaagctggtagctgctggtatcgatcctcgtgagcataaacgtgctgcgaaagaagagcaggcgaaagagattattactttcgagaaggttgccagagagtggcttgcgactaaccaaaaatggtcggaagatcatgctaatcgcgtaaaaaagagcctggaggacaatatcttcccggcaattggtactcgcaatattgctgaactgggtacccgagatctgttaattcccattaaagccgtagagacatccggacgtcttgaggtggcttcccgccttcaacaacgcaccacggctatcatgcgttatgcagtgcaaagcgggttaattgattacaacccggcgcaggagatggcgggggcggttgcttccagtaatcgacagcatcgtccggcgctggagttaaagcgcatccctgaattactccagaaaatagatgactacaccggcaggccactaacccgttgggcaaccgaactcactttgcttatctttattcggtccagtgaactgcgttttgctcgctggtcagagatcgattttgaaacgtcaatgtggactatcccacctgagcgagagcctattcccggcgtgaaacattctcagcgagggtcaaagatgcgtacacctcatctggtgccgctttcaaagcaggcgctggcgatcctgaagcagataaaacagtcctgcggcgcacatgaacttatttttattggagatcacgatccgcgtaagcccatgagcgagaacacggtaaacagtgcgctacgggtgatgggctatgacactaaagttgaggtttgcggccacggctttcgcacgatggcctgtagctcgttgattgagtcagggctatggtcgaaggatgccgtagagcggcagatgagccatatggaacgcaattcggtgagggcggcgtatatccataaagcggaacatctggatgaacgcaagttgatgttacagtggtgggcggattttttggatgcaaaccgggagaaagggattacgccgtttgactatgcgaagatcaatcggggtaatggagagtga

SEQ ID NO: 144359 - DNA, 1209 bp, Enterobacter cloacae
atgatttataccactggcactattgccatcagcggaaataccctaacaggtaccggaacaaattttacagcagctggcactctaatccgtaatggttgcaccgtaatcgcgctaaccagcccgccgcaggtattccagattaccgctatcggcggggcaaccagtctcaccgtgacaccagcggcaaaacctgcaatccctgcaggaacgaagtattcgattttgctaagcgacagccttagtgtcgatggcctggcgcaggatattgctgaaacattcacgatgtaccagcgctatatgagcggattcgctgatgtgatgaacggtactacagacgtcaccatcacaattaacggcgtggctgtcacggtaccgggtcagaaatcactggccaagaaaggggcaaacagtgacattaccagcctttccgggctgactacagcgctaagtatttcacagggagggactggtgataagactgccgctggcgctcgcacaaacctcggtttaggaaacagcgccaccagggacgttggaacaactgcgggaacggtggcggccggtgacgacagtcgcctgaatacggtgaacgggaagaccgggggtacgctgacatcaccatcactttttacatcggcatttaattctggagcaggtaacaaagttggaatccagtcatttgatactggctctgtaggtggtgttattggcaggtcgtcatttcaatattttaacgatactggttacataggtgcccgccggggtggtggatatgatattcaggatattgcaattggcatcgacaaggctaatggcacatacaccaactgggttttttccgccggggggaacgccacagcgaataatggttcatgggtcaataattccgaccatcgcattaaaacaaataccaggccgattgagtctccgcttgaaaaaatgaagatgttacgtggctatacgtgggaacgactggataacgcacctccgggccaggggtttatcgctcaggaactgatggaagtgatcccgacagcggttttcactggtggtacgactatccttgatgacggcacagagattgaaaatacattatcggtggatgtggcaggtgcggccgcagctcttcaccatgaagctattctggcgttaatggttcaaatagaagatttaaagaaacaggtcgaagcgttgcggtctggaagctga

SEQ ID NO: 144360 - DNA, 183 bp, Enterobacter cloacae
atgaagcagattctttttgcgtggtttgttttaacaaatacctttgcctgcatcaccgccagcattaacgtgaacaactcgctaatgcttgattcagctgtgccgtggatcgttgggatttctcttgcagcaatcactaattacttattggctaaaaaactgaagaaaagcggttttctttag

SEQ ID NO: 144361 - DNA, 471 bp, Enterobacter cloacae
gtgattggcgcactggttaagcgttactggctgcaactgctggtggtggcgttaatcggagtgctggcgttcttcgtgaatcactatcgcgacaacgccatcacctacaaagaccagcgcgataaagccactgagaagctcagcctggctaacgccaccatcaaagatatgcaggtgcgccagcgagatgtctctgcgctggatgccaaatacacgaaggatttagctgatgctaaaaagcagcttgatgatctgcagcgttgtgttcgcgatggcaagtgtgggctgcacgtcaacgccagatgccccgcgaacggagcgaccggcaccggcagcctgggcgatgcttccggcccccgacttactgactccgctgaacgggattatttcaccctcagagagcgaatcgtcacagtgacgaaacaggtaggctatctgcaggactacatccgcacgcagtgcctgaaatag

SEQ ID NO: 144362 - DNA, 276 bp, Enterobacter cloacae
atgacatggcagcttcttctgatggatgcaaacgccatagtttgcctgttaatcatggtcaggctgatgtttttccggaaagagggaaagcgtcatcgcctgagtgtcgcggtactggcctacttggtcatccttgccgccggattcaatgccttcaacattctgctcggccactacgttcaggttaatctcggcgatctgctgcttaactccgtcatctgcatggcggtgtggctggcgcgcggcaacctggccaaggtcgttataacggagtag

SEQ ID NO: 144363 - DNA, 402 bp, Enterobacter cloacae
atgtctgagaacttcactatcgtaggcgttggtcttacatcgtcatcagtcggtgtaacctttgccacgctgtttccggaggcgactccagcagtgatgctcggatcactcgccggaacggcgctatacgttctgacctcagatccccatcaactctggaagcaggctatctttgcgctgatatcgtttatcagtggcgtattcttctccgtgcccatggcgaaaatcatggccggaatcatcaacacgccgttaagcctgatgaagccaccggccagcattgaggtatcgccagctgtcggtgcaattgtcactgcttccatttccgtggcagtcctgctgcgtattctccgcaaatccaaaagcgggaagatgccggggctgggggaggaagataaatga

SEQ ID NO: 144364 - DNA, 213 bp, Enterobacter cloacae
atgaataaccttaaaaaattaagaaaatcgctccatcttacccagcgtggtttggctaatgaaattggtcagactattagctctattggacattacgaatcaggaaggcgaacgcccgaaattaaaacatgccaccagttagtagaagtattaagcaaaaacgggaataaattatctatcgaggatattttcccaccatcagcaggggcgtga

SEQ ID NO: 144365 - DNA, 567 bp, Enterobacter cloacae
atggggcattggcttaacggacggagaagtccctctctggctgaagttggcgcaatgttccagattctcgggatatcaggggcttctataaatcctgatggtacttttactgtctctgaggatctaaccctgccgcctataaaacagcagtttgagtatccccttttcacaaccgtgcaagctggacaatttgctgacgttggcacttttaccgaacgtgatgcactacagtgggttccaacaactagaaaagctggcccggactcgttttggctcgaagtaagtggccattcaatgactgccccaccaggaacgagaccaagcttccctgagggtatgcttattttggttgatccatccgaggatgttgaacccggagatttctgtgttgccggcatacataatgattccgaggttacatttaagcgttacgttcgtgaggatgggcagccatggttggaacctcttaacccaaaccctcgatatcaaagcattccttgcaacgagaactgcaggatcatcggcagggtagtcaaagcccaatggccagaagatacttttgattaa

SEQ ID NO: 144366 - DNA, 213 bp, Enterobacter cloacae
atgaatattgatactatcaaatcagaaaaaggtaagatccatcagttagccatggatattgaccgggtaataaatgcacttgagtacgccgaatccgataatgatgttgcttacaaacctgccgcactcattaaaatttgcattaatcaacttaaacaaaacctctccatattaaaccatgagtttggatgcgactggccggagaataaataa

SEQ ID NO: 144367 - DNA, 192 bp, Enterobacter cloacae
atgaaatcatttaaaggactctctttacatcctcatgatgcattcaaaaatatcggtgctctgattgaagctgcaggtattcttacagctgtcactgatgaggagtatcaagagttaagtgatgtaattattgagttttgtcgtaagtatgcaaaagtcgcagaagatattgaactggagaaactcaaatga

SEQ ID NO: 144368 - DNA, 1332 bp, Enterobacter cloacae
atgagtgacgcagcaatgattattgtgccaactgatattggccagaagattaaagaaatcgaatctgcttaccagcgttacgtcgctgaattcaggatccctgaagaccacaaaatcatcgttaacttttctgccggtaaagattccactaccaccgtggcgatcgcccacgcgctgttcggcgacaaggtgcagggtgtcatggccgataccgacaacgaacacgagctgacaattgagtttggcaaaaccattcatgagcaaatcgggtgctcaccaattcagatggtgaagaggatttatacgcaggaagaatttgatgcccgccgtgcatccttaaccaaaaactggagcaagcgccaggcgatacgcagtggggcttatcgtggcgtaatcatgccttcgctgtcgcgctcagatactccatttggccgcgcatggcagaaaacagcagagcgctggggtattgaatttggcacacctctggaggcggctctttcagttctccatccaagcggaaacagcttccttgacgctgcattattgcatgggatgttccctatgctccgcaaccgattctgcacagacgagttgaaaattcaggttgcattcgatttcgcgatcaaacctttgctggatgctggtgaagtcgttgttcagtggtctggcgttcgcggcgatgagtcatcgaaacgggctggctacgagagattttctaccgaccagagagaccctgaatttctctacaacttccttcctatccaccagtggacagcagcagatgtattcgcccttcataaatatttcggtattgccccaaaccccttgtatacccagggtgctgcgcgcgtcggatgcatgaattgcgtgctgtgcaacaaagaagaaatttcagaaaccgccgcccgctggccggagcacattgagaagcaccgccagtgggagcataaggtacgccttgtttctcgatgggttcattggatgagcgttggcacagagagccaggcatggatgcgttctcagcttgggttcagagaggtcaactggagggaatttgccggattctccgaagaagaatcagcaccaggaatcatcgagcgcagcaggaaatacccggtacatctcggtaaagatgtcctgctttatgggcttgacccggatgttcaaaacattgactggtcagggttctatggcccgcgcggaaatatgggcgcgccgtccgttccggaagtcgtcgagtgggccaagaccggtcgggggggggaaggtttacgacctggtgaaagcgagcatggacgcatcagtttgctcgtcccgttatggactctgtga

SEQ ID NO: 144369 - DNA, 1077 bp, Enterobacter cloacae
atgagcgaagtaacggatttagtcgtcattgagaaacagaacgcaatggcggtattcaccaccaaagagcagctcgacccgattattgaggcgatcgagaaagaagctcgcagcctggtgccggatgtgtcgacccgcaaaggccgcgacgctatcgcatccatggcgcacaaggttgcccgttccaaaacttacatcgacaacgccggtaaggacctggttgctgagcttaaagccctgccgaagcagatcgacgaaagccggcgcattgtgcgtgagcggctggacgcgctgaaggatgaagtgcgcaaacctctcactgaatgggaaaacgccgagtcggcaagaaaggacgcattgcagcagcggcttgctgatttgcgatccctggctgatgtgattgatggcgtgggtagctatctgccgtcagttgaaattcagcagcgcattgagtcagcaaaagccgttgcacttgatgaaagctggcaggaagcagcagctgaagctggcgtggctaaagacgccaccatccaacaactcgaatctgccctaatcgtcgcaaaacagcgtgagcatgaagctgcagagcttgagcgccttcgtaaagaagcggaagaaaaagctcgactggaacgtgaggaaaatattcgacgggaagcagctgaacgggcccgccgagatgccgaagcgaagcacaaagcggagattgaagccgcagcgcgccgtgaagctgaagagaaagcacgtgcagagctggctgaacgccagcgcattgaagcggaacagcgtgcggaacgcgagaagcaggaagcagaagagcgtgcacgacgcgaaaaagaagaagccgttgccgccgagcgccgccgcctggaagaggcagaagccgcccgtctggccgaagagcagcgcaaagctgaagaagaagcccgccgcgccgcagacaaagagcaccgccgcaccgtcaatcgtcgtgtctacgcagatctgattgctcagggcatcccagaagaatacgcacagaaagcagtgctggcgatcgctggcggcaaagtgcaggacgcgcacatcaaatattga

SEQ ID NO: 144370 - DNA, 546 bp, Enterobacter cloacae
atgcattcacttgcgtatcaacaaggtaacaaattttcgccaacggcgatgatttaccagaatcgccgggaacctgattccaaggcgttaaacatcgatgggatccgcgcagctgttcgcgcctgggcagctgattgtcgcagccgtgaatttgtcgctgcgctgattgttgaagagtggcggtcaaccggcggcgccgggcttgatatcccgactgactcgcatcgccagatgcagaaagtgtttcgctggatcgatggcgacaccgaatacgccgccaacaacattcgccagctggctccggcaattatgtccgtgttgccgctggagtaccgcaaccgcctggcgccacagaacgacacgatgtcgctgatcgcttctgcgatgaaagagtgtgccgaagctaaacaggctgtgctgctggacgctccagagcatcagaagctgaaagaggtaagcgagggtatagcgtcactgttccgccttatgccggagcaggtagggccgctgatgacgatggtcacatcgatgctgggggttatgtga

SEQ ID NO: 144371 - DNA, 636 bp, Enterobacter cloacae
gtgaaattctctcgaatcgaacaaagcccagtaatggataagggaaactacgtgaaaatcgatcatgattttggctactttttagatccgaataagatggcttcgatagctaactatgaagatgagtcagcagcacttttaaaattaatgctaattcatgaggactttcttagagttgttattgagaacttaaggcctgagggttcagaaaagtataatgccatcaaaacttataagtattttacgccgaagctctcagctgccgttctcttagggcttcctgtatcacttgctgatgctatgtctgagcttaacagcattagaaacaagtacgctcataaaattgattacgtcataacaaatgaagaagttgacaagcttgcggagacgattaaaaaaataaaaatcgaagaaattaaccacggtggctatatacatcaagttattgagccaatcctaaaggatgggatctacgcagtcgcactgatgaacgatctacctcctaatttggaagaaaatcgtcttcgtatctgcaaattagtcactagcgcacattgtatgtgcttgcttggtgctttttggttgattaatactcttcacgttaaggataaactgaagctttccatgtctgaatag

SEQ ID NO: 144372 - DNA, 492 bp, Enterobacter cloacae
atggctaaccatattctatctgaatatttttcatatgacccgacatcaccgtcatttcttaggtggaaaataaatgttggtcgaagaataaaagcaggtgatcccgtagggtcaataagttcctatggttattaccgaacgaagcttaacggcaaagaaatagccgctcatcgcattgtttggcaactccacaatggagaaatacccgagggcttgcagattgatcacattgacggggttagggtcaataatgatatacgcaatctacgagttgccagcgtctcagaaaatcttcaaaaccaaaaacgcagcgcgaaaaataccaccggcgttaagggtctgacttggaacaaagcggacgaggcatggcgaggcagtgttcaggttaaaggtgtacgcaatcatttttcatctaaatcgcgtcacgaagtcgaagagtggctgagaaatacaagatcatcacttcacggcgaattcgctaggaacatgtaa

SEQ ID NO: 144373 - DNA, 213 bp, Enterobacter cloacae
atgaacaaagtatccctggccgattcaacctgtcgtatccaacaggcgcaggaagtcctgtctctctggcttgaagcgacgaataaaaacgatagcggcacggctaacttaattggcgcaatcatttcccttctggatggtatccccgaattgatggattcagcagaggatgaattggctggcatggacttaaaagcgatggataaagcatga

SEQ ID NO: 144374 - DNA, 186 bp, Enterobacter cloacae
atgaccccgcagcaaatagccgccctgacagtcgcagaaatggagtattcaggccacagcattacagcagccgaccagagagagatacagcgcagcgtcactgatgatattgcccggcgtaaacggttcggggagatgatgcgagcacctgcctaccagtggaaaaagccagcgccgcgcaggtag

SEQ ID NO: 144375 - DNA, 543 bp, Enterobacter cloacae
atgtaccagctaaagataaccatccgagacagcaaaccaccaatatggcggcgtgtgctggttccagagcaaatcccctttagtaaacttcacacggtgatccagttggcttttggctggaatgacgaacacctgtatatgttcgagaaagggcgtaaaggtgatcccggtagcgagtatcgcgtatggggtgaggatgaaagcatgggtaatgcggcaatcacaccactatgggcagcgctccagaatgagggtgacaagctggtttacacgtatgactttggcgactggtgggattgccttgttgtactggagaagcaaacacatgataccagtatccagcctgttagctgtttgcgcgggaaggggactaccccggcggaaaattcgggtggtttgcatggttacaatgaattgctcttacaggccagaaagtctgataatcctgaacaggccgagatccacgatttcctgatgctggatattgaacgccgggtttacgacctgaacaacattaacgacagattgcaggctcttaactga

SEQ ID NO: 144376 - DNA, 594 bp, Enterobacter cloacae
atgaatacgcaggtcgccatttccactgaatcccctaaagtatttttcagtaattcccgcttagtcactacttcccaggctatcgccgattacttcgacaaacagcataagcacgttttggaaaagataagatcccttgattgttcgccagaattcgcgacagccaacttttcgaccgtcgtaataaaagttcaggcaggattcatggaaaaagatgctgaaggttacgaagtcaccaaagacggctttatgtttctggtgatgggtttcaccggaaagaaagctgccagacttaaggaggcatacatcgccaagtttaacgcgatggaagccgaactgcataagagaacccctgcggcaacacgtcagggtaactacgcagtaatcacctacttcgaaaacggcctgcccgtggcctgccaccctcttatgcctggcgaagtgatcatgaatccagattcatgccttgagcacgtgatccgctctggctacgtggtgatgccgtgcgatgaagctgaaaaattcactctcggtgagatacagaaaatgatcaccatagcaaggcttacgcgtgataggtggatgcaggcgtaa

SEQ ID NO: 144377 - DNA, 1092 bp, Enterobacter cloacae
atgtcgacacattcactaaaatccgttcaggctcttagaggaatagctgcaataattgttgtgctattccattataaatgggtgataagtcctgatttaaataacttgtttgtgtcggccatttttaattcaggcggattaggggtgacactattttttatacttagtggttttattatggtctactcaggtataaataaaacatctgctgttaatttttgtataaatagattttcacgcatatatccggcttatttattctttattttgcttggtttcgcagttggcggagcaatgagcaccttccattatgaagataaaacgttaaatttcattcggtctttcctcttcctgccagccacagttaacgatgcgccagcatatattgatgtaaattcattaacaggggttagatggacacttaattatgaaatgtatttttatgcgttaatagccttatcaatgttattcaagcgaaaaatattatctttattcgtgatttttgtgactgctttaatagtcatgcctttttctactgggcatgtgccagtactcgatatacggggttatgcatatgaatctgagtttctcgggttcataacaaacccaattatgtatgagtttttgttaggtgtcattatagcgctattctatttgagatttaatgacctaatccctatggcaatgtccattctgttgttaataacctctttgtttgttgttgggtattattgtatttatttaggcttaaataatcatgggctactgtcatcagcattatttgtgtcatttttgtttttagctgttgtgatgaatgcaaaatggttagataaattcgttccgtcttcgcttttctatcttggagagatctcattttcgatgtacttactacataatcctgccatgctaataacaaaaaaatacataatgcataaggatacaggtatcgatgtctttatctttgccattatgcttacactcattctttctatattttcttataaattatttgaggtgaaatgttctaggtggttaaaaatatatttgctgtctaagtttggtaagaacgaacgaaaggcagtagaagggtaa

SEQ ID NO: 144378 - DNA, 525 bp, Enterobacter cloacae
atgattagcagtgtgtttaggttgactaaagatttaacgccagtacaaaaggaactgtccgaaaattatagcgtcttgtttttgaatgatgaaagtggaactgattggtatgtttatcagaaaagatttcaggaggacacatggaaagtagcggtagatgagcaggggaagattttttctctatcacaagattgcagttctttgtttcctcaaaatttgatagtcgtagagattgaggagctaccatcaggttttaatatgaaggagccatggtttgtaaattttgatactttagaggtatacagagatgaaaaatatatggctgaagagaaactacgaaaacttacagatgatgcaactcttattatgcaatctcttattcaggcagaggaggatggcgacctcacggaagatgagtctgagaaattgagagcttacaggcaatacagaacagaactacggcgccttgatgttagtaacgccccgaacattcattggccgagcattccaaccttcgttgattaa

SEQ ID NO: 144379 - DNA, 1227 bp, Enterobacter cloacae
atgcatcgaattgatacacccacggctcaggccgataaatttggtcagggcaaaaatggttttacaaatggtgacccggccaccggccgccgcgctacggacctcgacagtgacatgtgggatgccgttcaggaggagatctgtaccgctatcgagaaatcaggtgcggtgctgaacaaagggcaacacgatcaattatatcaggccatcgtaaagctcatcactgaccgtgtgccggatgctcttttacgcagccagaatcttgctgatgtggttgataaagcgcttgcccgagctaatctggaattgaaaagtgcagctcagcgcgatgtgacaacatcgtctgtagatgcaacagctggtagggtgccagttgttggctggatgggattatcaagagcaataaatatcccatacaccacagatttggctgagtatctcaaaaccgcaccgggtgccttttatcatcttgatagcgcttcaggctatgtcaacgcgccagcgtggtttggtgatgactggtttgacattgtcatgacgattcatgaaaccgctggagccagaacaattatggcgatgagctccagcggaaagagtgcttttgcagttatcaataataataatttcagtggatggaagaaaaattacactgaaatgcagaaaccaaccgcgtcagatgtcggtgcagttagtacagcaggcggtgactatcccgaaaagtttagatttggtggggtaagtaatataggcagttcatcgaatgacgcctcgctctacagtgcaacttcgttgccaaataattcaattgcctccggggtaaaagctaactggttcacacatcatcttgaggcaggcattgttcgtgactctggcgtgggtgttcttggttttgctgtagatatagatggggaccgtaaattttttgttgatgcaggggggaatgtaaaagcaccttccgctttgttcgagtcaggtggttctgtgagggtgtactcaccaaataacccgccaccacaacaggatttaaccaattatgcaacaatgaattgggtaagaagtaattttgtcatgaatgtaaggctgggtagtgaatcagccgcctcgtcaggacaacatttagaaggtcatgtattgacctcattcgattccattagtggcggtgtgacagggctatataaacggcctttgcagattttaattaacaatcaatggctaactgtggggtga

SEQ ID NO: 144380 - DNA, 588 bp, Enterobacter cloacae
atggcaatgcaggatgagtatgagcagctgctctacaggctgcttcccccaggtccggcatgggagggagagaacccgctgatagaagggctggctccgtcgcttacgcgcgtgcatcagcgagccgatgcgctgatgaaggaaatcgacccggcacagacaacagagctgattgatcggtatgaaaccgtttacggtttgccggactcctgtaccccggccggggtgcagtcgctggtccagcgacagcaacgccttgatgcaaaggccaacgtggcgggcgggatcaatgaacaattctaccgcaaccagctggatgccctgggttataccaccgcgacgattgaacagtttcagaacctcgacagcagccctaacccggaatggggggaattctggcgctattactggcgtgtgaatatccaggctgacgccaacgttaactggcagacctgcaccagtgcgtgcaactccgctatcagaacctggggcgacacggttgcggagtgcgtaatagaaaaacttgcgccgtcacataccgtcgtcgtttttgcttacccggaaggaacagaaaatgcatcgaattga

SEQ ID NO: 144381 - DNA, 1080 bp, Enterobacter cloacae
atggctgacagtcaattttcacggccggaactcccgcaactgatagccaccatccgcagcgatttgctgacgcgcttccaggaagatgtgctcttacgcaggatggatgcagaagtgtacgcgcgagtgcaggccgctgccgttcataccctctatggctatatcgattatctggcgcgcaatatgttgcccgatttatgcgatgaggactggttataccggcacggcagaatcaagcgttgtccccgtaaggatgccgtggccgcagcgggctatgtgcgctgggatggaataagcggaacgccgacgctgcccgcaggcacacagatccagcgtgatgatcaggtgacctttactaccacacaaaccgtcaaagcgtcaggtggtgtgttacgcgtgccgctggtggcggataacccagggtcggcaggaaacaccgatgacggcattgcattgcgcctgggcacgccggtaagtggcatcccgtcaacggggtacgcagatacggtggcaggcggcgatgacacagaagaactggagacctggcgcgcccgcgtcatggagcgctattactggatccctcagggtggggctgacccggattatgtcatctgggcaaaagaaattgcgggcatcacccgcgcgtggacactgcgccactataaggggatcggaaccgtaggcgtcatggtggcaaccggcgacccgacgcacccggcaccgggtgatgatctggttcaggctgtccgcaatcatatcctgccgctggctcccattgcaggcgcaggccttttcgttttcgcggccacggaaaaagttattccgatgacgatcgcgctggcgaaagataccgcggaaattcgcgcagccgtaaccgcggagctgaattcactgatgctgcgtgacggcattcctgacggaaaagtttacctgtcacgcatcagcgaagcgataagcctggctacaggggaggttgctcaccagctgcgtgcgccggttgctgacgtagcactgggatctaccgaattgcccgttgttggcacaataacctgggcaacttatacggaggcgagcagctga

SEQ ID NO: 144382 - DNA, 414 bp, Enterobacter cloacae
atgatcctctatgttaacgggctcctgaaggagtccacggatccactcgaccttttaacacgtgctgttgtgatttctctgttttcgtggcggcgcgccgagagcgacgaccgtataccagacccctacgggtggtggggcgacacctggccgacagtgcagaacgaccgtataggctcccgcctgtatctgctgaaacgccgcaagctcacgaatagaacgcctcaggatgcccgcgagtatatgcagcaggcgctggcgtggatgactgaggacggcgtggccacacgcgttgacgtaaccgcagaacgtaccgggatcgatacgctggcggctgggataactatctaccagcgtgacggcaccattcacaacattacctttgatgacatctggagtgaactcgatggctga

SEQ ID NO: 144383 - DNA, 534 bp, Enterobacter cloacae
atggctggatcttctcttcagaacattgtcacgcgagcagttatcaccgcgctcgataccgcaaaaaaatgccaggccgctggtctgcggttgatcgccggcgaacaaaaagaaaacgtggagcatctggagccgtatggctttacgtccgctgcgcaggatggtgcagaggccttaatgctgtttcctggcggcgaccgttctcacggtgttgccgtggtggttgctgaccggcggtaccgccttaaaggcctggcacgcggagaagtcgcaatttacgacgatcaggggcagtcggtaacgctgacccgtgccgggatcgttgtcaacggcggcggtaagccgattatttttactaatgctcctaaagcccgtttcgaaatggatattgagtccaccggcgaaatcaaagatctctgcgacggcgcgggcaaaacgatgtccgccatgcgcacgacatacaacgggcatacccacaaggaaaatggcgacggcggcggaacgacaaatcctcccaaccaaccgatgagctaa

SEQ ID NO: 144384 - DNA, 1059 bp, Enterobacter cloacae
atgaacaatactgtttttttacgtgtgaatggccgtgagtggggcggctggacatcttcccgcatcagcgcgggcattgaccggattgcccgcgattttaacgtgtcgatcacccggcagtggccgggtagtgatggtgtgccgcagattaaaaacggcgatcgcgttgaggtgatgataggtgatgatctggtgattatgggctgggttgaggcgttaccgctgcgctacgatgcaacggcaatcaccatggggatcgttggccgcagcaaaacagcagaccttattgactgctcagcggcacctgcgcagcacaatggtaaaaatctgttccgaatcgccaccgcgctggctaaaccgttcggcgtggacgtcgtggacgccggtacacctgcgactgcagttattgacgcgcagccggaacacggtgaaacggtggtggagtgtctgaaccgcctgctggggcaggtgcaggcgctggcctacgatgatgcacagggcaggctggtgctcggtaaaccaggggctgaaaaagcggccacggcgctggtactgggcgaaaatattctttcttgcgatacagagcgcagtgtccgcgatcggttttccagttacctggtcaccggccagcgcccaggcactgatgacgatttcggtgaagcaacgatcgccgccatccgacagagcacaacagataccggagtgacccgctatcgcccgcacaccgtccagcagtccggtaccgcgacgactgacagctgcaaagcccgctgtgagtttgaggccaggcaacgtgccgcaaaaacgcgtgaaaccacgtacacggttcagggatggcggcagggcaacggcgaactgtggcggccaaacctttcagttattgtctacgacccgttgaatggcttcgataacgagacgcttgttatcgctgaagtgacatacatcaaagataacaacggcaccacgtgcgaaatccgcgttgggccagctgacgcatacctgccggaaccggccgcgccgaagaaaaagaaaaaaacatcgggaggctcagaattctga

SEQ ID NO: 144385 - DNA, 1344 bp, Enterobacter cloacae
atggcttttttttcttcaaacgactggcgcgatcgtcttcgtgatgcgtcgtttcgtggcgtacctttttcagtggaagatgatgagggttcgtttgggcgccgtgttcaggtgcatgaatatcccaatcgcgataaaccgttcacggaggatttaggtcgggcaacgcgccggatgaccattaacgcctatctggttggtgacgattacgccgataagcgcgaccgccttataggtgctattgaaacagcgggaccgggaacgctcgtccatcctcagtatggtgaaatgcagggcagtatcgacggacaggtaagagtcacgcacagcagcgcagaagggcgcatgtgccgcgtttcatttcagttcgtggaaagcggagagctttcttttccagttgcgggcatggcgacggcgcagcgcctgacacaatcaggcggcctgttcgatgacgcgatcgaaagcatgttttctgctttctcactctccggcatcgctgattttattcaaaatgacgtactggccgacgcagctgcgatgctaggcgatgttgccgacgcgttccggatggttgattccggcgtatccgctgcgatgcgactgctgcagggggatttgtcagtcattttaatgccgcccagcgcagccagtgattttgtgcgtgcgctgcaaaaagcctggcgcgccgggaaccggctaactggcgatacttcagaccttgtgacgatgataaaaaccatgtccggcgtaacgcttgatccagggctggcgccacggggaacctggccgacagattccggttccgtcgggatgcaaaaatcccgcagtaacatggtcgccgcagcgatccgttccacggcaatcagcacggcatcccagaccgttgcgacactggcacagccgaaaaccatcgcggcgccgcaggggcaaaccgggaaggttactggcggtgcgtccactaacgatatcatcaatatttcacatcccgcgctggatggttcggccagtacgacggtggaagacgatccgcccacgtgggatgaattaactgaaattcgctcggctctgaattccgctattgatcaggagcagctgcgcattaccgacgacgggattttccagcaaatcactgtactcaggacagacctgaacagggatatttcggcacgtcttgctcaggtggaaatcactgctgagcgcacgcccccggaagttctccctgcgctggtgctggcggcgggctggtatgacgacgcggcgcgggaagatgacattctcacccgtaacgtggttccccatccgggttttgtgcctgttaaaccactgagggtaccggtccgatga

SEQ ID NO: 144386 - DNA, 1923 bp, Enterobacter cloacae
atggctgacagtttccagttaaaggcaattatcaccgccgttgaccagctgaccgggccgatgaaagggatgcagcgcgagcttaagggattccagaaagacatggggagtctggcgctgggggctgcggccgcgggaaccgccattctcggcgcgctggcgctgcccgtgaatgctgcgatcggttttgagtcaaaaatggctgacatcaggaaggtggttgacggcctcgatgataaaaaagcgttcgcgcagatgagtgacgacatcctgacgctctccactcagttaccgatggcagcggaagggatcgcagaaattgttgctgcaggcggccaggcgggtattgcgcgcagcgatttgatgcagtttgccaacgatgccgtgaaaatgggggtggcgttcgataccaccgccgaggattctggccagatgatggcgcagtggcgaacggcgttcaaactgacgcaggatgatgtggttgttctcgccgataagattaactatctggggaataccggtccggccaacgcgaagaaaatctctgatatcgtcacgaggattggtccgctcggcggcgttgcgggtgtagcctccggtgagattgctgcaatgggcgcaacgatcgcggggatgggggtcgaatcagagattgcctcaaccggcatcaaaaacttcatgctgtctttgaccgcgggtaactctgctaccaaagcgcagaagcaggccctggcctttctcaagcttaatccgaaaaaactcgcagaggatatgcagaaagattcgcgcggtgcaatgctgaaggtgctggactccctcgcgaaagtgcccaaagcgaagcaggccgccgtaatgaatgccctgtttggcaaggagtcgctgagcgcgatcgctcctctgctgaccaacctggatttattacgcaccaactttaaccgtgtagcagatgcccaggaatacggcggctcgatgcagaaggaatatgcatcccgcgcggccacaacagaaaaccagctggtgctgctgaaaaacagtgtgaatgccatttcggtaacgctgggtgataccttcctgcccgctgttaacgaggcggcaaaagcagtcatgccttatctggaacagctcaggacattcgttcgtgcgaatcccgagctggtgcaatcggctgccaaattcggcgcggcgctgctgggtgttggcgtctccatcggcgtgttatcgcgtgcaatcaaaatcctgaacacggtgatcaacctctcgccagccaaactggcgataactgcgctggcggcgggcgcgatgctgattatccagaactgggatgatgttgccccggtgataaaggcagcatgggttgaagtggataaggtggctcaggcgttcggaggatgggaaaccgtcctcggcggtgtggggttgtatatgacaggggcattcactgtcaaaacgataggcagtctgcgcaccgctcttaccctggcaacgcagctttcaggtgtgctgggtaaaattgccacgctgggggcgaccacagtacagattgctgttgcgatctacatgttcgagcagctgaaagaaatcgctgacgcagcgaaggaagccgaccataccgattcattctggcagtcactgaaaaatcgctggaacgccgggggctggtatagcaataagcagcaggtccagcagcgtgacatgctgacagggcagacgacaagggataatttttcgctatctccaccgttactgagccaggggcctgtgcttgatcgtgctgctgcgccagctgcacaacgcagtgagttgaaagtgacatttgataatgctcctccaggcatgagagtgctggatatcccgaaatcgggaaatccgatgatggatgtgactcacgatgtcggttattcaccattccgcacaccacgttaa

SEQ ID NO: 144387 - DNA, 327 bp, Enterobacter cloacae
atgacaactgaactggttctgaaaaaaccgattaccgcccataacgaaaagctgcatgtgctggagctgcgcgagccaacctacgacgaaattgaatcgattggtttcccgtttacggtgtccggcgacggagggttaaaacttgatagtgccgtggcgctgaagtacatcccggtgctggcggggatcccccgttcgtctgccgcgcagctggcaaaactggacatcttcaaaacctgcatgctgatcctgaatttttttacccaatcggagacggaaaaaacctcagacgacgactctacaacgtcgcctggttctggaaattaa

SEQ ID NO: 144388 - DNA, 357 bp, Enterobacter cloacae
atggcaaagattgcgggtaccacttatttcaaaatcgacggacagcagttgtccatcaccggcggtatcgaggtgccgatgaacacccgcgtgcgtgatgacgtgatcggcctggctggtgatgtcgattacaaagaaacgcaccgcgcgccctacacgaaagtgacggcgaaggtgccgaaaaacttcccggtgaacaaaatcaccacctcagacaacatgaccatcacctccgagctggcgaacgggcaggtttatgttctgtcgaatgcctggctgcacggtgaggctaaccataaccctgaagagggcacggtggatctggaattccacggcgaagaaggattttatcaatga

SEQ ID NO: 144389 - DNA, 1515 bp, Enterobacter cloacae
atgaccgtaagctttaattacatcccggcagataaccgggtgccgctgttttatgccgaaatggacaacagcgccgccaatacggcacaggacagcgcgccctctctgctgattggcatggcattgtccgatgctgaaatgcccgttaaccagctggtcatcatgccgtcgaaagacctggctaagaaaatggcaggccgcggcagccagctggcgcgcatggtggaagcgtatcgccgtgttgacccgttcggtgaattgtgggttatcgctgtgccgaatagcgggcaggcggcaaccggcacgatcaccttctcaggcacggcaacagatgcgggtgctgtaaacctgtatatcggtaccacccgagtacagattaccgtggccgctcaagacaccggcgcggatgcagcgcaggcgctgctggctgccattaacggcaacgaggatctgccggtcaccgcccagtataagatgacctcggctggcccagcccagggaacgcttgaactcactgcagtgaatagcggtaccggcggtaacagcattccgctgatgctgaattactacggtacggccagcggcgaagaagtacctgcaggcttaagcgtgcaggtcgggaaaatgagcggtggtgctggcgatcctgatttatcagcaaccatcgctgcgatgggtgatgagccgttcgattatattggcctgccgttcagcgacagtgcatcgctgcagctgatggcgacagaaatgaacgacagttcggggcgctggagttacattcgccagctatacggccacgtgtatacggccagaaccggctccctgtcagagctggtggcctatggtgatacgtttaattatcagcacatcactatcgcgggttatgaaaaggatgtgcagacgccggttgatgagctggtggcatatcgtctggcgcgtcaggctgtatttttacgcaatgaccccgcgcggccgacgcagaccggtgaactgaccggcgctcttcctgcaccaaccggaaaacgctttaccatcacggagcagcagtcattgctgacgcatggtattgcaacgtcgtacaccgaatccggcattttgcgcattcagcgcgatatcactacctaccggaaaaacgcttatggcgtggcggataacagttacctggacagcgaaacgctgcataccagtgcctacgttctgcggcgcctgaagtcggtgatcaccagcaaatacggtcgccacaagctggcgaatgacggtacccgcttcggccccggccaggcgattgttacaccatcggtcatccggggtgaactgggggcagtttaccgccagctggagcgcgagggcatcgtagaaaacttcgatctcttccagcaatacctgattgtcgagcgtaacgcgaatgacccgaaccgtctggatgtgctgttcccgccggattacgtcaaccagctgcgtgtgttcgccgtacttaatcagttccgtctgcaatacaacgaggaggccgcataa

SEQ ID NO: 144390 - DNA, 171 bp, Enterobacter cloacae
atgtttgtgaaacccgtcaaagggcagtccgttccggaccctgcccgtggtgatgttttgccggaaaaagggcgaaacgtcgaagcgtccgcgtactggttccgccggaaagctgctggcgaaatcgaagtaattcaaccaaaaggggctaaagatgaccgtaagctttaa

SEQ ID NO: 144391 - DNA, 561 bp, Enterobacter cloacae
atgaaactaaccccgattattgcggcgcttcgcgcccgatgtgcgctgtttgaaaaccgtgttggcggtgccgcacagtttaaagcgatccccgaagccggaaagctcaggctgccagcagcgtacgtcgtgccatctgaagacgtcaccggcgagcagaaatcgcaaacggactactggcaggatctgacggaggggttttccgtcatcgtcgtgctcagcaacgaacgggatgaaaaaggccagtgggcatcgtatgacgccgttcatgacgtcaggcagcttatctggaaagcgctgctgggctgggagcctgaccctcaggcgcatgaaattcagtacgccggtgggatgctgctggatctgaaccgccacgaactctattaccagttcgatttcacggtgaagtatgaaatcaccgaagaggacacccgccagcaggacgacctggacgcattacccgaccttaaaacgctcagtattgatgttgattatatcgaacccggtaccgggccagatggcaacattgagcaccacaccgaaataacctttcaggattaa

SEQ ID NO: 144392 - DNA, 513 bp, Enterobacter cloacae
atgccgcagacagcatttttacacgttgatttcgaacagccggacgagcttgtctttaaccgggcgaggatgcgacgagcgttcgtcaaaatcggtcaggttcacatgcgcgatgcccggcggctggtaatgaaacgtggtcgttcgaagcctggcgaaaacccttcataccggacggggcagctggcgcgctcaatcggctattacgtgccccgcgcttctaaaaaacgtccggggctcatggtgaagattgctccaaaccagaagaacggggagggcaaccgccatatcaacggcgcgttttaccctgcattcctgttttacggtgttcgccgtggggcgaagcgtaagaaagggcaccatcgcggcgcatccggtggcagcggctggcgcgtggcaccgcgtaacaactacatgacggaagtgctggataaacgccgtagctggacacgttacgtgctatcccgcgagctgcgcaaatccctccggcctcaacgcaggaagaaaaaatga

SEQ ID NO: 144393 - DNA, 405 bp, Enterobacter cloacae
atgaaactcaggcaggcgcaggccagcgccacataccttttgcccgacccgggcgagctggaccagcgtatcgttatccggcggcgcgtcgacgtgccagcagatgattttggcgtgtcacctacttatccggagcaggtccggacgtgggcaaaaaaagcacaacccggcgcagcggcgtatcagggatctgtgcaggttgaaaataaggtgacccattatttcaccatccgttttcgccgcggcattaccgccgatcatgaagtggttcacgacgatatttcgtatcgggtcaaacgcgtcagggatctgaacagtaaacgccgtttcctgttgctcgagtgcgaagaactgggtaccgacagcgggagtgactatgccgcagacagcatttttacacgttga

SEQ ID NO: 144394 - DNA, 324 bp, Enterobacter cloacae
atgttgctttctcctgaggaaatcaaggtgcagctcaggctggatgaggattacgccgatgaagacaaatttcttgagctgctggggcgggcggttcaggcccggacagaaaattttctgaaccggagactttatgcggcggaggcgggagtgccatccgacgatccggaggggcttattctctcggatgacatccggatggggatgctgcttctggtgactcacttctacgagaaccgctcaaccgtcaccgaagtggagaaagtcgagctgccgatgagctttaactggctcgtcggtccatacaggtacatcccgctatga

SEQ ID NO: 144395 - DNA, 1230 bp, Enterobacter cloacae
atgaaattgcatgaactgaaacaaaaacgtaataccatcgcgaccgatatgcgcgcgctgaatgaaaaaatcggtgataacgcatggacggaagagcagcgcaccgagtggaacaaggcaaaatcagagctggaatcccttgatgagcgtattgcccgtgaagaagagctgcgccgccaggaccagacctacgttgatgaaaacgaggaagagcagcgcaataatcaggatcctgataaaaacacgctgcaggacgaaaaacgcggtcagatctttgataaatggatgcgtcacggcgccagcgagctgagctccgaagagcgtaaggctttgcgtgagctgcgcgcgcagggcgtggcgccagacgagaagggcggttataccgtgccagataccttcctggcgaaagttgtggagcagatgaaagcctatggtggcattgccagcgtggcgcaaattctgacgacttccgacggtcgcactatggagtgggcaaccgctgacggtaccgccgaagtgggcgtgctgctgggtgagaacgaagaagccggtgaagaagataccgagtttggtatggactccctgggcgcggtgaaaatgacgtccaaaatcatccgtgtttccaacgagctgctgcaggacagcgcgatcgacatggaagcctatcttgcccgccgtattgctgagcgtatcggccgcggtgaagcacgataccttattcagggtaccggcaccggcacgccaaaacagccgaaagggctgaaagcatccgtcaccggcaccactcagacggccgccgctgccgcagtgaaatggcaggaaattctggcgctgaaacacagcattgatccggcgtaccgccgcgggccgaagttccgcctggcgttcaatgacaatacgctgaaactcatcagcgagatggaagacggtcagggacgtccgctctggctgccggatatcgtcggcgtggctccagcgtcagtgctcaatgttccgtatgtcatcgaccaggaaattgatgatatcggcgcgggcaaaaaattcatgttctgcggtgacttcgatcgcttcatcatccgccgtgttcgttacatgatccttaagcgcctggtggagcgttacgcagaattcgaccagaccggtttccttgcattccatcgttttgactgcatcctggaagacacctctgccattaaagcgctggtgggcaagggttctgcaagcagctaa

SEQ ID NO: 144396 - DNA, 603 bp, Enterobacter cloacae
atgagtgaacgagaaattcgctgttacagcggtgaagtgcgcgctgaaacgcgcgacagcgaacccagcaggatcatcggatacggttcagtttttgacagccgctctgaactgatttttggttcgtttcgcgaaattatccggcccggtgcgtttgatgatgtgcttcaggatgatgtccgggcgctgtttaaccatgatcccaattttattctggggcgcacccgcgcgggcacgcttgcgcttacggtggatgaacgcggtctgcgttacgacatctccgcgccagaaacccagacaatccgcgatctggtgctggcaccaatgcagcgcggggatattaaccagtcctcttttgcttttcgcgtggcccgcgacggggaggaatggtaccaggacgaggaaggtgtggtaattcgtgagattacccgtttttcccgtctgctggatgtcagccctgtgacatatccagcgtaccaggaggcggattccgccgtccgctcaatgaaagcctggcaggaggcgcgcgacagtggcgcgctgcagaaagccattaaccaacgaatggcgcgtgagcgcgtcctgacccttcttaacgcgtaa

SEQ ID NO: 144397 - DNA, 1218 bp, Enterobacter cloacae
atgttgattgatgccatttttagaagcggctcgctggaaaatccagccgtgcctgtcaccgttgaagccgccgagaacgacgggatttttaacggtgacgtgatcgtcaatccccggacggcgatgaaactggcagctgtttacgcctgtatctacgttatttcatccaatgttgcgcagatgccgctgcacgtcatgcggcgcaccgggaagaacgtcgaggctgcacgcgaccatccggcgttttatctggttcacgacgaaccgaatacctggcagaccagctataaatggcgtgagctgaaacagcggcacattcttggctgggggaatggttacacgcgggtaatccgccaccgccggaccggtgaagtgatcggactcgaagcgtgtatgccttgggaaacaacgctgctgaacacaggcggacgttatacctacggcgtttataacgaagagggggcctttgccatcaaccctgacgacatgatccacgtcagggcgctgggcaacgatcagaaaatgggactcagtccggtactgcagcacgcagaaaccatcggaatgggcatgagcggccagaagtacacggagagtttcttcagtggaaatgctcgaccagccggtattgtatcggttaaaggtccgctgaataaagatagctggggatggctgaaagaccagtggcaaaaggctacagctatgctccgcagcaaggaaaataaaactatgctgcttccggcagaccttgactacaaagcgctgacggtctccccggtagatgcccagctcatcgacatgatgaagctcaaccgctcaatgattgccggtattttcaacgtgccggcgcacatgatcaacgacctcgaaaaagccaccttctccaacatctccgaacaggcgattcagtttgtccgttacacgatgatgccgtgggtgacgaactgggaacaggagcttaaccgccggttattcacacgcgccgaacgggctgcagggtattacgtgcgctttaacctggccggtctgctgcgcggtaccgcaaaagagcgcgcggagttctatcaccacgccatcaccgatggctggatgagccgcaacgaggcgcgcgcgtttgaggacatgaaccctaaagacggcctcgatgaaatgctcgtcagcgtcaacgcctcccagccagctaaatccacaacccaggagaacactcaagatgagtga

SEQ ID NO: 144398 - DNA, 159 bp, Enterobacter cloacae
gtgaaatcactaattatcgatgtggccgggctggcaggctttggcgcgctggtgggaggtgtttacctcaaatttggcacggccgtcgctctcatggtcggtggtagtggcctgctgctgtgggcgctgctggctgccaggagaataaaaatatgttga

SEQ ID NO: 144399 - DNA, 1731 bp, Enterobacter cloacae
atggctacatatccgaacgtcaatgcggcgaaccagtatgcgcgggacgtcgtgaacgggaagatactggcctgccggttaaccattcttgcctgtcagcgacatctggacgacctggaacgcgccaaagatccacgctggccttaccgcttcgataaaaataaagcagaacgattcctccgcttttcccagaaaatgccgcacacctcaggtgagtgggctcgccggaagctacgcatcgagtttgaaccgtggcagaaatttgcgctcggcgtgccgtttggctgggtgcgaaaagattcaggttatcgccgcttcactgagatttacattgaggtgccgcgtaagaatggtaaatcggcgatcgctgcggccgtcgggaattacatgttctgcgctgatggagagtacgcagcggaagtctactgtggcgccacgacggaaaaacaggcatggaaagtctttgcgcctgcgctggcgatggtgaaaaaacttccggccctgcgccagaaattcagcatcaaaccttgggcaaagaaaatgacgcgcccggatggttccctgtttgcgcccatcattggcgaccccggcgatggggattcgccctcctgcgccatcatcgacgagtatcacgagcacgataccgatgcgctctataccacgatgacaaccgggatgggggcaagggaacagcccatgacgcttatcattaccacggcgggtttcgatattgcctcgccatgctatgagaagcgcgcccaggtggtggaaattctggagcgcatcagggagggcggtgaaaacgaagcaattttcgggatcatctacacccttgatgatgatgacgactggacgcagccggaatcgctgataaaagccaatcctaattacaacatttcagttaaaggggattttctcaaggccaagcagctgctggcgatatccacgccaagccagaccaacaaaattctcaccaaacatttcaacaaatgggtgagttcaaaaacggcattctacaacctccagaagtggatggccgcgacggataagacgctcaaattgtccgattttgcgggggaagagtgttatctcggtatcgacctggcctcaaaactcgacctgaacgcggtggtgccggtgttccgccgcgaaatcgacggggtgagtcattattactgcgtgtcacctcagttctgggtgcctgaagacaccgtctacgccacggacccggcgatgaaaacgatcgccgaccgttaccagtcctttgttaatcagggggtgctggttccttcagacggggccgaagtggattaccgccttatttacgaagcgatcctgaaattacgtgaaaccgtgaaaatagcggcgagcccgattgacccctatggcgcaaccggtctttctcacatgttgcaggatgaagggctggagcccgtcaccattacccagaactacaccaacatgagtgatccaatgcgtgagattgaggctgcgattgctgctggccgattccatcacgacggcaacccgctgatgacctggtgcatatcaaacgtggtcggcaaatatttacccggtagtgatgatgttgttcgcccggtaaaagagggcgcaggcaacaaaatcgatggtgcagttggcctgatgatgggtgttggccgcgcaatgctgaatgagccgaaagacttcctttctaacctcgatcctgatgaggacctgttaatcctgtga

SEQ ID NO: 144400 - DNA, 438 bp, Enterobacter cloacae
atgggtactgctgtacgatcttccggtggtggccgtaagcgcaatttgccctctaacctgaagagcaaactgacaaggatcgcgccgccggacgagttaatgagcgacatcgcgatccgcatctggaaaacgcagagcaaaattttaatcgaacgcggcgtttttgatctcgaagacgcgccgctactcctggcgtactgcaatgcatttcacctgatggttgaggccgaaaaagtcatcgcgaaagacggcctgaccgtatcaagtgaaatggggggtgagaaaaaacacccggcagttaatgtccgtaatgactccgtttcgcagctcgcccgtctgggttcacttctagggttagacccgctcagccgcataagaatgaccagcggtaaaaatgatccggacgatgaagggaatgaatttgatgagtttgactga

SEQ ID NO: 144401 - DNA, 528 bp, Enterobacter cloacae
atggcgcagaccagcatggggattcagctgaatgcagcgcgcatccagctggtagcccgccaccatcagggaaaagtgcttgatgtggggataggttccggacagttcgtggagacgcggccggagacatggggctatgacgtgaacccggaagggatagcatggcttaaggctggtggccgttgggcgaacctttacgacccgtattttcctgatggtgatttccccgcgctgacgttctgggattcgctggagcatatcgacgatccagaagcagctgttgcccgcgccggtcagtgggtgtttgtgtcgctgccggtctttaaaaatgcagaacacatcctgacatcccggcattaccgcaaggatgagcacatctggtatttcaccgacgatggcatccgccgctggtttggcgtgcagggttttgtatgcgctgagcacaacaccattgagagcatgctggggcgtgacggcatcagcagctatgcattccggagagttagccatgccaccgagaacgcctaa

SEQ ID NO: 144402 - DNA, 867 bp, Enterobacter cloacae
atgaaaagacgaaaggtctgcatccgcgggatgtacgggcttggtgattctatttaccagcgggcgtttgtacgccagttccccggcgcgtatctgcgaacaccctggccggaactttacagcgatctcgatgtgaattttgttcggtcgaatacgtcactcaggacacagcggaaaaacgaagagcaaacgggagtggagtttgtgcaggagccgccgcggccgtcggagattctgacaattttttatggccctgacgaactgagcaagggctccatcatcgacgccatgacctggcagttcggcaagatggccagcgtgtttgatctgccctcattcggtgaatcgccggtgcaggttgataagcctgttgcagtcatccgtccggcgaccgttcgcaaagagtgggcgaatccggcgcgaaatcctgaccccaaatacctggcagatgccgcacgtgagctgcgtaaacatttttacgttgtgagcctggctgaccttgaagagggggaagagtggctggtgggagaacatccgaaggccgatctctatttgcacaaaggcgagctgtcactgacggaaatgctggcgctggtggaacatgccgccgtcgtggtttctggtgttggctgggcgctgcccgcggccatttgctacaaaacgccggtattcatcgttcagggtggatgcggtgcgcacaatgccccccacatcgttaccgatccagaaatggatctttcccgcgttggatgggcgcagcccgatgattattgcatgtgcgggagcatgcaacacgactgcagtaagcacatttctggtttcctcgataacttcaaaggctggctacatgacattgttctcacatga

SEQ ID NO: 144403 - DNA, 543 bp, Enterobacter cloacae
atgcagggaacgtttatctgcatagcaagtggtccatcgttaatctctagtgactgcaatcttgcttcatgttcaggactccctgtcattgccgtaaacaatagttggatggccgtaaaatgctgcaggcatatatatgcggcagactgctgctggtgggaagaatacggcgaaggcataacttccaatgctgctcgatggtgcggcgatgaattcacggcccggcgattcggtattcactggttaccgcctgcaatccccggttcgtttaattctggtcagcgagcaattgagctggcgatccaccttggagccagccgcgttctgttgctgggctatgactgttcaatacggaacggcacccactggcacggcaaccacgctcagctgtccaacccggacaaattcagcgtagcgcgctggcaggatgaattttcccgcctcagagctgttgctggtggtgtcgagataattaactgctcccgctttacgcggcttacctgcttcccccgacagtctctcgagactgcactttctctgtag

SEQ ID NO: 144404 - DNA, 873 bp, Enterobacter cloacae
atggaaaacgtgcatcctctttcgctctcaacggttcttatacttcttaaatctaatgggcagcccgtttcatcaggaacaggtttcttttatgcagataaaagacaacgcctctttatcgcaactaattatcatgtagtgacaggtaatgcgcccggttctggcaaagccccacagggtgatgaaatagagtttgttgtaaagatgaaaaaaggtaatccgttaacttttcggatagcgctatttgagggcaatgaaccagtatggcaccaacatcctacagatagagacgcagatgttgtcctgatcaaattgcccggcgctgattacagcggacacgattttgtaacaatatctcaacaggcgaagattccaaacgtacaaattcatccatcgtcaactgtggtgttaattggctatccttacgggttgcatgacttaacaaatatgctaccaatttggaaaacagggagcatagctagcgaacctgattatgacttcaacggaaataaattattcgttgtggatgtgtctgcttatcgaggcatgtctggttcgcctgtgttttatgtttcgcatgggggctttgtaacaaaggggggcggttatgcgattgcggcaggtatgcaggcccattttatgggtattttcgcgagtatgcataatttcattagagagctcgaagtaaatgatccatctggggttaatggcatcaaagttagacatgaggaatcattagagctcggaaacgtttggaagtcttccatcatagaagaaatttctgatagttttgctgatcaacaaacaagggatccaaaagttctaatcagccataaaacacaatggcaaccagggaaggggtttggattttaa

SEQ ID NO: 144405 - DNA, 606 bp, Enterobacter cloacae
atgacgccacgccagaaacgccagtaccttgaagggttgggaaaaaccgcaatggcaccacgcaaaagctggctcgggaaaagtattctcctgaatgatgttcagtccggttggataaaatcgctgcttacggtgtggggggaatgcgtccgcggtggcacagcaccggcgaaaccatgcggtcactcatgctggaacgtaatcagagggaagaactggtcagacaaagcccttgagcggtttactgcagcgctgaaccaggcgagagaagaaggatttcgcggtgagctggcaatgaaacgggcgcgcgcaattctttggcctgagccgccgaccagcattattgacgaggctattagcagtgatgacggtgaatttatggagggcgtagtccttcaggcgtttgacttgaaggatccggtttacattgttggccgccagtattacaccaccaggaaaaaaatctctgacatcaccagagaactgcagagcctggccccatggcttaccgaatcggaagctagaaagcgggtgcgctggtgcctggaaatattcagggcaaaggtttttctgtcggcgaggaccagcctgaaagaaggttcatga

SEQ ID NO: 144406 - DNA, 1818 bp, Enterobacter cloacae
atgaataagccagtcagttatggctcagtgtgcagcggcatcgaggccgccagcgtggcatggcattgcctgggctggcagccagcatggttcgctgagatagaaaaattcccctccgctgttctggcgtaccgctggccggacgtcagcaacctgggcgacatgacgcaaatcgccgcggcaatccgtgccggaaaaatcgaagcgcctgatgtgctggtggggggcaccccttgccaggcgttcagcgttgcgggtttacgtaatgggctggctgacgaacgcggccagttaactttggctttcgtggaactggttaatgctattgatgaaaaacgcagagaacagggaaaatcacccgtcatcgtcgtctgggaaaacgtccccggcgtattcagcagcaaagataacgctttcggatgttttcttgcagggcttgccggcgaaagctgcgcgctggaatcaccagggaagcgatggtcaaacgctggttatgtgctgggaccagaaagagctattgcctggcgagtgctcgacgctcaatttttcggagtggcccaacgacgcagacgtgtgtttgttgtcgcaacagctcgaagggatatcgataccgcaaaaattctttttgagtccgaaggcctgcgcaggaattctccgccgagcagaaaagcgaggcaagtcattacctcagatgctggctatcgcgttgctaacggtagtcactgggatggggagcacaatccacatccaacgctgaatcagtcattcaatactggcgggatcggtgcgagtaatcaggaattattcagtcagcgcggcagtgggatcgttggggcattccgcatgcgagctttcggcgattacgcaagcgacgagacagcatcaacagttaaagctcgcgatcacaaagatgcgaccgatttagctgtgacttattctgacgtcagcaggactctgctggctaaatccaatgacagcatggatgagacgcttcaaacttacgccattcatggtactcaggatccagataccctcgcagatatggctcacaccctgggccgcaatcacggtcaggaaaacgcggttatcgcgttcagctctaaggatagcggtcatgatgcctcagcagaagtttcgccgaccctaagggcagggaatagcaaggtcagcaaccagaatgctggatcaccaccagcggttgcttattgcatccctggaaactggataggccgcgcgcctcacaatggcggaaactcaacagagtcgccgcaccagatttcaccttgccttaccgctacggatcatcatggagtggtttatgcttttgcagaaaatacgcaaggtcaggtaaggctgcaggatggagatgggcaaattacaggtccgctatcaactggcggcggcaagccagggcaaggctatccagcaatagcttacgcattcaagggaggccagggagcaaaagctcatggaataggttatgcctgcgaacaggcacctacgcttaccagcgcaaatagtgggagcaatcaggctcctgcaatcatgcaaaacatggccgttcgccgtctgactcctgtcgagtgcgaacgcctgcagggcttccccgataaccacaccctgatccccacacaaaaacgtaagcagctcaccgctgaagaatatgcctacctgcgccaccaccggccagaactggctgcagagcaggctttccgcctggccgctgatggaccgcgctataaagcgatcggaaattcaatggcggtaccagtgatgcgctggatcggctcccgtatacaggaggcgctgcgtgcctaa

SEQ ID NO: 144407 - DNA, 456 bp, Enterobacter cloacae
atgagcattattaccaccgaacgcctgacaaaaatcctctctgaaacccaggcggtaattagcgaatgtaacgcgcgtggtgttcatgggtccgtagaggtgaatgccaagttgtttgaaaatgtgttgatggagttattgcgacaccgcgccgccgtgcttcaaggggccgaaccttccaaaatgagcgccatcatgcctgactacgaaggctgtgtcatgactcagcgtgagtgcttccaagcagggtgggaagcgcatcatgttgcaatgctgcaggcgggagctccggtgcagtttggatggtcaaaaggtcatttcggctaccacacccttttcaacgcaatcggaaaggcagtgaacatccaggggggagcgctatcaatttcggtgagtgcgttcgaagatgcaatgcttgcagcagcgccgcagaaggaggtgaaacagtgtacctga

SEQ ID NO: 144408 - DNA, 657 bp, Enterobacter cloacae
atggaaaccgtactggatgcactgaaagccatgaaaaaagcaacatatcgcgaggttgctgcccgtctggatatcgagcccgttgaagcgctgaacatgctgcgcgagcagaaagagcagggactgtgtgattttgtggatggcggctggttcctcggtaccgcgacagagcagaagccgaagcgtatcagacccaagcagcagtcgccgctggttgagagggtgttgtcagcaatgcagggccagggggctatgaccgccaatcaggtcgcagaaaaactgggtaaaggttcgcgagccctgaatgcttcgctgggggcaatgtgcaaggacggtctggtcctgcgccatgttgacggtaaaaacatcacctggagcctggcgggtgaaccggcaataaagccagagcagcaggagccagcaccagaggttagcgagcaagcagcggcgccagcgtgcaaatccactgccgaaattattcaggatatcccgactttcgccagccgtccggatgatctgattattccgtcatcgcgctatatctcgaccgaaatccgccgcacgaaagcgaagctggcaaatctgcagcgtcttcagggtgccgttcgcgagctgcgtcgccacaaacatctgctgcaggggatgggaaatgactga

SEQ ID NO: 144409 - DNA, 972 bp, Enterobacter cloacae
atgaatccatctgacatcattcgcgggttcggtcgtccggttgcgtattacccggcgctggccgaacacctcggaggcgttagtgccaccgttcttttttgccagatgacctactggatggacaagctcacctccgatctgggtgtgcataaaacttcagaggaaatccaggcggaaaccggtctgagttacgaagagcaactgacggcacggaaaaagcttaaacgccttggggttctggtagaaacccacaagcggcttgagcaccggatttacttcaaagtcaactttgaacgcgtggatcaggtattgacgcaagttgttgataataaaccaaatggacaaaacccatttcgggaacaagggaaagcccaatccgggaacaaggaaatgccttgttcgggaactggggaaagcccagcccgcggagacggcaaagcccatttcgatcctacagagattactacagagactactacagagaataaaaacacttcttgtccggacgcttcgctgtcggacgcacagctgaccaaagaggcgtttttaaatcgtcatccagaggccgtggttgcccatgcaggaaaacggcagtggggaagcaaggaagatctgacctgcgctcagtggatgtggagccgcatcgtcaagctttatgaaaaagccgctgagacagacggggaactggtgcgccctaaagagccaaactgggcagcatggtccaacgaaatccggttgatgtgtgccgttgacggcaggacgcataagcaaatttgcgaaatgttttcgcgtgtacagcgtgatccgttctggtgccgcaacgtgatgtcaccgtcaaaactgcgcgaaaaatgggatgacctggttcttcgcctcccgttgccgggagcggcgcaacaccaggctggtggtcgggatattaatcacatttcccgcccggataacactgtaccgccaggattcagggggtaa

SEQ ID NO: 144410 - DNA, 450 bp, Enterobacter cloacae
atggaaatcaaaaaactggcatgtgagctggagtcctgggcgcaggaaaagggctggaagacggtcacgcagctgataacgccgcatcactttggcgatctgcttcagccactggataacgtgacggatcctgacgagtacgcgcgccgactgcacaacaacaagcagattattcagcgcgcgttccgtaacgatacgccgaattatctcaagcaggcgcaagcgctgagctatgccatccgcaccgccattgataacgaactggagcagaaggactgcatgctctaccgggcagccagggttaacaaagagtgcatcgaagccaccaacgcggtattcaccggcaaaccgcaaccggtaatcaggcgagagactctggaagcgatcgacgcactggcgcagctggctggcgtgaaagtccagatcatgaactgtcatcgcgcggcataa

SEQ ID NO: 144411 - DNA, 216 bp, Enterobacter cloacae
atggatgtggttgaatttggagaaaaaaaagaccgcaacaggcggtctttaggggagttagtctatctcgaggtctttgagcatctgaaggatttcttgtttgctcttgcctttaagccttgccttgagctcattgtctatggagttaacttgggccctgaggtttaccatgtgctgctctttttcccattcagcaaggctgtcgaaaaggtctag

SEQ ID NO: 144412 - DNA, 273 bp, Enterobacter cloacae
atgaaagtaagcgttacaaccgttgagctgaatctcgttatcgtaaataaagaaattgccacctttaatattaatggtgctatttcgggtgtggttcatttgccatcctcaggccctgtaaccgttgtgcttgacggtggctacatgctcggtgaatttcattgtccggtttgtgctgttaagcacattagcttgctgtctgttaacttcgcagaagcgcagaacgcttgtggcatgtcttattacgatcacaaacgccaacaacttaactga

SEQ ID NO: 144413 - DNA, 1905 bp, Enterobacter cloacae
atgtctgttgaattgaaagttttcggcggtgcttatttcccaaaagataaagcattgaaaaaacacccagatttaaagccacttgctactgctgtcaatgcggccacaaaagccatcgctgaagctgttattttcggcaggctggcggccgaacatccagaacatattgatgattactttaaggtaaaaatctgggagcaccgcgaagagttaccctgccctgagcttgatgtgttctcacctgattttttcgacacagtggctatctggaatgtgaatgcaggtgaaccagctgcggcaccacagccagaatctgaagaaaagacggaatgggacgacaacaaggcagtggaagaaattaaaactgtcgcgcagctcgacatggcatcccgtgcagcttgcctggcactgttcggcccggtccctggaatcactacagcgcagtacggccagatcgtcgatctgaagaatgatgatgaacccagctttgcccgcgagcttgcagaagcactggcgaaagagacccgcgcgctggcgctggctccggaacggcaggagcagctgctcgcatggatacgtgaaaatacaaaagactctgcacagtggccggacatcaaaaagcagatcgctaaatggatcgataccccagttgataagcgacctctggctgacagcactaactcacaagaaaaccgtacagacaccggctccacgctgggcggtggtaacaagacagaccgtagcccggatctggttcataacctctctacgctgcgtatcgaagtggctgttgccattctgagcatgtacgacgagatcgacatttactggatcccgaataaatacatgattccagcgaaagccatggccgaagcagaacaggacacacgtttcacagcgtggtggaaaaaactgcgcagcaccccaggcattctggattattcccgtgcggccattatcgccctcattaaatccgctccggaggacatttggatggaccctgttgccttgcgtgaatacatcaatcgcgagttggttgaatctgatcatgcacatcctgaccagaaaacgattgatttggcctgccgccctaaagctcgctctaattcggagaagaaagaagatgatgaaaccaaaccgtctttatctggcgaaactgagttaccagcagtttgccctgccaaagctgcgcagctcgacaaagaactcaacgaagcattcgctcagaacccagcaccagaagggcaagcgagtgaccaaccacgggtggagaacctgggcggaggagtcttctctgttgatgcactgattaataatcccccctcaaatgaggtcgaaaaaacggaaaatcgtccggcaatgagcgagcgggaaatcgaaattgcctacgcccttaacgacctgatgtcgggtcgcacccgggaactgtctcttgaggaagctgaaggtgatgtattacttacagggcatccggtcgcgcagctcatagatttaatgatcacagatattgctgatactgaattttgcctctctcctgatcttgaaaatgatgaaattcaaatggtggcagcctgcatccttgataaatggtctgatgatcaaagtgaacgccagaaaatagcgcttgatgcgatcgttgaataccgccgtccggaaccaccaaaatctgtagtgctcgatccaccggccgttaatgcaaagccgaaagcacggcccgaaccagcacctgaaacaaacgctccgctttcgtcttttacctacctgcagcagctgaccattgcagcactgcagggcttatgttccaacccggcatattgcaatcagtatgaggaattaccggctatggccgccgggcttgcccgcagcgttatcaatcatcaggaagactcctgtgcgtctgattaa

SEQ ID NO: 144414 - DNA, 243 bp, Enterobacter cloacae
gtgcgtctgattaaccgtagcaagggagacagcatcggcgggccagcatgtgccgccgcgcttaaatgccatgttgagaaatttggtgagcacggacgtcgttacactcagacaatttacacggtgcgtgtaagcgggcagaaggtgactgtggagatcgtgaacaggagccgcagctatgttgcgacggccatgatcggtgcgcgacatcttcgccgtcttccggggttagctgattcgtga

SEQ ID NO: 144415 - DNA, 261 bp, Enterobacter cloacae
atgaaacttttatcactcgagcgctgggcggaagaacgctatgaagagcctccgcagataggaaccctcagaaaatgggcgcgcaacggtaatatttacccgcctccggaaaaagagggaacagagtacaaagtcaggcccgatgccatttttatcaggcctaacaaatactgtaagacagttaacacaaatcagagcagatacccgttaaaagggcgattgatagagaggattatcgatggcgaggccggaaaagtatga

SEQ ID NO: 144416 - DNA, 1080 bp, Enterobacter cloacae
atggcgaggccggaaaagtatgatgcaaatctgccaaaaaatctgacctaccgtaaagcccggaaaacttatgcctggcgtaatccaatcgacggaaaagaaattcccctgggcaagatttctcgcagggatgcgatagcccaggccattgaagcaaaccactacatcgaaaaaaattacactccgatcgccctgctcgagcagttgaaaggcaccaacgagtacacaatggctaactggatagatcggtacgaagtcattcttcagcgccgcaagctggctgcaaatacgtataaggttcgcgccgggcagttggcaactattggtgagcatttcggcccgatgatacttgccagcataacaacgcgggatgttgctgaatttcttgaacgctggacggcgtgcggcaaaactacaatggcgggcaccatgcgctcagtattgtctgacgttttccgcgaagcggtagttgaggggcgtgtggacgtgaatccggtcacccctacccgcgcaccgaagattgaggttcagcgcgaacgcctcgagtacgaaatgtttgtggccgtgcgtgcaggtgctgaacgcatgccggcatggtttggcctggcgatggatttggcgctggtcaccgcccagcggcgcgaagacgttgcccggatgcgcttcaccgacatcagagacgatcgactgtacgtcgagcagcagaagaccggggcctgtctggccatacccttatcattgacgctgaaagcatcaggtctgcggctatcgaccgtgattgaccgctgccgtctggttagccggtgcgattttttgataagcccggggatccgcaaaaacagcgaagacggcagtataaatctggatagcctgacgaaaggctttgtgaaagcgaggaatttttccggactggagtttactgacaggccaccttcatttcatgagatccgaagcctgtcggggaggatgtacgagaaggagttaggaaaggagtttgttcagcggctgttcggtcacaagtcagaaaaaatgacaacgaagtacctagacaacagaaaaaaagaattcatgatgatttaa

SEQ ID NO: 144417 - DNA, 1371 bp, Enterobacter cloacae
atgactacctgcactccgcgcgcggcatggggaaacctgctgcgtcgcctccatttctacgtcgggctttttgttggtccgtttatcttctttgccgcgctgaccggtacgctgtatgtggcgactccgcagcttgagaatgcgctctaccggcacgcgctccacacggattccgtaggcgagttgcagccgctggcggagcaaatcgccgtggcggaaaaaaccgttggctcagatttgcatttgcacgccgtgcgtccggggctggctgaaggcgaaactacccgcgtgatgtttgctgacccgacgcttgggccatcggagaaccgggctatttttattgatccggtaagcctggcggtgctgggggatatgacggtatacggcaccagcgggattttaccgctgcgtcagaccattgattatctgcatacctctctgatgctgggcgacgtggggcgactctacagcgagcttgctgcctcctggatgtgggttgccgcgctgggcggtgttggcctgtggttttatactcgacccaaacggcggatcaataatcgcttccagaatcgtcgtcgcctgcatgtgaccctgggctggagtctgctgggtggaatgctgctgttctctgcaaccggcctgacatggtcccagtgggcaggcgggaacgtcgataagctgcgggcagagatgaactggctcaccccgcaggtgaacacgacgctttccggcccacaggagatcgtggatgagcatgccgaacaccggggccatcacggcggaatgatgatgccggaaatggcgatggatctgacgcagtttgacggagtattaagcgcggcccgtaacgcaggaattgatgccaacaggctggagatccgcccggcaaaaacggcggatagcgcctggaccgtgacggaaatcgatcgcagttggccgactcaggtggacgccgttgcggttgatccttcgacgatgcaggtcctggacagaacccgattcgaggatttcccgttaatggcaaaactgacccgctggggcgtggatttccatatggggatcttattcgggctggtgaatcagctgctgctggtggcgttcggcctcgccctgtgcgtgctcatcatctggggttaccggatgtggtggatgcgtcgtccggcacagtcggcagtgagtccggtacaaacgctttgtcaaagctggctggcgctgtcagggtggggaagaggggttacgctgataatcagcgtactgctggggctggccttgccggtcatgggcgtgagtctggcgctgtttgttctggtagactggctgcgctggcgagcggcaaccagggtgacgctcgccgaaacatccgctaaataa

SEQ ID NO: 144418 - DNA, 339 bp, Enterobacter cloacae
atgaaacgtaaacttttgttaactttaattcttactctttcgtttggtgcatctgccgctgaaaagagcaaagagatagatggaacgtcatatggcgataagtggcctctaacctttgaaaaggcgaaagtatcatgtgttaaccgtgcttatgcttttgtgtatgacattaacactgatgatagatatccacttaatggtatggctaaagatgctgttaagtcaggaaagatggaaggctctaatctcgatgacgtatggaaggatgatcctgattatgaaggtgtaaaaatttcaatttcacctctgattgaagccgctaatgcactttgtaattaa

SEQ ID NO: 144419 - DNA, 846 bp, Enterobacter cloacae
atgtctaaaaatgatgtcaatgcttctgctgctttagagcgaatcctttctgcatatgggtttaagcagcaaaaggaactagctgaaaggcttggtattcatgcgaacaatgtaagtagttggcttgcaagaaacgtaatcccaagcaacgttttcattgagtgttctcttgatacaggtgctgatttgcgatggcttgttaatggccagcttgcaaatgcaaaattcaatgaggggcaagtcaatctcaaaggtaaacaactctatgatgaaatcatggcaaacggagggcgagcggttctgcgccgcattctcgatgcatatggttttactatgcaaaaggagttaggagatttattaggcatatcctcaggcactataagcacttgggttaggcgcgatttcttccctggtgatgtggttgtaacctgcgccctcgatacaggcgtatcgctggggtggttatccactggaaaagggcagatgcgtatttgcaaagatattgaaacggctaacgctataacaattagaaaatgccgccttgaggctggcgaacttaaggatatcgggcgctggactcctgatgcctctatggttccgccaaacattgatgatttagtgtttattgatggcgtgagttcatcttggttagccgacatttctaactcaaagataggaaatggccgctggcttattggtattgatggcgctcttgatgtctttgacgtaatcagattaccgggtgggaaaatcagactctcaaataagtctgctgagtttgaatgtaacattacagatattacgcctgctggggctgtaatatttactctggaaaaacatgtataa

SEQ ID NO: 144420 - DNA, 222 bp, Enterobacter cloacae
atggccgacgcaatggatttagcacaacagcgcgagcaagcagaacgcgagcgccttataagcaacgcgcgcagccgtatcgctgcgccatcttgtttcctctgccaggaatgtgacgcaccaatcccggaagctcgccgcatcgcgattccgggcgtggcattttgcgtgacctgtcagcaaatcactgagctcaaacacaaacattacaggggcgtttaa

SEQ ID NO: 144421 - DNA, 474 bp, Enterobacter cloacae
atggcgattcgtattgaagtaggtgacaaatgggttattaccagcgaccagtatcaattcatcctgaatgaaaaaaaggtcgttaagtctggtaaaaaagctggcgaggaatggctcgacactatcggctattacccgaaaattaatcagcttatttccgggatgattcatcaccaaatacataactcagaaattcaatccatcaaagccatggctgatgaaattgaacgcatcggtgaactatgcaatgaagcatttggaattttaaaacctgtcgagaaaattggtggttgcgagtgggtgtcatggaatgaattaagtgcgcgcggtcttctcattcgcattaacaaagagattctacaccctgtcggactggctgtttttcgtgaccctaaaacgggcatttctcagggagctttaattgctcctgatggggtgtgggaatatgaccagtcagtttccgtgaaggggtga

SEQ ID NO: 144422 - DNA, 159 bp, Enterobacter cloacae
atgccgggaagcgacccggccactaatggcgacctgagcgccgatattcgcaggcttgagcacgcgctcgccgcctgcgcgctgcaggttgaaaccgtcaaagactgtcaggataaactcgatgaagaaagcacgcagcctgcgcgacgcgctgattaa

SEQ ID NO: 144423 - DNA, 450 bp, Enterobacter cloacae
atgagtgaatttaagccctttgacgaccggctcaatggtctgattgctgccctgtcaccggctgcgcgccgcaagctggccggggagattgcaaaggagctgcgcaagtcgcaacagcaacgtatcaagctgcagaaagccccggacggctcgccttatcaggcgcgaaagcgtcagccgctcagggctaagaccggacggattaagcgggcaatgttccagaagctccgcacgagccggtacatgaaagccactggccgcgaaaacagcgcggtggtggaatttaccggcaaagtgcagcgtatcgctcaagtccatcagtacgggctaaaagaccgccctaatccgcacagccgtgacgtgcagtacgcggcgcgccagcttctcggattcagccgggaagataaacagctcgtcgagacgctgataattaaacacctctctctctga

SEQ ID NO: 144424 - DNA, 609 bp, Enterobacter cloacae
atgacaatgcaatcaggtgtattcaagaaatatgacccattagaaaaatggggggggtatactgcggaggaagtggctaatcttacgtccgctgagctcgatttatattatattgctaaatcaccagagatgaatattgcttttcttaaagatgaaaaaggcaatgactggtatatgtggcttaagacgctttcacagaaaacgctaaagatatcatttaaccctgacacaaaagaaattatccatttctcttatgatgcaagcgcgattttcccgattaatcagattgtcgctgaagtcgcgccggagaatgtaccggatgaattaagcgcagcgggcgaaaaggcattaggcggcgcgtttcattttgttgatggcgaaattactgccgcgcctgtggattatgcagcagaagcacaacgcaataaactggagttgctgactcaggcaaataacgtcatcgccacactgcaggatgcggttgatctgaatatggctacagacgaagaaaccgcgaacttgctggagtggaagaagtaccgtgtccttctgagtcgggttgatattaatacaccggtatggccgcgattgcctgcgacaaccatctaa

SEQ ID NO: 144425 - DNA, 2448 bp, Enterobacter cloacae
atgagcaataacgtcaggattgaggtactgctgaacgcagtagaccgggcaagccgaccgctcaaagctatccagaatgccagcaagacccttgctggcgacatccgcacttctcaaaacagtctgcgcgatctgaatgcgcaggcgtccagaattgacggattcaggaaagcgagcgcacagcttgccgtgaccggccagtcgcttaacaaggctaaacaggaagccgcagcgctggccgtgcagtttaaaaacaccgaaaaccccacaaaagcgcaggcgcgcgcaatggaagcggcaaagaaatccgccgctgacctgcagctcaaatacaacagcctcaggcagtcggtgcagcgccagcgcaccgagctcgcgcaggccggtattaatacccgcaccctgtcggcggatgagcgccgtctgaaatccagcatcagcgagacgactgcacagctaaaccggcagcgcgaggcgctggcgcgggtaagtgcgcagcaggcaaaactcagccaggtgaaggaaagatataaatcaggcaaggagcttgcgggcaatatggccgctgcaggtgctgccggtgttggtatcaccacggcgggaacgatggccggggttaagctgatgacgccgggttacgacttttcattaaaaaactccgagctgcaagcggtgcttggtgtagcgaaagactccgcagaaatgatggctttgaaaaaacaagccagacagctcggcgacaataccgcagcatcttccgatgatgcggcaggcgcacaaattatcattgcgaaagcaggaggtgatgcggcagcaatccaggcggcgacacccgtaacgttaaatatggcgctagccaaccgtcaaacgatggaagaaaacgcgaagctgcttcttggcaccaaaaacgcctttcagctttcaaatgataacgttgctcacattggcgatgtactctctgcaactatgaataaatcagccgctgattttcagggattgagtgatgccttgacatatttagcgccggtagcaaaaacggcaggtgtgagccttgaggaagcggcggctgttacgggagtattacacgataacaccattactggatcaatggctggtacaggtggctccgctgtggtgagcagattacaagcccctacgggtaaggcatggacagcgcttaaagaattaggtgtaaaaacatctgataggaaaggaaatatgcgcccgctatttaccattttaaaggaaatccagaatagttttaataaacataaactcggaactagccagaaaggcgaatacctgaaaaccatttttggggaggaagcacttaaatcatcaagcgtactcttggaagctgcagccagtggaaaattagatgcattgacggcggcactgagagcctctgatgggaaaaccgctgagctcgttaaaataatgcaggacaacctcggtggcgacttcaaagaattccagtcagcttacgaggctgtcggtacagacctatacgaccagcaagatagctctctaagaaaattaacccaaacagcaacacggtacgttttacaacttgatggctggatcaaaaacaataaggagcttgcggaaacaataggcatcattgccggtggcgcactggctttgataggaattatcggcggtatcggtcttgttgcgtggccggtggtaatgggcatcaacacaattatcgccgctgctggttttcttggaacaaatctggccgcaatgggtacggccattatctctgtgctcagtgctataacctggccggttgtggccgtggttgcggcatttgtggctggggcgctcctgattcgtaaatactgggagccaataagcgcattcttttccggcgtggtggaggggcttaaagcagcctttgtgccggtggcggaaattttcacaccgctcgcgccggtgtttgattctttcatggagaagttacgcggagtctggcagtggttcaaagacctgatcgcaccggttaagtcgacgcaggagacgctcgacagctgcaaaaatgcgggggtgatgttcggtaaggcgctggccgatgcgctgatgttaccgctcaaaagctttaatacattgcgcaccggcgttaactggctgctggaaaagcttggggttatcaaaaaagagtcgggcgagctcgaccagaccgccgcaaaagccagtgccgccaccggctcgcaaaacgggccttatattccggcaacctcagcatatggcggctatcaggcatatcagccggtaacggcgcccactggtaagacttacgtcgaccagagtaagccagaatataacattcacctgaatggaggcatcgtgccgggcagcgaccttgaccgccaactccgagaggctgtcgataaactcgaccgggaaaaccgtgcgcgtcagcgctcaagtatgcgtcatgactga

SEQ ID NO: 144426 - DNA, 1164 bp, Enterobacter cloacae
atgattacgggtatgaatattcaggccggggcaaagatagccccggcgtttatgctcaagctggataacgacgatatcacgcaggattttagtgaccgccttatcagcctgaccatgaccgacaatcgcggattcgaggccgaccagctcgatatcgtgctcgatgatactgacggccagatagctttgccgccgcgcggagcaaccttgaccctgtggttaggctggcaggattccgcgctgataaaaaaggggacgttcacggtcgatgaaatcgagcacaggggcgcgccagatacgctgaccatccgggggcgcagcgcagactttcgcgggacgctgaactcgcgccgggaacagtcatggcatgacaccacgctcgggaaaattgttgagacgattgcggcacgcaataagctgacggccagcgtggccgacatgctgaaagccgtcgccgtgcctcacattgatcagtcgcaggaatccgacgcggtgtttctgtcccgcctggctgaccggaacggtgcggtggtctcggtcaaagcggggaaactgctatttctgaaagccggaagcggcaagacggccagcgggaagcccattcctcagatgatgcttgagcgcggcgacggcgatcgtcatcagtttgccattgctgaccgggaagcctataccggcgttacggcgaaatggctgcacaccaaagacccgaaaccgcaaaagcagaaggtgaagctcaggcgtaagccaaaagagcaacacctccgcgcattacagcacccgaaagcaaccaaagccccggcaaaagccaaagccaaaaaagagcaggaggcgcgcgagggggagtatatggccggtgaggctgataacgtgctggagctgacgaccatctacgcgacaaaggcgcaggccatgcgcgccgctcaggcaaagtgggacaagctgcagcgaggtgtcgcggagttttcaatctcgctggctattggccgtgcagatttatttcctgaaactccaattgccgtgaaagggtttaagcgcgtcatagacgatcaggcgtggataatcagccgtgtggtgcataacctcaacgggaacggctacaccacggatttagagcttgaggttaagatttcggatgttgagtacgagcaagtcaacgattaa

SEQ ID NO: 144427 - DNA, 249 bp, Enterobacter cloacae; identical to SEQ ID NO: 113600

SEQ ID NO: 144428 - DNA, 288 bp, Enterobacter cloacae
atgccagccacccctgagaccataaagtcggaagagaaacagacctatcactaccctctgaagacgaactaccgtgagcacatccatagtcctgagggagtgaacggtccggttgaacactccatgctgatggatatgctgaaaaagatggatgccgacgggcatgatgtgtccggcgccgccgcagaggtaacggccatgctcagctacattgttggtatcggcgccgtactgcgcgacatagagacgcatgctcagtatgtgatggctaagaccaagggttactga

SEQ ID NO: 144429 - DNA, 363 bp, Enterobacter cloacae; identical to SEQ ID NO: 103279

SEQ ID NO: 144430 - DNA, 513 bp, Enterobacter cloacae
atgtatttgagtgagtattgcggaagaattctacccacaggcgaattcaaaagtgatgattttttaatttcacttaaagaagcctttaaatgtcattggcgtaatggtcatcaccccagcttaggaaaagacactctttttgaaaggcctgatgaagttcttaattaccaccttagaaaagttcatgtaaatattaaccaatacgcaaattacaattactcatgtacaaaaaagtgctgggatgaatggtcatatggtttaatagatgaacatgggcgcttcagacctacaccagtaagtaactcttacttgatttatgcagtgaatgaacatcgagatgctgccttattagcttactgggatccaccagctcatactaaggctaatcagcctgtatggatggattcagtaataaacttcactaaagttttccatgataaaactaatacatcacccttccctagagagagtgacccatggagctactcatttaaaattaagaagcccgcatag

SEQ ID NO: 144431 - DNA, 2547 bp, Enterobacter cloacae
atggctaacgaatttcttacgcaatgtgaaatgaccgtcaatacggctgccgggcgcaagctgtctgaggacgaaatggaatcgctggtgcgcgatatgaacgacaccaccaacagaatcttggctggcaacgaagccctgtcattggaagatgcggcgatgcgcgccgcgcaggagcttggcaaccgtgaacaactggcgaaagtaatagaggcgcgcaataaggccattaacacgcgcattgcagcgcagcgccttggagagcttcgccggacgtggaaagaccgcccagatatcggccttgaagctatgctggtggggcgcaacgacgcgcgcacaggatcccgcagatcggtgtcatctgaagtggcgcaattgcgcggtaagtatcacgctggtatcaactacgattttgaccaggcgggtctggttaagtttatcgccagtggtagtaacgatcgtgagatcgccgatgctatgtggcgcatcgggcgcggacagaaaactgacgggatgacacctcaatcagtcagtgctgcgaagatcatcatgaagtggcaggaaactgcgcgtgttgatgaaaaccgcgctggtgcatggatcggtaagatgccaggctacatcgtcaggcagtcgcatgacatactggaaatacgcgctgccggttatgaggcttggagaaactccattcttccacgtctggatgatgtcacctttgacgggataacagaccgagaaagctttttgagtgacgtttatgatggactggcatctggtgtgcacctgacatctgagaagcctgactggatgaatggcttcaagggggcggctaacgcggcgaagcgagctagccaggaacgcgtgctgcactttaaggatggcgttgcatggcacgaatacaacgagcagttcggcacaggaagcctgcgtgaggcggtattcggcggcctgaacagcgcggcgcgtaccactggaatgatgcgtgtactcggaacaaacccgcaaaatatgttcaattatctggccagcaccattgaaaaagatatcaaaaagtcaggaaatcccgcagcattggctgactttaataccaaagtaaaacgtattaaccgcacagtaatgccgcaggttgatggttcgctaaacatacccggcagtgtgggatgggccaacgcttccgctaacgtgcgcggatggctgcgtatgagccagcttggtggcgcggtcatttcgtcttttaacgacgtgcctatctcggcgacagaaatgcggtatcagggccagaacttcatgcaggcgctgaccggcgcgatgaaggggcgtttatcccgttacacaagtgatgaacaaaaggagatcctgtcatccatcggtgtttactctgacacgatgacgcaggagataatccggcgtatgtccggcgatgatagcatgagcggaaagatggggcgcgcgcagcagcttttcttcaaatacaatctcatgaacttctggacacaatccgggcgtaacagcaacgccatgatgattactaactggctggcgaagaatgcagaccatcagttttctgcacttcaggaagatttgcggcgcgtgctggacctgcatggcatcggggacgctgagtggaatatctatcgcaacatggatatggcagacagcgaaggaagaaagttcatgactagcagcggtatccgcggcgtgccagaagatgtgatcgcttcctatgttgaagggaaagggattaaaccaaccgaacgatccatagctgatgccagagatacactggaaggtcagttgcgtggatacgttctagatcggcttaacatagcgatgtcggagcctggcgaccgcactcagtcacttatgaagatgggcacagtgccaggcaccgtcgcaggggaagcaattcgtttcgccgggcagtacaaatcttttactgccagcttcatgcagaatgttcttggccgagaggtatttggtcgcggatacactcccgcaggccttggtgaatcgaaaaccggatcgctgaccaatgcgcttttgcgtaatggaaaaggtgccttcatgggggctgcaaacctgtttgtatggtccacgttgtttggatacgtctcactgcaggccaagttgatgttgaaggggcaaaccccgcgacctgcagatgctaaaacattccttgcggcggcggcgcagggtggtggactcggtatctttggtgatttcatgtttggtgaagttaaccggatgggggcaggtccggtaacgtcgctgatggggcctgcagcttctaatgccgacagcatcatcacgctattgcgacagacaacgcgtggtgaagcagacctgggtgactggtatcgcacctctctggacaatacaccattcctgaacgtattctggctgcgaacagcaatgaacggtctgatattgaaccgtatacaggatgcgcttgacccaggctctttggaacgataccaacaacgggttgagcgtgagcagggtaacgacttcctgatcccaccctcacaattcatgttagggaaataa

SEQ ID NO: 144432 - DNA, 1707 bp, Enterobacter cloacae
atgccaatttatacagatgatccggggcagggtataaaccagccgttgtcgaatgccccatcaggacttggtgaatcgctgctttcctccctgaaagaggggttcaaagaggggcctgttgtgtctggttatcggttttctcaagctgaccaactggcaaatgaccaaaattcgaccatcgtcagcaaatctgacgcagaaacacgccttaaagagtacggcgtgaaaagtatcaatgtgcctgacagcggcgttacgcaaacattcctcgatcatgtgatcagcgagcgcagggaaactctggcgaagcagcagatcgccatgtctgccccgtctggatgggttgccactccgcttaactttgccgcaaaccttgctggctcaatggcggatccaggcaacgtggcgctggctctggtcccgttcggtggtgaagcgaaggcggcaaccatgctagggcgcttcggtgagcgtcttgctaccggcgcgcggcttggtgctgggcaggccattgccacagtacctctgacggcgcaggcagcagcggcagaaggcgatgacttcacctacggcaatgctctggagagcacattctttaacaccattgccggtgggcttatgcacgctggtggtggtctgatcgctgatgtggtgcgctcccgcagggttggcgctgctgaaaatcccgcgacctatccagacgctcagcccgtcgctgatgcgcaaccaacgccagtcgtgacgcctgacaacatcccggctggcgttaacattcctgagtccggcaccaatgccgatctgtcagcggcaatcgcacgggatgcagaatcttatgcctatagccgcgcctatgatgatgtcgttcctgaatatctggccaggcagcaggaactacagaccggacgcatcgacaacgttgctgatcttcgcactgagctggcggccaataaccgacaaagtgaagcgcttgacgctacgctggcgcagcgcacgacggagtatcaggcgcaacgcatgaatttcaaagcggctcaggccaaggcacagcgtgatattcagggtgagaaagacaccattaccgcgcgtaatcaggaaattaaccagacgcttgaacgtaacgccatcgcagagcaggcgcgcggcagagagtcgcaactgtcacgcaaagagatcccggaagacctcgcaccattaatcgaccagcgcgcacagcagatccgcgaaagcatgcagatgtcacctgtcgccggtgcagtgcgtacagcgtctgccgcggtgcgggaggcagactggagcgtaaaccagcaggcttaccgcggcgcactggcgcacatgatggaaggccgctctccggacattgagcctttctatgatctgcacaaaccagcgctacgcgagcgtgctatccaacgcatccagaatccagtgcggcaggctgatgaaggttcccgcgccgtcagtgaaactgcagatcgtgtgtggcaggatacgcagaaggctgaccatgaaatcacagcggccactgccgatctggaaaatgaattcaatatcagtgatgcgctgctgaacgacattgccacagacaacccagatctggctgcgtctatgcgcgagaatattgcttcgatccgtgcagaggccagtgacgactctatcggcaaagcgtatcgcgctttcgccgcctgtatgattaaccgggggttgtaa

SEQ ID NO: 144433 - DNA, 2622 bp, Enterobacter cloacae
atgccaacagtgccaactgtacaaggccgccaggttgaaagccgcggcgtttcatctccgggattccagaccttcgaccagcccaatgttagcgatgcgctggtaaacgtcggcagccaggcgctggatgtgttcggccaggccaaacagcaagcggaccttgcactgacccaagatgcgactcaaaggctttatgctgttgggagcgggttgatggatgatcccaaggaaggtctgatgactctccaggggaaaaatgcaattggtcaggctcctgggtatatccagaaatttgataacgagatgcaaactattgctgtcacgctgcctgagtccacacgaaatgtattcttaaagcatgctcaacagcagcgaatgcaatttgccactcaagcagagcggcatgaattagggcaacgtaggcagtatgagtctggtcagcaggacggttatttatccttgcaagctcagcaagctatatctaatccacagttgttcaaccaatcagctttgaatgccagagcctcaattatggcttatggccaagcgcatggacaaagtcctgaagaaatcgaggcaaactgggggcggtggcgcgaacaggccgcgaaccgtgctagcgaggcatggtataacccgatctaccagcagatgatggggccggaaggaaaaatagaggtcaccaacacgccgcaagaggcgcagctcttttcgtcgattatctggcaggagagtggcggcaatcagtttggtaaagatggtgcaccgctggtatcaccgaaaggtgctgttggcgccgcgcaggtgatggaaagtaccggtccggaggctgctagcctcgctggtctttcgtgggatcgcgacaaatggctgaatgacccgcgatataatgtgcagcttggtaaggcatatttcggcgcacaactgaaaaaatacgacaacaacccggttctggcggttgcggcgtataacgccgggcctggagctgtcgatggatggattaagcagtttggtgatccgcgagatggcacggtttcgaatgcgcagttcgccgcggcgatcccctacgaggaaacgcgcaactacgtggcgaaagttaccggtagcgccggcgcgataccaggcaatgccactattgagaacctggtaaatcagccattctggaatgcgatgagcccgcagaaaaaatcggagatgctgagcaagcagtctggcctctacgatatgcagaccgccgccggacgcgtctctttgcagacacgcatgcaggatgatctggctaagctggaagcggggcaggaagtcaacccgatcacggaacatgaatgggctgcggttatgccactgcaggccagtccttcagagcgcattcagttgcagcagtccttcgagcagtaccaacaggcaatgatgcttcagccggcctacaagacgattgtgcagggttctgctcagcagggtattgctgcggtacaggccatgattccgcaggaatcagactctgatttcaaattcaagcaggggctgtacgcgacagcgcaggccaagcttaatgccacgcttaaggcacgggagtccgacccgggaacctggctacagactcactcaccggtggcaaaaaatgccttcgaccagtacagcaacggtcaggcatctggcgaatggttggtgtcccgtcttcagtctgagaaagaccgcctcgggatccgtagcaaaaaggtactgcctgattcaatggtcaacagcctgatcgcccgcattgacaacaaccaggaatcgagcgtcgctgccattcagcagatggcacagtccttcgggaaatactctggtcaggttatgcagcaggtgcagaaaagcgcctacccggcgttgcaggtcatcatggcgaccaataacccgcgcgctgccaacgccctctggcaaaaccgcagcgttaaaacctctgatctgcgtggcaactttgagaaaaccgacgccgacagcgccgactcatcctggaatgaccaggccaaagactttgctgggacgatggtagtccagcctggcggggccgctgtgtggaacaacttcaacgagcagggtaagcgcctgacttacacctatatgcagcgtggcatgtcaccgagcgatgccgcaaaacaggcttatcaggacgttctcggcgagcagtatcagaccagcggcacatggcgtatgccgaactcagccgggcaggatattcgcgacgttaacgacggcgctaatgagtacctgaaaaacctgtcagcggatcagatcatgccgctgattggtgatgcccgtctgccggatgaggttaaccgcgagcagagtatttcgcgcattcgtgaaaatgcgcagtgggtgacgaatagcaacgaaacagggctgacactgatgatgaacggcctgctgatcaacaacgcgcaagggcagccgatcaccgtgccgtttgctgatctggcgaaacttggcgctggcaatcgcaccacctggaacagcctgaccaaattcgtgcagacgccggttaagtacacgccgggccagtcgaagaattacaccgtggaaagtcagcgcgaaaacctgatcaacattatccagaacggccagcagacgggacgataa

SEQ ID NO: 144434 - DNA, 495 bp, Enterobacter cloacae
atgaaattaaactggctattaaatatcaggaggtggtcatgtcaaaacagtccgtcaaacctgtcttgctcagcgaagcacagattcaggcaatcagaaaaattcaggaacagcagcgccaccaatcaggtatcggtgttgcgccaactatccatgaaatcgcccgggggttggtggacaaagcattgcaacaacatttggggtaaaggctgcaacttattgatgctaatgcaattcaaccaaatgctacgtattcatacagatgctaagcatttaggggttaataaaggtaactatgaaatgaatatcactgacgaagagttgcttcagcaagtacaaacactggctgataaattaccgcctgaagaacgacaactcattttagagttacttcaccgttacagcgctgtctacagcgttgctcaatcatacattccggattatccacgcggtgttttggatgctttatgttttatccaaagaaacaaaccataa

SEQ ID NO: 144435 - DNA, 546 bp, Enterobacter cloacae
atgcccttacccgaacgttttaagccagccaagataaatcgccagaaacttaaagaactagcgaacgcagccgaagaaatactatcgcaaattgataacggggctaaggaagaagataccggactgaaaatgatgatggatgactggaatagacaggtaattaatccttatgagttctctgatttccgggacttttcctcatggaccagtgcaaaggactttacccgggtggcatttaatcaggaaaaatacgttgcggatttaacctgggatgaactcgttcagataattagtttcgtttgcaatgctgaaggcaaggaatcggaacaaagctacgcactgggattgctggagaaaaactttaacgccaatccgtccgacctcatctactggcctaatgaatggttccaggacgaagacatgctccaggtagatttgacgcctgaagaaatcgccggatacctcatagcaaaatctggccggcttctaagcgatgcgccacaaatcgacctgagatacccgatccctcccggcgcagcaagttaa

SEQ ID NO: 144436 - DNA, 339 bp, Enterobacter cloacae
atgcgactgactacagaacagaaagcggagattgttcgccttaaacgcagtggcgtcggataccgcacgatcgcgagtaaaatgggattcaggcccagcacggtgagtagcttctgccagcgcagtggattgttcgctgataatccagctcacagggctctgttcactatccctgagccgttcttttcgagcgtacctgcgttgataaatccactgccactccagaaagtcattaccggccataagcaaactgatgcctacctgtgggtgctggaagtgattcagctgaatgagcctgcgcatctggccgctgcgtggcagtttgaacgctacatgtaa

SEQ ID NO: 144437 - DNA, 444 bp, Enterobacter cloacae
atgacagctcaaatttcagcgtatggccggctggtggccgacccgcagaccagaacaactggaaaaggtacgaacatggctatggcccgtctggcggtggcgttgccttgtaatgcgtcagataacggagaggctactttctggttgggcgtgattgcttttggtaaacaggccgatgcgctggccaaacatcgtaaaggcgaccttgtcagtgtggcgggcaatatgcagctcaatcagtggactggtcaggatggcggtacacagcaaggctatcaggtcattgcggacagtgtactcagtgccagaacggtacgcccaagaggtaaagcgggacaacaggggcaagctacagacgccctacgacgggcccatgaacatcaagcgcccaccaccgggtatgaaggatacgaccagacgccaccttatgacgatgatttttga

SEQ ID NO: 144438 - DNA, 2112 bp, Enterobacter cloacae
atgaaaatggcgccgaacgttaagcaattaccaaaagataagttctcggaggcgataatttttgctggttccgatgcttacgcccatgctcaacactggatcgaaagtgaaggcaggaaacacggcgataatgtgccgcctgtttacttaggtggcaaacaactagctgaactgaataaccttcatattatcgataaaggccggcgttctgcccgtgtttatattgccggtgacatagagcctattttcatcaacgctattggcgaaaagttagcgatggccggcgtgcaggatgcgaaattatataaggggattcctgaccagaagccggagaactggcgggaatacttggccaggctcagagaacgaggcgaacaaacgacgacctcaattctaaaagccaataaatcagtgaatagtgacagcctgaaacctcatgtccaaagccgtattgatggggtgtactgggttgagccacgcacagacaacgctaccggagaaatcatcagtcgtgaaagttggttatgttctgctctggaggttgtcggtattggcattgatgacagtaaaacccggtacctgatcctgcgctggcaggcattcggtgcgaagagtgagaccgtacaggcgatacctcttgctgacattggcgagcgagaaggctggcgaacactcaaggccggcggggtgaacgtcacaaccaagagcggtttacgtgcaacgctggccgactggttgcagagctgtgccaatggcgaagtctggcgcattgcgcacgctacggggtggcagtgtggtgcctatatcatgccggatggcgagatcattggtacaccagaacagccggtactgtttaacgggcgaagttcggccgcatcggggtataccaccagcggtaccacgcaaagctggcgggagagtgtaggacgtcttgcctttgggaattactcgatgatgactggtgtagccgcagcattggccgccccgctgattggccttgctggtgctgatggattcggtatccacctctacgaacagtcgagcgcgggtaagactaccactgctaatgtggcctccagtctttacggcaatccagatgtactgcgtctcacctggtacggtactgcgctggggctggcgaatgaagccgccgcacataacgacgcgctgatgccgctagacgaaattggccagggcgctgacccggtggaagtctataaatcagcctatgcgctatttaacggtaccggtaagctgcagggggcgaaggagggagggaaccgcgatctcaagcgctggcgtactgtggcaatcagcactggtgagatggatcttgaaacattcatcgccagcgccggccgtaaggctaaagcgggccagttggttcgcctgctgaatatccctatgcggcgggcagtacgcttccatgagcatgcaaatggtaagcaccatgctgatgctctcaaagatgcataccagcatcaccatggagtggcagggcgtgagtgggtgaagtggctggcggaccaccagcaagaagcggtaagcgctgtcagggtaacggaagagcgctggcgtagcctgatcccttcggattacggggagcaggtccatcgtgttggcgcccggtttgccattctggaagccgcactattgttaggtaatgtgatcaccggctgggatgagcagacctgtcgggatgctatccagtacagttataacgcctggctgagagagtttggtaccgggaacaaagagcaccagcagattatcgagcagaccgaggcattcctgaacgcctacggtatgagccgctttgcaccgttcccgtatgacccatccagtctgccgatctccaatatggcgggataccggcagaaaggtggccacgatgccgacccaatggtgttctacaccttcccggcggccttcgaaggggagattgcccgcggctttaatgctcgtcagtttgccgaagtactgaagaaagctggcatgctaacgcctccgacgtcaggccgggggttccagagaaagtcaccacgcattgatgggcgacagattcgggtttatgtcctgcagtatttgccggacgatgaccaaccagagtaa

SEQ ID NO: 144439 - DNA, 219 bp, Enterobacter cloacae
atgcgtaaaaacatcctctctactgccatcgctgagaagccgtatttgctcgatgaactcacctacgaaaccgaatgtgtgttggcgattctgcgaacaatcaacgatgtcagtgatccacacaccaaaagctatctcgtagatgcaagtgagctaatttgctcacggttatttgaaaaactacagcacaatgaacgtattgagaatggtgataactga

SEQ ID NO: 144440 - DNA, 603 bp, Enterobacter cloacae
atgtttaacccaattcaacctccctgctcacctgcagtatccataaattgcagctgtaatcacattgcggagactatacgcaaaaaccacttgctggcgcttggtgtattagtctaccctgaaaaggcaccagcaaaatctggtgccgggattggcgtcctggaaaagtacaaggcgacacatgacgcgcctagcgtctttttttgtgtcctcacattcgttcacccttttttcagcgctgcggttataatccgtgccgctcgcagagttatggtgagttggatgggggcggagaaatccgcgccggttaccttgtacgccggttacgccaaccctgttcagctcaccaccagtgaaattggcgtttccggtggtgggattaaatcccagtacaaggaggctgccattatggctactacccctaccaaaaatccgcaatatatctggattatcgccgctgttcgccgcgaaatgccgacaattaagcccaaaatttaccatatcgccgcgccgtctgagcgtgaagcccgcagttatctagttcgtgatcacgtctgttttttcgccggacgcatccgtctgacggaggtgcatcatgcgtaa

SEQ ID NO: 144441 - DNA, 717 bp, Enterobacter cloacae
atgaaaaatattaatgccctcatagggcagggcttaactcaccctgtagacagccagaaggagtttcttaccctacacaaacaggaggtgcgtattgattctcgagtaatcgctgatcgcgccggaatacaacatggaagcctcgttgcgacgattaaaatgcatcaaagcaaattgcgtgaacttggtacattaccacgtcaatctctgaaagagttttccgatttgaaatcgggaaactccaagagtagaggcggaaggccagaaatcagttatctgcttaacgagacacaatttgattacacactccgtattattcgtgggcgtgatcctgaacgaatgaatcagttcaagctagacataactaaggcgctctctaaacgaagagtcgttgaacccattcgtcgcgaatatctgcctggttatcacgaaagccgtgatggacttaaggcgctaggggcgcagcgtcatcattacatcaatttggctcgggccgaaaatcgtgtagctggcttgtcggatggtgagcgtggatccgccggcgagcagcaattagggttactggtagtaatacagaaaattgaacaggcagcatttaacgaagcagtgcaaagcggaatgagtccgggtgatgcagtgcgggaagtcgcccgcagaatggatacatttgcgtcattgctcagcacaaaaccgttactggggggagaaaatgtttaa

SEQ ID NO: 144442 - DNA, 198 bp, Enterobacter cloacae
atgtctaaagctcttatccgtttatctgaggtccgccgcaggactggctacagtaaggcgtggatttaccgactgattagcgaaaatcgctttcctcagccaatcaaaataggtgctcgtgcaatcgcgtttgttgaaggcgaaattgatgagtggatagagagacgtattgctgattcgcgtggtgaggtagcttga

SEQ ID NO: 144443 - DNA, 963 bp, Enterobacter cloacae
gtgttaaatgctgattcattaaaaagatgttatgacgtcatatcatctttgcgggataataagcctttatggatccccaaagctagtttgttaaatgatcttagtttctataaagtaagttataactataaaaccaaaccagcatcatttatttactctattatacatacacactctgaatttgaagagtatatgtcagtggttaaaaaatccattgatggatatgtcaaaatttcagatctggactattgtaatgctgtctggaaagaaataattgatgataaatatataaggaagtcatttaatgatgctgggtttccatttgattgctctatccagcccgatagatatgcaagatatgtgatattgactcggttattagagttatcgaataataaagaaaggtttgattactggcatgcactttacgatttttctaaagtagaagtggaaacttttgaaaatagctatcttcaatttcatgaaaaactcgtgtctattatgtatggatatgtgtcaggagagttacgcactgcctatgttaacggagttgatgcaataaaaaaatataaattacttcttgaaaatttaattgttgttgaaaaggaactggtttttaaatacctgtttgataaaaaaattcatcgagatatcgagtgggatatgattgccgcgaatgaaatcctcgatgttctaataactaataggaatgatgagactctgtcagaacgtgcttttgtaagcgaattactgaaattgtatatgaagtattcaataaatggaaatagaagttttgtatctttagtgtatagatttacccgcgcttctttcatagttaatgatatagaaagaaaaacaattcaacgatgctgggaatcattgtgtagggcgatgcgtgatggcgaacatgcccatgataggtattttaaaatggagaatgaaaccgtttctgggacaaagtag

SEQ ID NO: 144444 - DNA, 1215 bp, Enterobacter cloacae
atgaagctcacagcccgccaggtcgacacatccaagcctaaggacaaaccctataagctgtctgatggtggcggtctttacctgttggtgaaccccaatggctcgcgatactggcgcctgaagtaccgcatcgctggtaaagagaagttactggcgttgggggtatatcctgatatcactctggcggaagccagacagaagcgcgctgatgcaaagaaagtcctcgctgctggtggtgatccgggacaggagaagcaggaagagaaacaagcgaaagagcaggctgtggcaaacagctttgagcgcctggccatggaatggcattcccataaaagcacatcgtggtcagaaggctatgccgagcatcttctgatgtacctgaagaaagacatcttccccttcatcgggcaaaaggcgattacggatatcagccaggttgaaatgcttaacgtcctgcgaaagatggaacaacgtggcgttctggataaactcaagaaaacccgtcaggcctgccggcagatattcacctatgccattattaccggtagagcggagcacaaccctgtatccgatctggctggcgcgctgaagtcgcccaagcaacagcactacccacaccttttagtcgaccagatcccggattttctccgtgcgctaagtgaatacagcggcagcaccatcacccgcaacgccactcgattgttaatgcttaccgggctcaggacaattgagctccgtgcctctgaatgggttgatatcgactttgacaaaggcgtctggaacgtccccgcagagcgaatgaagatgcggcgcccacatctcgttcctatctcaactcaggttcgcgaactgcttgaagaaatccaccagcttaccgggcgagggaagtatgttttcccgggtcgaaatgatgctggtaagccaatgagtgaggccagtattaaccaagtgattaagcgtattggctacgacggtaaagcgaccgggcacggcttcaggcataccatgagtaccatactccacgaacagggctataacaccgcctggattgaaacgcagttggcccacgtcgataagaactccatccgcgggacatacaaccatgctcagtacttggatggccgccgggaaatgctccagtggtatgccgactatatgcaggcgttagaaaatggtgaaaatgtggtccatggctcgttcgggaaacgtgcctga

SEQ ID NO: 144445 - DNA, 393 bp, Enterobacter cloacae
atgaaatctgtaatactgacaacgttaatgctcgtggcggttggcactcaacccgtctttgcggcccaatgccagttcgggtcctgcaacgcagacattgaggccagcagtgaactgctggtctctgcggctcagacggataaagacgcggttttaaaaaaacttaatgacgcatcatcccccagcgacgccatgtctaagcgggttgaatcgtatctgaataatgacaggctaaaggtgaacaccgacagtacccggaaaggtccgggcaatggaatcgtgaagccgacggatgagctagcgccggtaaggcagctgaaagccattcgccccgagcttgtacaaaaccccatcacccagccattggttgccttttatgaacgtatggcctga

SEQ ID NO: 144446 - DNA, 750 bp, Enterobacter cloacae
atgaataagactatcaaggcatcattcttattactggcatcttgtacggcctttagcatgaatgcccagacagtgaaaactgacgtgcttcctgatgcagcactgaagaaattaaaagaagttgggctgtccatcgagcatattgaaccatccccagtaaaagatatttataccgtgatttcaagagaaggcgtgagttacgtcagcaaagatggtgattacatttttaccgggagcttgtttcatgttaacggcaaagatgtggagaatacaacggaacaggcgatactgaaaggcgtcagggagtttgctgctaaaacaaaatccatagaatataagtcggcgaatgaaaaatatcgcctggcggtgtttactgatataacctgcgggtattgccagaaactacatcatgatcttcaatcctatctcgatgccgggatctcaataaaattcctcacttttccgcgtgcaggcctgaactccgtggtcgcggggaatatggcaaaaatctggtgtgcggccaaacctaatgatgcgctggatgctgcaatgagctcgatatcaatcattccggaaggacggcctgacgcggcctgcctcgatattatcaaatcgcatttccaggttgcttcaactattccgcttcagggtacgccaaccatggtaacgctgtcgggtaaacctcagttgttcaccggctggttgagcccggaaaatctggtgacccgcatgggcaccgcacaaaagtga

SEQ ID NO: 144447 - DNA, 516 bp, Enterobacter cloacae
gtgtttataccaccagcagatgatgtgaaacctattcccgttcctgttgaagtctacacacagtgcattaccgatgcctcccgctttttcgggattgatgcagaattggtctttacgctttttgataatgaaggcggaaaagtgggaacgttcagccggaataaaaatggcacttatgatattggacctatgcagatcaattcgtccaatctgccggaaatacgtggccactttccgtctgttacctggcgggtattggcctatgacgcctgtgccagtttctgggtaggtacctggtggctttaccggaaaattgtagaccgaaatggtaatgtatttgaagggattgccgattacaacagcaaaacccctaaggtccgggcgaggtatatctttaacttcatggtcaaatacaatcgccggattcagggccggaatggcatggacgagttatatcagtggacgcaaccaaagacccagtacaacggacatattgtaaaaaatgttccggagtaa

SEQ ID NO: 144448 - DNA, 567 bp, Enterobacter cloacae
atgctccaatcaatatacgaattcctgtgcaagatacgctgttctccacagaagcttagaaataaagacttggacgggatcttgcctcaggatgaatcaacagctggcttatggggacctctgccattaatccatattgttcttttcctggattttgatggtgtaatccacaaatgtcagaatgaatctttcgaacggatgtatttgattgagaagttacttgatgcaagtccttcaatgttcatcgttatatcaagttcatggagagaatgcgggagtattacctacctaaagtcacttttccgctcgccgtacagagaccgggtaattggcgcaaccccatccctgtgtctaccctcggggggaataggggtacgtgcagctgaatgtgaagaattcgtggccaggcaccaggtaaaagcctttatctgccttgatgacgatacgaccctgtttccgccagaatatccgcacctgatccgtacggattattacacgggggttaaagaaaaggacataacggatctgatagccagatataacctactgatggcccgtttttattaa

SEQ ID NO: 144449 - DNA, 3990 bp, Enterobacter cloacae
atggattacaacatctatacagtaggtgatatcgagttcgtgtggtccgcccttaacgggattgccctgattttctcacaatataccggtgtaaaagcatttctcaccacggcagcggtgctggctggagccagcctgttttataaaacatggctttggctgttgaacccgacaaaagcagaggtgccgatattttcatggattcttgggctgattcttttttcgatggcaatagtacgcgtggatgtgactattgaatcggttaagtctggtgaagtgagaaatgtcgatggtattcctgtttttatcgcggcgatgggaactgtaaccactaaccttagccagggcctactcaaagactataaaacggcgtttgatccgctggcgccgatcgactttgccgcaaccacgcttgatgatgacattactcttggcccgatgattcgcttcgttaaattcttacaatggggcggggacagccaggggtattgttcagcgttccccgaaccagttagcggattaggtgcgatgaacgtgtgtgcgacagtgcaatcactggcctataactgcctcaagggaacacaaaactcaagcgcgaaaatcgctgggaaagaaaccatttttaacgatattttctcttcaaatgtcgcggaaagcatggaacgcattaatcaggcgatgaaaggttcgctgaagaacgcatctgctaacatcgtgggtgtgaatagttcaaagtcagcgacttgtgaagaggtctggtcgaccgttaaacaggtaacgagcaccccggaggctcgacagacgattgctttgattgggcaaacaaacggtattcttaccccagaagaggcgggcggtgccgcatccggatcgagcttcacggatgtaatggcgtcggcgaacggcatgtatggcaaggcgattggcgcttatgacgcgacgctttctttgttcatcatgaatgagctacgtaatggtgccagtaaatacaaaaccccacttggtctggcctcggatatgcaactgtttgaggcatcattaaaacgtacgaataccatggcatctcaggggcagctctggctgcaattatctggtgcggcaattgcgtttcttgaaatgtttgcgtacatggttgctccgtttgcattgctcatgctgcttgcactcggcggaaacggtgttgccgcagcggcaaaatatcttcagttgattctcttcgttaatatgtggccgattactgcggtgatggtcaatgcctacgtgaagaaggtggcaacagcggatcttgatacatggagcacactgaatagtcagagtaacgcggtgacttggatgggcttaccagggcttgccgaaacatatagttcttacttatcagttgcatcagcgctctatgctcttatcccagtcctgacgctgttcctgatgacgcaatccattcatccaatgatgaatgcgatgaaaggagttacgccacccgcacctgtggactccagccacctcacgccgaaagtgtgggatgcgccaaatagcggaaaatcatcatttggggatgttaatcgtacagcactgacaagcaccgggcaggggttcagcggtggcggggccatggactccagtaacttccgactcggtacgtggaatgcaggttcaagtatcgcgtcaagccagggacaaggggcggcaatgacctcatcagtcatgagtgcagcaagtaattcattccagcaggcctacaatcagatgagtgaagttggtcgttcggggcaatcgggccagcaattttcctcgaatctgcaaaacttgaaatcatatacagaccaggccggtgcaaacgtcgctaatagcgtaggggcgaagcacggaattaattcgcagcaattagctggtgtggtgtcaaaccttctcctcaatggaagtttgggacttggtggcgaggaaaaacttggaaaagggggggctgggggcataggtcagaaagtgatggattcactaggtctgaaagcatcgggtaccgttggttcagggatctcaaaatcgaattcaggcagtgatagcctcttaactgatttgaataaagctattacgactcaattgtcagaaaactcaggactttctgaacaaatgagtaaagcggcttctcaggtaaacagtgatcagtttgcacagaccaatgcattcaaagaagctgcatcaaaaatgaaccaggcaacacagacaatggccgaaaatctgtcgacgtcactttcaacgaacgccagcgctaataccggcatgacactcgactcaagacagtctgtcaacctagacagattctccgattctattcgtaataaaaacttcagcgatgatgatgtgcgtaattttgcacggaaaaatggtcttgatgagaatgcgtttatggataaattcaattcttacaatgacacatttaaggccagcactcagttgggatcacaactccagcgaactgatgcgctggtggcaacgacacgcgactttagtgagcaaaaaattgcgattgatactgccaggggtgaaacggctgagagcaataagcaggatctgcgtgagacctccagcctgcttaaagggctggttgctgacttcggcggtaacgctcaacagatgctgccaattaccaatcaacttgaccgaatcactggtgatgcatcgggtattaataccattgcacaggcgcaggagcgcacaccagaccatgtagatacctccggcgtaatgagtgccgatcgtgttgctgacgtagggcaaggtctggatgctcaggcgaaagctggattggcacagaaccagcagaatgctaatcaacatattggcggacaaaccgaatcaggtgttacgccgtacaatgtgggctcggtcagtaaagaagatattcagggcattcataaaggtaatgtagctaactcctatagcgaagaaaaccaaagtgttctctcgtcgttggataagaatacccctgtagtgactaatgagaccgtgggaagaattcagggggctgggcaggacgttaagaacgccaaccaaactttcgaccagcttcaaactggtataggcggcaagcatgctacttcaggcatgggtaataccagcgaaaaactgaattctatgtacggagatagccagatacgcgggatatcaaacaacctcccgaattattttgacagggttgcaaatgacccaaccaaaaagccggatgacaaacgggcggagctggccgcacaagccgtgtttacctatggggccagtacaatggcaaccggcgctgagaaagaacaactgaaagcggatactcaaagcctcctcaccgagctgggtcactacaacgttagctgggggatgaatgatctccagagtatccatgaaggtttcaacatgcacaacaaggcttcaggctctcttgattcagcaataagggcgaatcttggtgaaggcggctctggcggcgggatcgttggccaacgaacccaaaccacgattgatacccttgctggtaataaaattgagtccaatacagaacgtagtgtgattggcagtacgcttttatcgggccaggagagtgttgccagagggcttgacgttatcggagcaaaacccgtaaacgacatgctctcaggtattggggtcctgactacgcccgcatctttggcaaacgatgcaacgaatccggtaaatatgccgagttcgttattgggcaaggttggcaaccacctgcaaatgtcagatggtctgagcgcggtgaccagccgttataaggatatgggaagtgatgggatcaagacgtatgagagtgcatcacaaaactcagagcgtgcgattcgtcagcaactgaccgatgatccacgcttcgggtcggataaagcagatgcgttcgttaactttatgaagtcagaccttaacaatacaaacgaaccgtatcagtcgagaatagagagagctgaaaactggctgaatgataataagaagtag

SEQ ID NO: 144450 - DNA, 1416 bp, Enterobacter cloacae
atgcgcgctaacctccatgtttgtgcaaaaaagttacttttgtcgttagccgtttgcacggcgatgattgcaccaaatgccggtgccgataacgccatgcgtaatatttttaatggaatgatgacgacaaccagcccggccagttttgaaacggccacccgtaccggtgtggttggcggctctttttcctaccgcacaacaaacgtgaataccaatttagtttcaatgtctttccccaaagcttccgtcggctgtaacggcatcgatgttttcctcggttcattcagtatgattaacggagatcagttggtgcaggttgctcgcggtatcgcgcagggggccgcgatttatgcatttaatgtcgcggtatcggcaatctgtgctgactgtgctgcgactattaatgatatccagaacaaattgcaggcgttgaacaaatttgccaaagattcctgcaacgctacttactcgtttctttctgaaaatgttggaccacccagccagtatgcgaatgcggtcagttccggcccagcttcaatgcttggtactcttaatggattgttgcctgatttcggttcatcaatgaccaagtcgccagaaactgtgacctcccaggtaaaagcaaaagaccctgaagagtttgctgaaaaattcagtggaaaccttttctatatgtcatttatggacatcgataaaggttctatgaatatcggtggcgtgactgaattatctggctacaaactcgcagagcagctgatgtcgcttgtcggcactgtgattatcaactgggatgctaaaggtgaaaaagcggggatggaagttcgtccatcgacgatgacggtatcggatttcatcatgggtcctccggctggtggctccataaaaatgctcaaatgttcgcctgtacccgatcctgcttcagcgagaaagtcgcaatgcctggttatgtctgaagtgatggatggtggtttcaaaggactgaaggatacgatttcagacctcctaattcaggttcaaacaaaggcaatcagcgatgtcaggatctctgatgatgaattacgcattatttcttatatcggcatcccaacaattcttgattctcttcagacttttgatgtccctgaaggctatgcctatatccaggatatcagtgcaatagcggccaccagccttgtcattaacatgcttcggcaagttgaagcaaagatcagcgctatgaatatccccagtgaatcactttccggacggcggcaggacctgactcggttatctgaaaaccttagcaatcaggtaaaagcagcttacgagctcacccgtagccaggtaggtaacagctctgatgtcatttcagcatgggatgatcgccgattaaagaggaaggcgttcatggaaagtcttcgtggcacaggtaactga

SEQ ID NO: 144451 - DNA, 798 bp, Enterobacter cloacae
atgtcagaatcagataacataacgcgtaacctactcggtaaactattacgtaccgagatttcgattattcgtagttaccgtgcattcctaatgttattgcctattcacggatcttctatgtatcaaacagggtctccactcctgcaacgccgtctatttggaaccgggtttggggcaatggctgataatgcattcgaagttgaaacacgtcccggaagtttcctcgttccacgttctttaggtaaagagatctcgtgggataaattttttatggccgttgttgatggtgacactaacgttatccgtgaatatgacagtgacgatactgacttcggcatttacaatgcaggggaaaaagttactttgttgaatgggcaggaagattgttataatccgagcaaaattcagcagttacgctccaagtgtgtagacatacaaaatgattattttatgcagatcttctttatgtcaatgcttgcacctgagtttgtcagtatattttttggattaaagcctgctaccgtagatgcaataaaagatgttggtgtgtcatcactcaaagcaattaacgatgtcgttctattcccacgaataattgcctttacaccggggttgggggatgatagtgcaacattaaaatctaaggtgtttgcctgggcatacgaattatctgccgacattcgtttgggtaaagttagtgacgacttaatggaactattgcgttacgacactatgtttacatgccaccgtcaggatgtgttcaactctttggcaaataaagtgctcttgaaggattaa

SEQ ID NO: 144452 - DNA, 486 bp, Enterobacter cloacae
atgtctaattcgaaactaataaagtcactagaattatcacgcagtttgatgcgttcacaaatcgaggttctgcgggaggcagctgaagacctttgcacaaattactggatcgagtggaaagaacggaatcatctggagattaatttaccccggcctaacaatacgctaaagcgtgagtatctgggttcgtatgcgccgaaaattgaattaatcggtaatgccaaaaaagttacaatcacctggcataagttcagcccgtttaaaaccaggtctcccagtcatatgtcgaaacggatttctgcgatgaaaagcggaaaatattcgaaaagctgctttgttaatcatgccttctgggaatatgaaatgatcgaaaaaacggagggagtactagaaccctacagagaattacttgagttctatcatactgcgtatatcgaactgggacgcaaaatccgtaaatactcaaaatcagaggtggcacaatga

SEQ ID NO: 144453 - DNA, 723 bp, Enterobacter cloacae
atgaccgacgtaacaattaatgaaagcaagcagaagacacctgatgtaaatgcccgctcctctcagactcctgaagatagccgaagagccacgcaaagtaaaaatgaacattacggcatggcaacagtaactattactccaggcacgccagactttaaccgatttcttacggcacggaatcgttccgtaataagaggctttaatgatgttagcattgctatttcatcattattcaggacggttaatgcggtaaaacaccctgaattggtgcaggcaattcaggactggtttaatgaattgcacgacgaaaacaatttgatgaagcagaatctggaggcccacatcgccactattaaggttgatgaaagtgatccattcttctcatcaactgagttttctccgttcagatttgaatctgtccagttaaacttcaacaaccagaacacgatgcgattttataagcacatctttgaaatgaacaaccttctgacccagatgtataaattcaactctctgggtcagctgccggttagcgattacaacgtaatggcgcacaatattatccgaagtctcaacatgtatatcgaacgggtcaaaaaaacacttaacgtgtcgcgccgtgtaaaaggttcttacagtcctgatgagtttatcgaaaaggtaaaacagtacaaaagcgtgcaggcatatatttctgcggaactatctggtaaacgccaataa

SEQ ID NO: 144454 - DNA, 3036 bp, Enterobacter cloacae
atgaatttcagggcgctattcctaagtatacaaagagttttaggcatcttctccagtagggagaatgatgtggctgagttaatgatgaaggatgtttcgagtctttcaccatttgctcagattataggggatcagaaatacactgtaccggatcacccgaatcttgaagtcctgaaattcattgagtacccaactcggccagctgggatacaaacgtttaatgagcagtctattctttctctttacagagataaactgcactcaatctctatgatgctggcaataagtgatggagacatccgtgaggatgcctttaccttcaccaatctggttttaaaaccattgattgaatacatccgttggattcatttacttcctgcttcagaaaaccaccaccataatggtattggcggattgttgtcacatagcctggaagttgcaatgatttctttaaaaaatgccaatcattctgaattgcgcccaattgggtatcaggatgaagaagtcattcgccgaaaagtatatctctatgccgcttttatctgtggccttgtgcatgatgccggaaaggtatatgacctcgatatagtaagtctgaatctgaatgaaactttaacatgggcgccaagctcgcaaagcctgcttgactgggcacgtgaaaacaatgttgtcgaatatgaaatacattggcgaaaacgcattcataaccaacataatatatggtcaagcgttttccttgagagaatattagatccggtctgtatgtcattcctcgaccgtgtcaaaaaggagcgcgtctatgcaaaaatggttacggcactgaatgtctataacgatggcaatgactttctgtccaaatgtgtaagaacctcagattattattcaacgggaactgaccttaatgtattgagggacccgataatgggtctgcggtcgaatgatgctgcggcaagagcaataggtaccattaagcataacttcaccagtattaatattaataactataaatccaaacccatgcacatcattattgtaaacggtgaagtttacctcaatgaaaacgccttcctcgactttgtacttagtgattttgcggcccacaagttcaacttcccacagggggatgcaggtaaaactgtactagtagagtcgctggttcaacggggttatgttgagccttacgatgatgagcgtgtggttcattattttattcccgggacatactcggaaaatgaaatagccagcatcttccgaaacggtatcggtaagctggaattttataatctcctgaaacttcgctggatcgggttaatttttgactcatataaaatcccggattctgttccgggcctcttcagcgttaatgcaaataaagatttcatctatattgatgaacagaaaactgtaacagaatacagaaggccggtcccgggtcgtgagtctgttaccagagtaacggacaccgtaagcgacgccattgaagatactccacaatacggactcaaactcgtgaacggccctgatgccgacagtgtcaacggtaaaagcagtgaaaatactgaagccatcacagaaagtgtggaggcggctggcacggataaagcaaccgatattattgatccgcaggttactacgccaacagatacagccggaacaggcggcttggatgaaaaggaacgggtagaggaacatgaagagcagagtcagatgcgtctggtcgagcagctgcatgaaatgcttctgagcgccccactgccccacaacgcagtcattaatattgattccgtaccttaccttaatctcgatgctgctattgcgttaatccctggtattgatgaggcggcattttgtgatgggccctttttccagctgacgtaccgtgatggatcactggatggtatgtggatagtccgtgacgtaaacaatctacgcctgatacaactgggggataactgtgctggtattcaggtgagcacctcggaaccccgaaccacttctacgctgaagtcgctttttgatacgtcaatgtaccagccgttggatatccctgaaagtccatcattaaacgaagcggtttcgcccccacaaacaccgcttgatctccctccggcgcgactgaataccccccaggctgtagaggccaattcggtagctgaacagattaacgccaactccgaaccggagaccgtcactgcttctgagtatgagcaatatggccacctgctggaagaaaccctagatagcgatagtgaggcatattctgactttatagtcgccgacaactctgtggttgaacccccccagcctgaggcgaaaaatagcgatgtcgccgaattccatgatgaaacagaccaggtcgttgcgcccggtaaattgaatgatcctgaggataccagagagccaccagctcccaatacaaccgggaaagaagtaattttaacaagtcctgtgtcatcacaggaccctataaaatcggaacccgccggggagaaagcgaaccatctatctccggccctggctcgtctgtttgcggtaaacactcaagcagagaagaagcatgaaaatccgccggtcacgactccagtgaaagaagcctttaatcgatccaactctgccacagttcaggctcctattgccgttgaccaacctggtgcagaagaaaaggagacactggaagattttaccctgctaagtggcggtgaagttacagaacttgaatacgtcgaaattgccacaatgcttcaccacattctgactaagttatctgggtcgtttaaaagaaagcggaaaaaccgattcatggttttgacccagaacaccttttttctgacccagtcatgtgttgaaaaatacgggacgcagttaaatgcgcctgagctttttaaccagcttcctcaataccaggtcacctccggcgccatagtcaatacaaaatgtttcgcattcaacatgccaactctggtagccgcatccgaccgggcaaaggtcgatattgagttaatcattaacacacttaaagatgtagggaatctataa

SEQ ID NO: 144455 - DNA, 2085 bp, Enterobacter cloacae
atggcaaaatcaaaaaggaccaacctgcacgcccaggaaaacttttacaggccgatattggagtacagaagtgcctcagtacttttaatttgcgccataataatgctgtttatggggtttcgatcagatgggttgaatattgcccccatcattttgtataccgctgccttcatgcttttggtttgtttgtaccgctgtaaaacggcatacccttatttgatggcgcactggcgcgtgtttcagcgccagattatgtttattagccttaaatcgctcaggtcgatcaacaaaagtaactttttctctaacgagcgaaagtaccgccagctggtacaagagtataaaaaatccaaccgtcaggtaccggacagaaaaacctacttctgtaacggctttgaatggggtcccgagcatgcagatcgcgcgtatcaaattgccaatctctcaagcgataaaagagagatagccctgccatttgccctaaaccccatagcgcgtcattttgaggcgatggccagatccatgggtggcagtaacgccatttttgctgttgataaacgggcgccaatttttgttaccgaagataactggttcggccataccctcattaccggaaacgtcggtaccggtaaaacagtccttcagcggttattgagcatcagtatgctgcatttaggccacgtcattgtggttattgatccaaagaacgacgcagattggcggcagtcacttatggatgaagcggcggaacttgggttgccattttataagtttcaccctgcccagccttcttcttcagtgtgtattgatgtctgcaacgcttataccaatgtttcggacctcacctcacgccttcttagtctggtttcggttcccggggaagttaacccattcgtacaatatgccgaggctctcgtttcaactgtgatcaccggtctgtcttacacggataaaaaaccgtcgatatatctcattcataaaaacatgaaaagccacatggcaatcctgaacctcaccgtaaaagttctggaatgctgttatgcacggcactacgggcccgatatatggatggaaaaggtgaaatattcttcgaatgatactctacaagtccgctttaagcgccttgttgaatggttttctgcccacttcttgaattatgaaggtgccgagcctattgattggattgataccgtcggccggttagtagattattctttgtctgatcctgagcacatgtcaaaaatgacagcgggtattatgccgctgttcagtcgtctgaccgaacaaccactgaatgaattgctttcgccgtcacctaattcactcacttcgcgtgaaatagtcacttcagatggaatattcagtaccggaggtgttctctatatctcgctcgatggtctttccaacccggaatccgcccgggctatttcgcagttgataatgtcagacctgacgtcctgcgcgggtagtcgctataactctgatgatggtgatatgtcctcacattcaaggatcagtattttcgtcgacgaagcacactccgcaatcaacaattcaatgataaacttactcgctcagggtcgtgccgcacaaattgcattgtttatttgcacgcaaaccatttccgattttattgcagcagcaaacgttgagactgcaaatcgtattacgggtctgtgtaacaattacattagcctgcgggtaaacgacaccccaacgcaaacgctggttgtagaaaactttggtaaaagtccaattagtacaaatatggtcacgtatacgacaggatcagaaaccactttgccgcataataacttctctggttcgatatcagaaagaaagcaaacaacgctggaagaaagtattccgaaagagcttttaggccaggttccaaaatttcatattgtggccagacttcaggatggtcgtaaagtcgtcgggcagatcccgattgccgtaagtgaaaactcgatgagacccaatacaacattattggagatgttcctgaaacccgccggaaaagtaactttgcgtcagaatgtgggtttagactatttaaataaacatctaaggaaattgcattga

SEQ ID NO: 144456 - DNA, 1104 bp, Enterobacter cloacae
atggacgagcaaattactctgacacaaaatcaaattttcagttcatctctgaaagtcagtaaaagccgttcgcttgttaaacggcgtatgcagtcattaggcctgaagtttgccgattcgcaggatgttcgtgaccgtctggcagggattgaaaaaggtgctttgaaatctgtggggcaattttgccatgacaacgatgctgagtctttatcagcgctggctattatcctttccgagctttttctgctccaaggggaactgtccaccagcaatgaatacggtgaccatgaaacaagttactggtccgtagctcagggaccttgtgatgaatgggttcagtctcttcttacgagcgaagacggacagcgaaaatttattggttttcgcattacattcgacaattctgaagagcgccgccgccttgttgataaaaattcaaaaatgctggggagttatttacttccctattttgtcaattttacgagtgctgcatcggcgtttattacgctgcctgacagcgtcacgtttaaacaagtacaacgcaataagccactcattcaccctgaaaccacattaagtcacattcttaccatagaagactcggcgtttctctctcgtatcaaatttaaactaatctcggcgattgaccgcctgcccgacccgaccgggctgtatgccaatatgttcaaccacattatggaccgggcactattaacacacctcgaccgggagcaaattgatagcccttgtgtgtgcaaaaaggtcatctcaacctacgcagacaccatgctaacgctcccggtatttaatacagggatcaccgggagataccgacactggacgccctgggggattaattttgttgagtttagccgtcaggctgcaaaggaaaaagcctgtgtctatgttcctgaacccggtcaaattcattggaaaagtccggagcataaggaactggctgagttcagcctgatcaaccacataatcccgcagcaataccactggttgctgggtgtgccaacaatctggcgaagccactaccgtgaccatggcgaccgattagacttattcagggagtggagggacgcaaatggctgcggataa

SEQ ID NO: 144457 - DNA, 663 bp, Enterobacter cloacae
atggctgcggataattctgcacgggcagtattcatcagaggactgctttttttagggatgatgctttatcttatttatagtctgggcttccagaatactgacgatctaaagcaacaaatcactcaggaggtgaacgccagtcgtagcctcatttctaatgaccggtggttgtcggttattgcaaatagtgaagctactttgtcgactctgattaatgactataagctgatcgaatatctgaatacgatactgatcccggaaacgacgaaacctgcgcgtgggctgaattacgttgcagagaagatgtcatcggtaaactacactgtggcaaagaatctccccttgctcatttatcagtccattttccgctggaatctgatactcggctggctgattgtgttttcaccttacttaattgctatgctcgctgacggcatgtatcaatggaaattaaaacgttacgttttcggtaatgtaaccgttcagttttacaggatctggttcagagccttctggataattggtgcattaacctttgtttacctctcaatgcctaatatgtctctttttaacaatatcgctcaactgttcccccctgtcgcattgctgatattgggaattgcactcaaccgcttgtggtctaactttcaaaaacttatgtaa

SEQ ID NO: 144458 - DNA, 1182 bp, Enterobacter cloacae
atgtttaaccgtaaaaataagaagtcacctgccaatatcaaagaatcgcttgatgagaacgctgaccgtttttataagatgttccgaatccataccacctcaaaagtggttatttcccttctggcattagcagcagcaggggtttcggcctttaatatttacgataagtatcaggaatcagaaggacgaatggatcatattgccgtcgtgcgcatatcgggagaaatgggcaccgggtcagaggccggtgacggttctgtgatagccgcagcactggcaaaagcgtacaacaacccgcatgccaaagctgtcattatcgaggcggagtcaggtggtggcggaccttcagacgcgattattatttatcgccagattaatgcacttcgaagccaccagcagaagattgaacgtatttcacatgcggaatccgcaagcaagacccgtaatacgggtgataccagtgcttcacgctcgcaggacgatatcaatgccgaacaatcgaaacgcaataccctggaggtcctctccgccgggagtggccgtttcattgccgatatggaaaccagctataagcctattatcgttagcgtcaaaggcatttgtgcttcagcgtgctactacgccgtgtcccctgctgacgccatttatgcagatagcagcgctctgaccggctcgatcggcatacgaatggatcactggaacctgtcccgcgtcatggatacggtcggtgttaaaaatgagccgctcacagcaggggaatttaaagctgcactcgacccttatcatccgctttccgaggccacccgggattttatgcagaagcaaatcctggattccatgcatgaaaaatttatttcggacgttgagcaaggccggggtaacaaactaattagccgcccggaggcaaatgctgtcgctctgtattccggccgggtatggacaacgcagcaagcaatccagtacggtctcatcgacggtgacctgacaccagtcgaggtccgttcgcgtctgtctcaaatgtattcgaccactacattcaaaacgtacaacgagccgcaacgatcgcttcgctccgcgctcggtatgttaatgagcctgtcaaccaacatcgaaacgctggcgggcacaacctcccggttacttgattctgttcaggccaccagctatccgacggtgaaataa

SEQ ID NO: 144459 - DNA, 714 bp, Enterobacter cloacae
atggcgtggcgggtgatagcaataagtattattgccctggtactcattgtgctttattgcttgatgggattcgtatcgtcagccattgctgaacgcaggacggccaagcaaattgaagcgtaccttcctgatgatgcagaaggccttctgagcgatttaactctgccggttagtgccactggcaccacgcagattgatcacgtccttatcgcctctcatgggctctacgtcatcgagcagaagaactatgctggaaagctctatgggaagctggatgaaagccactggcgaaaatggaaatcgtcagggacactaaagttacaaaacccgttcaggcaaaactacggtcacatcaaggccattcagtctacattacgcgccagcgaactggagtgtatcaatgttgtcatcattaacgggccctgcaagtttgaaggtgagaagccagactggctttgcatgggtatgggtgattttgttcggaaagtcactgagcggcgccagttaactgtattcaagcctgaggcagtaagttatatccgtggggagctgaagttaaagagaaagcctcctggcctttatactgatctggaccatatccacaacgttaccaccagatacaaaacaactatgcgattggagcagcgtattacctataaccttttgcgctttcttcggaatctaccgggtaaaatattcggttcgacaaagtaa

SEQ ID NO: 144460 - DNA, 360 bp, Enterobacter cloacae
atgacaacggccaacgtaaccaccactactatctaccgctccgatgatattgtgccttttcgtcggccacagggcgttctggataatcgttatatgccgcaggcttatgctctggtacggaactgggccagcaaaccagcggagtacggttctggtgttctggcaacctacagacaggcggtagttaatcttgcgtatcaggttaaagggactcgtgtgattttaattctggttcccattgaatgtgagccggttggcgtaatcatgactgacacagtcttatggccgtcgctacccattggggaggtcatgcaaattatgcaggaagcatggcaaaatattccggtgttgaatccataa

SEQ ID NO: 144461 - DNA, 315 bp, Enterobacter cloacae
atgaatacttttctttacgtactggtaggctggattgtcgtgctgtatctggttaataaagtgcgcgaaaaacgcagcaaagcgaaagcggttaaaatcctggtgaaacgcaatggcgtttatcaagaagtggatgccgtaatgttgcccaaataccaaggcagcgatgtgagtacagttaagacaggcaatgaatcagcctcgcaatggttgaataaagaggatgatattactgaaccggagtactacagtggcgcttcattattgaaggcaacgagagattttgaagctcaacaaatggaacaaaaattctag

SEQ ID NO: 144462 - DNA, 237 bp, Enterobacter cloacae
atgagcggatttttcagcaacgaatcaccgttatcactggctcaagcccgcgccgttgccgccggttaccagaacgtctttatcgaaaacctccagccagcaggccatttccagattgccatccgtaatcatcgcgaccacgatcgccagctgatctggcgtaactggaattatgaacccgatgcctatgatgcgctcaatagccacctgcaaagccacggactgaaggccagctga

SEQ ID NO: 144463 - DNA, 546 bp, Enterobacter cloacae
atgaaaaatcttaatattcagattaacgacatcgcagcaattaacacacttggtggatcaatgctggcggatatcatcgccacccaatataaagtaattggtgataacaaagacactgcggaaatgcctatgccgtgtattgcttacgggcagacccctgcaaatatcgacccaggcgtcttcatcaaccgtgtgtactgcttggacagtcaatcgctaagtgccagcctgcgttacgagctgtttaacggacttgcgaaccaggcgtttaccttcttctgccagtcgggctggtacggtgcattccgggtggtgtctttccgtgataacggacctgccggactccttaatatcggcattgtccatgagaaggtgttaaacgaattttgcgccgattttccccgggctaatgtcagcgaaaccggctttaactgcggcatgacatttgaccagatccggatgtttatttcagaccgggcctatcagatgccgctctacaacaaccaagatcacttcgttaaactcgcgaaacgccttgtggcctga

SEQ ID NO: 144464 - DNA, 438 bp, Enterobacter cloacae
atgtacagatatgacaggaaccggcagtcgttcaacctggtcaatgcgcttcagccggtctatcgcaacaacggtggcggtttgtttgagttcgaccgcaggaagcaacatgaaacggctgatctcatcttcgaggcactgacgttttcccaggcgcccgaactggagctggcgaaatttgtccgtcttaaatctgtgcgccgaattgcacagtttgacgacggtgaagtgcgctatggcgttcacgttgaactggccgacgctgttgataataattccttcagaattttcaaagatgataatacaggtggatttgatttttatttattttctacttcaaataatgaagcagagcttgtccgctttaatctggatatctgtggtattcatttacaggacatttttgaacggtcaaccggcttgtgtctgtcgtactga

SEQ ID NO: 144465 - DNA, 297 bp, Enterobacter cloacae
atgaaaaccagtctggcttacgcatctaattgttccgacgctctctattcctttatttacaaggcactgcaacaacgctcaggtgccgaaaatgaaagtctctatcagcaggctatttcagcgtgccgtactccgaagcaaaaaaagaaaatggccggttactacgccggtccgtggcagatgctgtttaacgcctggtgttacaaccgcctacccaacattgccgtactgcccgtgttggcacagcagtgcttatcctttttgcagtgcgaagaactgatcgccgactggcactaa

SEQ ID NO: 144466 - DNA, 282 bp, Enterobacter cloacae
atgaagaatatcgcgatcaacgtcagcacgaaggcaccattgcagacagttaaggaccctgtgacccgggtcagcattcagtgtacggcgaaggatgagaagggcgaagacgtggaagtgaatattctcgatctggagcagcaccacaccaccaacgaaattaaagtgacttttggcggctccccctcccaggcgctgaccatgctcagccgggtgatggacgtgctgcaacagcaggcggacgcagagctgcaactgaattcttacgctcgtttgcagtaa

SEQ ID NO: 144467 - DNA, 1206 bp, Enterobacter cloacae
atgtccactatcgaaaatgatgtaaaaaccgctaacaacgatatcagcctgcgcacttacctggagcgttccggtaacggcgcacgcaaaagcaatggtctggtcatcaacccggcagtggtcgaagaggaagaaggttttaacacccgtaccgctggcatgggagaaagctactactccttaccccacgtggtagcccacctgaacagtcttaaagagtcctataagtctgagcctttaagcgtaccagctatcgtcgtgcaggttctgaatggtcgtcctgttctgcgtcagggggcatgtcgtatccgcgccgccgctatggcaaacatcgagctggcagaggaagggcgtgaactgatttcgttaattcgctgcgaggagtttcgcggtagccgcgccagtgccgaacagtttacgctggacggtaactctaatctggctctgtctgtcgtggctgaggcgctctccatcaaacggatggtcgaagatgctgaagaacctaaaacgttcgcagaactggccaagcgtcgcggtaaaacagaacagcacctgcgtcagatggttcgcgtcctggacctgcctgaagccctccaggttatgctggtgacaggggaagtgagcatgtatgtcgcgctggatgaatatctctacagcggcgataaggccgtgaataatatcaccaaagccatcgacgtctatggcaaggctacggccaaaacccttaaattcgtcaaagctggcaacattgatgcagccatgcagccgaaagcgccggtcgtgcaggaaacgaacgcaaacacccctgaaaccaccgtgacggaacaaacatccgtcgaaggtactacggatgagaccaccccgccgcagctggtggacgggaatgttgggaccaacccggagccaactccggaaaacaccccggagccgaaggcgaaagatccgatcaaaacgccagagcctaaaactgtatcggtctccagcgtactcaacaaaaagaccgtgacgacgattgcggacacggcaatcccgcttttttcgcgtattgcggaagaagcagaacaacgtgccgctaagaacctcagcgacgatacgtacaccttagtgctgaccaatgatgagatgaatgccatctgtgaagcccacggcaatctcacgcagtacctgcgtaagcatgccgaaaagcagcaacagggccaggcatga

SEQ ID NO: 144468 - DNA, 195 bp, Enterobacter cloacae
atgattaaaaaggaatgtatgaaagaacgtacacaatccccgggtgagtcgtttgctcacgctgagtttatggagaaagtctttaccaacttacggatgttttgtgacgccgaataccgacggttagccacaggtgagaaagaaacccaacagtcgcaaccggaaaagaccatacattcgcattatctcgtgtaa

SEQ ID NO: 144469 - DNA, 384 bp, Enterobacter cloacae
atgacccacgatatcgacaccctcattcgtctgtcccagcataagtcccacatcgtcgctgtacgccgcctgcaactggcctttgagctagagctgcgcgacgcaaaaatcaactcacgtgacgtcgctgatgcgctggctaccttgaatgcggctatcagtctggaagaagagctgaacggctctgcgtatgacgatctgcattttgacctgaccgatggcgcgaaagtcgacgcagccgaactggcagcgtaccgggcacagaaaccggtggcttcctgcatcgtggccgatggcagcattgtgccagacggtttcggtgattactgcgagccgctggcagatggggcgcatgacttgtttgtccgtccggtctcggcataa

SEQ ID NO: 144470 - DNA, 255 bp, Enterobacter cloacae
atgagcaaagagactctgtcactggcaacccgttacgcaggcaactcctctgtgatttcggaaatgcagacagcgctggacgtaatgccgctggtgacggaagccgttcagagcgtgtgcgaacgggttgaatgtgagcccactgaatttctggacgcgatggcgcttgtaaaacgtttcctgctggcaaaacaagatgaactccgtgcggaaagcgtttcaatccgcaagcagctgggtgagatgggggaataa

SEQ ID NO: 144471 - DNA, 414 bp, Enterobacter cloacae
atgattaaggctactatcagcaacgatgcgcttcgcacccgtattcaggcgctgcgtaaaaccagtgcaaacacccttgtcagcacgacgaaattcgacgctgatgcgctggaggagctcctgcgcctgcgtaccgcagtgaagctgagacgagtacgcgtggtccagagtggcacctgcgactgcgaggagccctgtgaatgcatgcccgggctgtatgtaaccgtcgactccggcgtgggtcacggccaggcggtctggacttaccgggacgacggaaaatccggtctggcgtactggtgcgaatttatgggactcgctccattctgggccgaagaccagatgaatgccgccgaactgcttcgcgagaagctggcctggctgggtgaacatgtcgaggtggtcccgtggtaa

SEQ ID NO: 144472 - DNA, 132 bp, Enterobacter cloacae
atgaagctgtattgccccgagtgcctggcgtaccttgaagggggggatggaacgctacaggactgtcactgcggctggaaacagccggtcagctcttccactgaagagggcgatgatcatgacgctgactaa

SEQ ID NO: 144473 - DNA, 282 bp, Enterobacter cloacae
atgacgctgactaacgcccaaatttatactctgcgtcggctgaataccggaacccgctacctgatgcagggcaacggaaagaaagggatggagcagcgtccagattgcctcagtacgctgggatattttccggttaatgcccccagtctgccgcccctcttccggctgggcctgattgagttcactctgaaaagtgggttagaacagagctgtttctatcgcgtacggctgaccgggcgtgggcaggagttagccacaacggcggtgatctcggtgggctga

SEQ ID NO: 144474 - DNA, 555 bp, Enterobacter cloacae
atgaaaccgatgcttaaatccgctttcttctcagctgttaaatcactcctcaccaacggcttcagaccaaccttctacaccgttaactgtggccgaatcggcattatcgcctttaccgataaaaacggttctaagcaggttgaacaggtctattcctgtacctcgcttgccgtgaagaccattgctccccgtttcgaaaagtggtttgctgctgccgtggcggaatttcatgcggccgcagctgagactctggagtcgggccagcgggtcctggacaagggtactgttcgtaccgtgacgggatttcgaagtgcattcatccgcagcgctaacggcacaccccgtgcccaggcacggactggcgtagtcatgcttgatcatcggcacgaagttatggccggtgatcttgttcgaatggctgacaatccatcagacaccgtcgtccataatacagaccaacagcctgaccagacaattcattctaacgtgcagaacgtttccgtaaacctcgccacaggactggcccctgacccgacggtttcaacagcgacatga

SEQ ID NO: 144475 - DNA, 312 bp, Enterobacter cloacae
atgacacggctgcactctccccctgggagccgcactacgcggctctgtttgaccgagaacactatgaccgataacaatgaaaagcacgttaacgcgatccatatgaagggcaacgataacgcgaaaaaagatgaggccgacaaagcaacggcactggtccagatgcgtatgaccccggagaaaaaatcacgctatgtccgtgaggcgaagcgtaatggcctgactatctcggcatggattcagcgtcatatggatcaggtatgtgatgagtcagacgtaaactatctaaagaaaaaggctggcgagcaatag

SEQ ID NO: 144476 - DNA, 333 bp, Enterobacter cloacae
atgaaactttcccgccagaccacgaacgacactgctgttatcgaaggtacccgcagccacttctggggtcgctcgctctacttcatcattgagaatgcgcccagggcacacctcgtcgctattgatgaattgctggatgcagcgggttgggaaagcgatcactgtccaaactacgaagatgacgatgcgtttgggcatgccggttacagctgcgggtacatgattgagatcgatgacgtggcacgcttcagggctgactataagcgcctcaaaaagcagattgccgcccatatcgccgcccagcgtaaagccgcagccaaacagacggcatga

SEQ ID NO: 144477 - DNA, 570 bp, Enterobacter cloacae
atgaccgaacaactatcggatgaaaaactgcaccagctggaaggtgctgccgcaaattaccgtacgacataccaggcgcacctcgctaatccactggatggctccgcagtacaggactgggatgaagcgacccgtcaactaatggcggtcatcaattacgatgaagccaatattatcgcgcacctactggctcgccgggatgcagatcttgccaggcatgaaagcgacatgacccgggctatcgcagcttggcagacggcatccgtgaagctgtccgagcaggccagccagcaaccagaattccacctccgccgtgttggtggggacgaggagctctatgccccttgtggaaaagattatccacggggaagagcgtactacgttaagccggtagtgagcctggttaccgtaaattgtccgccctgcgaccaatgctttgattctgccgacgccgcaacggcctaccgggatgagcagtggagacatgtgctgagtgaagctggtgtgctggttacgccgggggagacagccccggttcagcccactgaagacaagccgctttccaaatag

SEQ ID NO: 144478 - DNA, 363 bp, Enterobacter cloacae
atgaaaacgaagatgaaacagcccaaatctgcacttcagaatgcgatgaagggcgaagagcctgcgagcgtacaaattcagatgcgtgccactgtaacaagaaaagaacgctataaggcgcaggcaattcaggaggatctgaatttaaccgaatggatggcgaatcatctggacgccgtctgtgacgccgccgaaggaaaggcatccgtcagcatcttttccccggttgtaccggagaagatcccagacagcgtctaccaggtcatctatcaggaatgcggcgggttcgtggactgcgatgcgaatgcccagacgatctggaatgcctgccgccaggccattctgaaaaacgtgaaagactga

SEQ ID NO: 144479 - DNA, 207 bp, Enterobacter cloacae
atgaccataattgaacgccgtgcagagatgcgccagacggccattaaagctctgctggatgctgaagaagcactgaccgcactggctatgtcctatgagctacagcccaatgagaagaccagtgcatgtcatccacaaaccagtactctctccacgaccagccaggttcggaaattgcggcgggtcctcgaaaaattgaggcgttga

SEQ ID NO: 144480 - DNA, 159 bp, Enterobacter cloacae
atgaaactgccgaaccaacccgttgttttgtgcgtattgatagtatgtcttacgctgttgatattcacctggcttacgcgcaattcgctctgcgaactgcggctgaaagactgtacgcgggaagtgtcggctgtgatggactacgaatccggtaagtag

SEQ ID NO: 144481 - DNA, 606 bp, Enterobacter cloacae
atgaaccaaactgaatcggacccgtccggatataccgcaacaacggtcgatgaagaacgcatggccatcagggaactgatcggcgaagtggtcggccgctaccgtagacaggtaccgcctgatcgcgtccagaaagctacttttgaggtgaatggcgggctgctcatggggcttttgcttgctctgctgatgctggtatgtattatccagcgtgtggcaactggcgaccgactgatgagctttaccggagagcctgacgtccgggatattcagtttaccctgatgctggtcatggagctcgcacttggcattgttgtctggttcctgattgcgacgggggactattcgcgtccctggctctatcgtcttactccggcaaaacccgtctggctttttgatgaagtggaggactccgatttggtgctgctttccagcaatccctttatcaaacgctggcttcacgaggaactaacgaaaatcaggcgactgacgtatacccgcctcgatgagaaactggagaaaatcgcccattacccggatagcctaatgcacagttgtgttcgtgctcaccgtttgtcactgatcgcgggttcgaagactgactga

SEQ ID NO: 144482 - DNA, 282 bp, Enterobacter cloacae
atgaaactcagtcagttggaggcggggatgaccgtttggtcactcttccgaaccaaaatgggcaataccaccattaagacagtaactcttcattctgtcgttattcaggaggtttacgataaccacgttatcgccagctggaaccgcaatgcgccgcgtcggttcggggaaacggcgataagtagctggaaaaaagataagccgctactcatccgcgaccgttccggaagtgcccgtttggcgacgcgggaagaaaaatcccgaatattggaatcaaaatag

SEQ ID NO: 144483 - DNA, 354 bp, Enterobacter cloacae
atgaataagtctctggtcagctttgcggaattatccggcgatgctattaatcttgcgcgacagtcggttatcgagatggaaatgaccgctgcccgggaaaagattggaaaggctcgttcgttattccgctcaggtattcatcgtgctgttaatggctatccgctgattcagtcggcggctaaccagatgagcgtcattaaacgactccagagcgacacagaatatctcgatgcctgtattactgagaatctttgtatgttctcgacagagggttatctgtacctgtttatgcaacgccgcttcattaatgaacccgtgtctgaaggccgggaactgaacaatatttccatttaa

SEQ ID NO: 144484 - DNA, 252 bp, Enterobacter cloacae
gtgattattaacgcttatggcgactggctgaacaggagaagaacattgccccatgttgatcacacccggacgctccgggtccagctgtacgatgccagccgctttcatgatggcgcgacggcggaacaagctggcgaactgcatactgtcgcattcagtaaacccgcgattaccgatgatattcagaaaattgtggataccactgccgaggtgctcggtagacgctacagcgttaacgtattctcaaactga

SEQ ID NO: 144485 - DNA, 225 bp, Enterobacter cloacae
atgcacaacattgaaatttctaccgtcgccattttcagcgcccagtttaaaaacatcgaagacgccgagaatgccggggccctatattcagtcgacatcgaatatccgatgacgctgaatgacctgtcgctgctgtgtgaatccgtagcaaaagccgttggtgtccctaatggagtaaagtaccagtttgtcactcagccgcaaccggaagaaagtgattattaa

SEQ ID NO: 144486 - DNA, 204 bp, Enterobacter cloacae
atgaaattgttttatagcaaaccagttcgctttatcgtcattatctgtgtatttctcctcggcgttgataacttgagcgatatgttcgccgatgtttcccgatctgtattctacggcggtctcgctgctctccttgcaattgccgtcgtcattgcccgagttggttacaccaaaaatgcggacaaggccagccaggcgcagtaa

SEQ ID NO: 144487 - DNA, 294 bp, Enterobacter cloacae
atggctgacacaaagcgacctatttccccgcttacacaggcccaaatctatgtgttgcatcgtctggcaagcggaacgcagtatgagatctgcggtgaatttcgtcgggcccgggaatgccggatgtataggggggcatcggatgatgtgcgatgccgtagcaccccggtcctctttcggcttgggttggttgagctggccaatccgtcccagcggcctttaccgggaagttattatcaggtcaagctgagcgccactgggagtgatctcctgaggtccatcgaacgcgactaa

SEQ ID NO: 144488 - DNA, 492 bp, Enterobacter cloacae
atgagcagattaacattcgagatttcaggggtaaaaaaactgcttaatgaaatccagtcagcggatcaattccttgcaaccgttgatcagctttttgagccaacaaattatccggggggggtgcctcttaacgaagctggtaagacggaaaaagaagcttgcctggcaggggaagttttctggccatcgccaaagcatatggttcagacccgtctgacccctcagattactctggtaaaaggccatggcgtctgtctgattaccaatgcttctctggatggaagtcctgtctcccgagatacagctatctatgcccgtggaatgaatccgtcgcttgatgaagattggaattatgagtctgatcagattatgggaggagatgatagtacagttacagtaccgcttgagtggtttgaactcgcaatcgaaaagaaacttaaggcttttagtctcaaagtatcccctacaaaaataacgctggtgaatggataa

SEQ ID NO: 144489 - DNA, 312 bp, Enterobacter cloacae
atgcagattaataaagtcatgtcttttcttgatattctttctagctggcttgaagacaatattaatatggagtctgagctggtcttcgataatgatgtagacaataccacctcagaagccctgtatcccgcagtggaaaaagctaacgcggtattgagcaaacttgcatctctgtcgtctgatacgattcaggcgacgcgtcagcgtttacaggacgctgtcgaaggcaatggggaggtttctcctgctgacgtcaaagagctgctcttggcaaccaagcatttgatgctagcgccggattgcggagaataa

SEQ ID NO: 144490 - DNA, 402 bp, Enterobacter cloacae
atgaaatttatcctgttgtttttcattttagtcattctgatctgggggtttacaggtctggcttttaaagaagccattatatttacgtccgtcggactgagcatttcggttgtggctttgtctgctctccttgtggtagttctgacatttgtaatggctgcaatgtatgcaactcaggaactgggtgcgctgggaaaaatgattatcgctcaggttgtactgaccggattatggaacctggctttttctattatcccggacggaaagttactttcttttttcggcgtaaatatctggcaatccggctcatacctggtttacttcatggcagtgttgatagctgttttcgcgacgttcgtcgcgttccagaagcagcagtattttttacctgatgcaccataa

SEQ ID NO: 144491 - DNA, 249 bp, Enterobacter cloacae
atgaccagcaatcgctcccgtgaaataaaaacaccgcctgtgcatattattgcggattacgttcttcgcttcatgaagaacaataaagaagcaaaattgtacgaagcaatgagccgtcttgaaagtaaaatcaaactctttgttgctgacggccatgatgagcagcatatccggacacagttaaatcaggccacacaatgtcataccaaagaaacactgaaacgggcctgtgaacggatttgtatttaa

SEQ ID NO: 144492 - DNA, 237 bp, Enterobacter cloacae
atggatgaatatctggcgctggacaaggcactcatcgaagttctaaccccggttcctaagccgttcgcgacattatttgccggagaaatcaaagcagagtgtcacaggattgccgctagggaaagcaatccgcaaccattgcggattcttgaccgccgtttgcaatcgctaattaaggacggtcgcatttcttatacaaccggaaaaggttggcttaaatgtggtggcaccgtataa

SEQ ID NO: 144493 - DNA, 609 bp, Enterobacter cloacae
atgtttttacacctggtacctaaaatcctgcatccgatgggaaatctctgcacgctggattccgtgagcgtcacggaactgtcgcttcacctgacaggaaatgacctggttgcgatgcgcccttatccgaacaagcaatacctggtgggtatgctgaagggtcgcaaggcattgaatggatttctggtcaaaattccccgagcgttagaagagtttacgatggtctccgtctggaatattgaaggatacggcaaaataacgcacaccctgaagacctttgtcgaagatacggaatatgacctggtttcccatgacgtgctgctggcgcaagggagctaccgggcacaggcgtctgaagagtatcgtgttcaccctgtctataaaaacattgcgccggtacacatcgaaccgaagatggagtccctgctgtcgaccgaacccaatttagagaacgatgtctgtgaaacctattcgtgggggatgctggtgcgtacgcgggaagaggggtttaaggcaatgacgatgccatcagcccgtctcagggagtctgaggcactgcggggggatcgccagccacaaccggagcaggccattgttattagcgggtga

SEQ ID NO: 144494 - DNA, 540 bp, Enterobacter cloacae
atgacctgcttattcgcaccttccctaaataacaaaggctcagtaatcgaattacccaatttttcagaactcctcccgaaggttaaatctgatgatgggcgattttcaaagcccaaaaataaaatatccaaagagcaacgagccgaactgcgtttgaaatttggtggtcggtgtgcctattgcggctgtactctgccggaaaaaggctggcatgccgatcatgttgaaccggtgaggcgggattttgaaatggtcagagcccccgctggaagtcgagtgacacaccaggctcgaagtaccggtaaggtcatgcatcctgaactgcatgcaatcgaaaatctttttccggcttgcgccccctgcaatctctttaaaggtgcattgagtgttgaaggaatgcggaaagaaataagccgccaggtagaacgcgccagggcatacagcgtcaacttcaggaccgcagagcgatttggattaattgaagtcacggagaagccgattgtcttctggttcgaaatgtatcaagcgacaccgaaataa

SEQ ID NO: 144495 - DNA, 813 bp, Enterobacter cloacae
atgagcatgaattcgcagccggaactgaagttgagtacccgtaccgaacaactcgccagtagtcgtgatgccgctatgcaaaaatttctggacggcatgacgctgattgccgaagcctcagcaatttgcgggttttcactgtttaacagcaaaattatggcccctaatgcttttggccttcctgcgtccctggccgcaagcatcgaggaagggcgacagcaaatagaccgtaagacatggaacaatctttttgaagaaacgggtattgaccgattctggaatcacaaccagcgggcagagttccgtgagtctctccggaacgctccgccaattgcgtcgttaaccgtaatccgcagtacattgcgccaggcagttgccatgcgcagcattacacttgctgaagggtttgttgatctgctatgccagcttgatcgccggtataaaactaatgcccagcaatttgtgatgccaaaaaaactggtactacgcggcatttttcccgactcgaacatgatgagatataatggcttttctcaggataatctcttctatttaaacgactttgagaatatcgtttgcatctgctccaatgcagcaacaccgcctgtcggcagtggaatgaacatgtacgatcggcttgctgtcttacggaaaaccgattttacgggtgacattaccgacccgaagggctggaagtgccgattgttcgaaaatggtaacgtccatatctcagttgagtgtgaaagcctgcataacgcactgaatgacctgattagcatttattttgccaaccagatcccggccaaaggataa

SEQ ID NO: 144496 - DNA, 1221 bp, Enterobacter cloacae
atgatgactgacaatgtaaatttgatgaacggggatgaacagacagcgtccagtttaagtgaagatactccaaaaacgccccctctaagccccgagttactgaagaattccccttactcgtcaatagctaaggttaaatatttcaccgagattgaacaaatctgcctcgataagagcatcagcaccgaaaacctcgaccagtttttcaaagcccactggctgcgggataaaatgggggggtcttttgcccgggctcaggagatgctggcggcctacaagcaatacgtggacgaggtgcccgaagaagcacgcgcgattgaaatccctgaccagattaaagatgcattcagtgattttactgcgtttatcacctggtacttccgcttaagctatacggctatccagagtgatagcgtgaaaattgcgaaggcagaaattactcagttacggcaccggaatgctgaaattctggaagaactgtcacagtcgaaagaacaggctacagtcctgaataacgaaaaagttaacctgattaacctgctggagcagcagcgtgaactctccagtaaattagaagattcacttcaggaagcagaagaaactctggcaggaactcaaagtgaattacagcatgcccaaaacgagatccagcttttacagcagacagtagggacactgaaccagcaactgagtgagcgcaaacaggaactggcctcgcagcaggagtatcagaagcagcttaatgatgaaaataaagcgcagcaggtagagctgaccgccctcaacagccagaatgaaaacttacaacggaccgtgtctgatttaaagtccagtgtcagtcagcttgaacaggacctttcttcatcacaatcccatgcctctgaattgagctcatctttagccgaaaaggacacggccctgacgctcgtccggtcggagctctcaacagctaaagggacgaatgaacaactacgagctgaagcacaacgcttagctgatgagaacctggtgtccaaaaaggtccaaacagatctgacagaagagcttcagcagctcaggaatcagatgatgtccatggaagcgacactcaatgcggaaaagaccattgcagagtctttacgaggaacaatcaagcagcttaccgaagctatgaccggcgtagttgctatcaaacctaaatccccaggggcatcaaaaccgcgaaacaaaaagacgacataa

SEQ ID NO: 144497 - DNA, 1320 bp, Enterobacter cloacae
atgggccagaagtttgcagtatttattgcttacgatgacgaaccaaacacgaaacgatactcggctgaatttcagacgcagaacgagtatgtaaagggatggcagtcggccctaaagaaagcacaccacacgtccgggcagaaatctgtgatcacctgcggatgccggggcaaaggcgcaaagcgtctgtacgtccggtcgctaccaaacagtgataccttcatattgattaaggctgcaaataccggcactgagcatgatccatcgtgcgtgtttttcgaccttgatgccaggcatacggggttaaagggttatgccagcaatgttgtacgcatcaacaatgaggggaccatgtcaatacgcctcggaataggcatgacggagaaagatccgccggaaaagtcagaggttcctaccccgccccaaatccagcgacctgaaggtggacaggcttcaatgaccctgtccggacttctgagtctgttgtggactgaagccggtcttaatgtctggtatccgaatatggccgggaagcgaaatgattcgctggttcgctaccggatgttggacgccgcaaagcaggtcaaatcaggtagagcgtgtattggcgaccatctctttatcggggtggcggactctaaaagcaaagtggccagtgagcaggttaagctgttgtcgtccgcagaactgagcgacaagcgactgctgctgctatcagtactgccgcgctatgacgcagaaaagcatgagaagccactgaagtttcttcctatgcgtaacttcggcggtatgccccttaccttctttaactcagacgggcactgggatagcgtgaagcggcgattcccactggaatatgcagcctggaaaaatggtggcaaagttgttgtttttgcacttacctctcccgtatctgtgaccactagaggtctctctgcacgagctcatcagatagtgcttatgctggtgagtgataactggatacctctggactcctcatacgaagcgattgtatcccgtaaactggatgccgaacaccggcactatgttaagcctatgcggtatgacgcaagtgcgagcgatgtattccccgatttttatttacttgatacccggagtgataagccgttcccgatggaggttttcggaatgtcgacaccagcctatcttgcgcgaaaggaacttaagaaggcgtattacaaccaggaatatggggcctatggatggtggcactgggatgctacggagaagacggaatcccaggatctccctcatttccctgaagctaaaaaatacaattcacccgaatcacaaccttaa

SEQ ID NO: 144498 - DNA, 168 bp, Enterobacter cloacae
atgacgtattttgattcagctgaagatcttactattacaaaacaaagggctctccaagagcttgctaaacatggcgttgaggccagcgacatcaacgtgtttttttccgagttgggtgagaaggaagagtacaacgcgcaggatgtattgagatggctgggctattag

SEQ ID NO: 144499 - DNA, 1428 bp, Enterobacter cloacae
atgtacaacgatagaactgagcctgcaataacagcattgcttaatgatgagacaccttcctctatccataaattactggtgcaggttgcaagcatctacgacgtgaaggatttggctgagcaacttaatgctgcaaccggcagcgaatggtcgaggggaacgcttattcgccagattaaaggtgcagttaatgaatgccaaatcacccaggaaggatatcgttatcttcgaacgttgctcccctctcggccagcggactatgaccagaagtttttccgatttattgacttgtttgctgggatcggtggcctccggagtggttttgacgccatcggcggaaaatgtgtgttcaccagtgagtggaatcagttctcccgacggacttacagtgcaaactggtactgtgacgagactgagcaccatttcaactcagatatccgggacattacactcagtaatcttcccgatgtttcggatgaccaggcctatgcttctatcgatgcatccatcccagaccatgatgttttgctcgcaggtttcccatgccagccgttcagtattgccggtgtcagcaaaaagaactcccttggccgaaagcacggctttgaatgcgacacccaggggacccttttttttgatgttgcccggatcatccgagccaaacagcctgccattttcgttctggagaacgtaaaaaatctgaagagtcacgataaaggcaatacgttccgcatcatcatgaatgcgcttgatgagctcggctacgatgttgccgactccgatgctcacggagcaaaggaccccaaaataattgacggtaagaacttcagacctcagcaccgggaacgtatcgtgctggtcggtttccgccgtgatctgaaactcaatgatggcttttcgctaagtggtgtatccgctctttatccttcacgacggccaacccttagggagctgctggacgctgaggtcgatagccgttacatcctttctccaaagctctgggaatacctttataactacgctaaaaagcaccaggcaaaaggcaatggatttggctatggtttggtagattcatcaatagaaacagtggtttgcagaacactcagcgcacgctattatcgggatggatctgaaattttattagaccggggatgggattttagcataggcgaaaagcactttaatgatcctgtcaatttggcaaggcgcccacgccgtttaaccccgcgagaatgtgcccgccttatggggttcgagcaaccgggaaaagttacttttcgcattccagtctctgatacgcaggcctatcgccagttcgggaattcggtcatcgtcgacgtatttgcggccgtggccagtttgcttcggagccgtattgagactgccgtttcggctcggctcaagggagagtttgaagcggcatcatag

SEQ ID NO: 144500 - DNA, 516 bp, Enterobacter cloacae
atgactcttttgaaaaagttacttttgccgacattaatcgtccttttcccggtggcaactcttgctacccaatcatcatttgaagcgaaagtggtaaaaattatcgacggggacacaatcaccgcgctcgatggtcagaatacaaacatcaaaatccgcttgtacggtattgatgcccccgaaagtaagcaggcctttggacaaaaggctaaacaagcgttgagctccgcgattgctgcacagaatattacggtaatagaccacggacctgatatttacggcaggatgctgggaaccatttggcttgatggttatgacataaacgcctcaatggtagacagtggctatgcatgggtataccggtttgacggtaatgccatcgtcccaaactatctgaaattcgaagcttcagcgcagaaagcagttaaaggcctctgggtagatccgaatcccgttgccccctgggagtggcgccagcaaaaccagaaacctcaaaagacgaaaagcagggggtga

SEQ ID NO: 144501 - DNA, 939 bp, Enterobacter cloacae
atgacaagacaacatcctttattgaaaattgcgcttaataacgatggacatctttcgtggccaattttacccggacaaactcagcgctgcccaacgtgtctgcgagacgttattccgggtccggatggggatttagtacatcaagtggaggagggcgttaacccctgcacgccatctgtagatgttgtcatttcaaagtcgatcattgaactcctcagcgcaggtgagcgcctatatgttaacccagttaagaacgcgaatagaacactggccccatcgtttatctttctgcacaaagaccagcaacttcgaccatttataaatacggactatcaaccagcaggggccacctggagaagtgataaagggaacagacttggtcttttctatatggatgagcgagcgtctaaaattaataaggaccagttcgattttattgctgtaatagacccatctacttttcaagcagaatttgagaccttatggtccatgggcgaatttgataacccccttaccgcgttacagcactcactggtttcagagaatatgtcatctgtctgggtgaaatggcctgttaaaaacctgcaatcgaggaaagaatcggtgaagtccgattactggtatgactattatacacctcactacccagaggagcaggcagcttgcacggcaaccgtgattggaatagacggaaatgtatccggggaaactatttacatgctccagatcgccctagaccggtcgacagttgagtaccagcttgtaaaatcgctaggggtcatattgctactggataatacgggaaatttggtatcggaggcgcagcctcactttgatataatcatcaaagcttgcatctcgggcgtcagagactttgtacgtcaaaatcctcgaatgcggagtgtggagcatcagattaccagtgcaatgcctggttag

SEQ ID NO: 144502 - DNA, 294 bp, Enterobacter cloacae
atgcacgagaatcaggcacatcaaataattgacgcactaagtaaagataagtatatctacattgcccttatgattttagtcattcacctcttgatgaagcaagtgaataaacatcacgataagcttgtaacttcaaggcgtatttatgatgaccataaatctggcaaagcactcgatgaaacaccagccgaaaccttgaccatgatgaaaaaaagctttatttccatcgtagttaacttattttcaattattagcgtcacggtactggctgcatgttttttcatctatttttag

SEQ ID NO: 144503 - DNA, 777 bp, Enterobacter cloacae
atgagtattactcaagaagatggtgctattcttgattatcttaatgccgagttaataaagtctcaatccttgagtttaaataatgagtcaaacagattgtttttatacaaaacaattctacaggctcatttaaaatacattcaagttattaatctactaacaagaggtgatttttatgaagcgtgggtagaacttgaaagaatagaaatagatttaatacacatcaaagaaaataatgagtatctgcctgaaattaatttgtatggtgttaacttcttagccagaatggtatgtaattggcaggctttattcccatataaactcttcggtagttctcgtgaaataataaaagaagtgaaatgctcagtatgtaatacaactcgtggttttattaatgattgcggtcatgttaaaaacaaactttacaatggagttctttgctttgatgaagtgaccgattttgaattaatttcttatgacgtagttagtaatcccgttaacaaatatagcgtttttttctctagtgatggtgataattataactattcaactttaattaatgttgtcaagtatatacaatccccacatcaaattttcaatatttcaacttggaaatataaggcgaaagaacatgacggagtattatcaccagaaaatatttgtccatgtggagattctttcaaaaaatatgcagattgttgtctgtcacgtaatggtatttattacaaacagatagacatttggtttccacttccgttggatatagaacccatttag

SEQ ID NO: 144504 - DNA, 162 bp, Enterobacter cloacae
atgggtatttttggcacactaacctgccggtatcgggcattgatcccttggatgccaggcctgatgtgtgtcggacagaggctggttgtcgataactacaaacggctcgtgacagtactgagactttctcaggtaaaacaagatgagcaggaaaaggaatga

SEQ ID NO: 144505 - DNA, 258 bp, Enterobacter cloacae
ttgaagctgaatattcacttctttgtgaaactccaggtgctgacggtggcggtcagccagctggcttccacggaccctggcacgatacaaacgcatatagtcggccatttcggcggtatggcgttgacgataccggttcttggctgcattgactacattgcggttattcaatttatacaaccggttttcgccagctacgcactggcggcagcgagtcttatggccatccttacttttacggtcaattccgaagtctaa

SEQ ID NO: 144506 - DNA, 1830 bp, Enterobacter cloacae
atgggtggcctggtcagcaaaactaacattgatcgccttgaacgttttcattctctgctggcggggcaatactggtccgccctcgtcgatattccggcagaggcgattgcggccggggatacactcctcatcaactcgttgcggtacgtggatgacaatctgcataccgtcatccttcgtgcccaccctcggcactacggggaatgggtaaacgttgaagtcgttgctgagaacggctcaaaatcaacgaaagacaagaaactgaatgaacatcggtttctgacggccgattttctcgccttgtttgaatatcagcccgaccatgaatcgatccgtcagtcagagctcaaaggcattcaggacgaggttgctgacctgcaaatgcgtctcaccgaaacactgaaaaatccctcagatctccgggaactggctatgaaaaggatcgaagacgaagaggccagtaaaagggggggcgagtcagacgacagaatgcttccggtcgtcagaaatgcagaagatgccgcagttaccatggcgctgggtacggtgcagaatgccctttctcagggaatttccgaagctcaggtttctctgatggcgaaagtcgcggaacgggaagggaagattgccggtgccgtagctaacattattacgtcgcgtaccggtgctattacccgggcgctggagaaaatgcatccgtattatgcggagctggccgctgccaagttggccggaacgcaggagggcattgagcaggctaacaaaattcaggccggtgttctcacgctggaattattcgtcggcaaaaacgtgacggtagtcgatattgctgaaggcgagccagctgacagcagcattccgctgacgctgtgtcagaagaagctcgtagtggatgaggaactttcagcctggtgtgacatcgacgaacactttgatttcaggagtctttccgcattccacaaggcgctaaaagataaccctgggctggtggagcaaatttttccgactgagcgatgtgtactcgtcatggtaaccacccgcagatttattgactatggtgatacctgggcgaattcagaatacaatgaaaagaacagcatcgtgtttctgatggtccgcaacgggcaaaacatcaaacaaatctattccccggtggaaagccatcttggagcatcacggttatttccgtctgaagatgagcagcagggccactttcgtgggtttgacggtaccaccatcaaatttgaagatgtggcctataccgatcgtctcaaatcccatgacctgatggctctgcattaccgacgtctgcttatcatgctgtttggtcttgaccagcggctggctctctttggtcagttctatcccaagcatgaaaaggctaatttcctgaatctgagcttccaggagcggtacttccattttctgcacgatgaagacggcacagggctgctggcatcaccagactcgcagacgctcgatgaatttattagtgaaaaaaactcctatatgcaaccgggctcgcggctgctctgcaactggcgtgagcttatgacccccagaacagcacctggtgccgtcaaagaggacagcagctattcagggtactccttcatcgctgaaccagagaataatgtctctgctgcggttgtgtatcgtcagggagatagtctggcagttgatgtggcggtgaagcgctacagaacagataagatgtttaactgtaaggtaaacgtttctggctacaggccgtggcgccggggagaagcagagcttgggaaggtgcgaataagtcaccaaacgcaaaaaaacgcctatgtaagtgattga

SEQ ID NO: 144507 - DNA, 630 bp, Enterobacter cloacae
atgactatcgataccgacgatttcgatccggtagatgtagatgtagaggttgcagaggcgttagagaagcacatggcacagttacgggacctggaagcatactggccgtacagcacgacagccgttattgattgtttttttgaccaggctacccgggcaactcacgctgaattgtggttggctgcctgtacaactttcctgaacgggattgaaacctcactgagggtgacgcttgaactgatggagtcacaggcgcattcgcagccagccgcaacgctggtggatttaagtgatatggccacactcagtaatgccctaatgagaagggcgcacatggctggtatgccggtgacgctgctggcgtttcccgaggagcaggatctgctgaccaagattgctgaaggtgccccgaaaaggccctatgcggaaatcgtgagggttcgtcacaatttatgtcacgggaacatcctggagcacatcatcactgtgagtgacgatttgggggagccagtccggttattcacacctgaatgtatgcgtgtcctggcagagacgatgtcggcaatctcgaaacaatgggttgcaggcatgcatcaatattggcgtgataacaatttatctatgccttga

SEQ ID NO: 144508 - DNA, 789 bp, Enterobacter cloacae
atgcagtgtaagactgcgagatcttcatggtccaatccaattctgacatgctttgagtcaccctcgtcagatgataaaatatggaaaatttatctaattcaaaaagggctgcttgtggataattcatttcgtgcagaaataaaggttctttccgttttcgactttgatggaactcttacccgacatgacagctttatcccctttttgcgctttgccttcggtaacagtgtcttcacccgccggttggttaaactcgctcttcctaccctgcggtgtttgagtcgcaaactaactcgtgatgaactcaaagaaattttaatatcaacgtttctcactggtatcgaggaaaagtgggtcaaggagaaagctgaagcctattgcaacctttattgggggcgtctgatgagagcatcaggcctattggccgtggcaacggaagtttctaacaatgttgaggtgacactctgctcagcctcaccgaggcttgtacttgctccgtttgctgaacgactggggatcaagctcatcggtacagagctggaaagcgttaatggtatcctgaccgggcgcattacagggcacaattgtcgttgcatacagaaaattaaccggctggagtctatttacggaccattagatcagtatcatcttcgagcctggggggacactcggggcgattatgaattgctggcagccgccaaagatgcccactggcggcacttccatcctcgttgggacagaaaaaaaacttttatacaccgcttaaaaaaggagtcgttcagggtctaa

SEQ ID NO: 144509 - DNA, 651 bp, Enterobacter cloacae
atggcaaagaaaaaagatgatggttcagcagtaatactactttttattgtggctttttttgtgttcctgccgtttctgatattcgggatgtttttctaccgaaagctaaaaagaaaatattcagctatccccaacattcaacgtgtatatgatattggcgtcatttttaaaacgttaagtgcctctatcgcagttattgtggtttcagcagtgctcgttctgcaactcagtgcgcttcccgtcaaatttgtatcgccagaaatatcacattatatagcaagagttatgttcgttctctatccacttgtaatgatctggccaatgaaaaaaatggcggaacgcatcgccatagaatatttcggtataatttttaacgacaatgacagaacgataattcttccagcagatttaggcaatatgggattgggtgactggcttcgtctcaagtttctgagcaggatgggtgagcaagacagcattgagattcgaaaaatatcgaatatcacacgcgagaaaggtgtcaacttctatatccatggtgatttcggatcccgacgcatcaacttttcgaacaagcaaaagcgcgatgagtgtatttcagcacttcaggccagaacccgggtaaagggtggcagagactacggttactaa

SEQ ID NO: 144510 - DNA, 660 bp, Enterobacter cloacae
atggcaaagcaatttatgttgatggaaccaaaaaatgagaattttaatgaattaataggtgggcctaacaaatatattgtgcctagattccagcgagactatgcatgggatgtgggacaatgggaggatttgtgggcagatataaattctcttgatgatgaaggtttccattatatgggctacattgtccttcaacaaaaagaacagtatcagcatgaaattatagatgggcaacaacgcttagttacgttatcgattatagttctggctgcaatgaaagcgatcaaaactttaattaataatggggaggatgttcagggcaatactgaacgactcgatggtataactcagaattttgtcggaagtaagaacttcgttacgcttaaagtaattaataaattagaactaaatagaaataataagagttattttcaaagaatgtcatctcatttagaggctcaaaattctcgcggtataacatcaactaataaattgatacgtaagtgttttgactttttctgtaagaaagattacggcaaaacaggtgcggagattgctcagtttattgcagatttttcttcaagtatgatttttacaaagataattgtacaagacgatcttaatgcctataaagtttttgaaactttgaatgctaaatag

SEQ ID NO: 144511 - DNA, 822 bp, Enterobacter cloacae
atgcaaaatgatcttggacttgggttcatctgcaagtcagcaagagcgtcagcaaaaattatatcccggaaagttacttttccgctaaatggctcgagtactacaaaacttaccctaacgggactacagtgtcatccatcctgccggtttccgttttaccagctgtctatgctaatccacaaccagctcgctgatcatgccgccaacgttgtcgatgaaaatgctccgttcactgtatccattaacatacatgaatggctgagtcgtgccagagtggcatttattgattatcacggtctgcgtaataccgataaaacagcaatgatcacattggatcatctggaagaattacttactcacttgtcgactacattggccgtatatatcccgtattcaaagaagcgcctgaactttagctttctgacgtcctttacactgatcaaaacatcacagtcttatactttgatgttccctggtgtgctgcggccgatcttggtgttacttggggggttaattcaggaatttatgaccgagaagttattgaagagacgtaatacccaacttgtcatttttgaatatttgcgaaagtctcggcgccattcccataaaattaccgatattgctaacgctcttcagttgcagacggtgaacgtacgaatcatgcatgttcttacccaacttgcagatctggggcttatatcgtttatttgtgaaggtaagagaggggagcggtccatcgaagagcttcagtttattccttatgccagtcgggaccattccgaagttttgagctttgaggaatggataagcccgatcgactaa

SEQ ID NO: 144512 - DNA, 825 bp, Enterobacter cloacae
ttgcgaaaacatacaccaatcatcaaatgggcggggggtaaaaccaaactgatgccattcatcagtcagcatttcccacatgatcagagccgtcggtgggtcgaaccatttatcggcgggggcgctgtgttccttaacatgtttgccaccgatgcactcttggcagacagtaatccggatctaatcaatctgtaccgcaacatccagcggaataaatcggcattcatcagagaagtgaatcttctggcggaaagggaatttgataaagaggattacttaaagctgaggaacacgtttaacagcaccagtttggatgatgccccgctgcaacgagcagtccttttctacgcaatgaaccgactcggatataacggcctgtgtcgttacaatctgaaacgtaagtactcagttccgtgggggaatcgatccaagttaactctggacccccagaaagtcgattatctctcattcagactttctggcgttgagctgacaaccgcagattttggtctgacgttggagagtgctggtggttgtgaccaaatttattgcgatccgccttatgataaaatcagcaaaaccagctttgtcagttatgacggcataccgttcaataagagcgcacatgttaaactggcggatatgctggtggcagctcatcgtaaaggggcttcagtggccatatccaacagcttgactccctttacgctggagctctatgaagaacgcggttttgaaattcatactctcaatgcttaccgttctgtcggcagtcaatcaaaatcgcgaaaaaaggaaaaagagatcctggctgtccttcgttaa

SEQ ID NO: 144513 - DNA, 1155 bp, Enterobacter cloacae
atgagtgatctgatgactgattcccagcaaactaactcacgggtctttaaatcacccctcgtgtcattttcaacagtgacaggttccggccgattcgtcagtggcatgaagcagttccgcgacgcgaaccctgacctttgtaatgaagtcactgaacaaaaagcttgggctatcaacccttcagtggttcaaatctcgccaggcttcaactcccgtgagatggggatgggggaggcatattaccagctgccggaagtcgtagatcatctcaataacatcaagtgtgcattcatccggggtgattacgttgaccctatacgcgttctgatcaaagacggtattccgtacgtttgccagggccattgccgtttaaaagcggctttaatggctcaggcagaaggacatactgacctcaccattctttgcatcgagatgaaagccgatgagatcagctgcgaactgacgacaattgacgggaaccgtggtctggctctttctccagtggcactgggtgaatcctacagacgtcttcaggcgctgggcggatggtcgcttgatcgtattgccgaacgtgagggcaagagtagtacaaccattgctgctctcattcgtctgaccggatgctctgtctacatcaaaaaattaatccatgccgatgctatttcctatgttgcagtcctatcccttattgatgagttcggtgaaacggaagccatctctcgtatcgaaaaaatgatcgccgagcttgagaaagctgattcaagcggtatcaagattaagaagacgccacgtggcagtattcgtgttgtcccttccgattttaaaccggcacgtgttccacctgttctcgccacaaaagccgtagaaggggtcaaactcatcactacgagtttgttgcagaaactcggtgatatccaacttcccgaagtgaccgactccagcgaagatgaagaaatttcctttacgttgaaccgaagcatgctggagatgctcaagaacctgcaaagtgagatcactgaagcagaaaacaagcagcttcgccgggtcgaaaatcggcaagctcgattgaaaggggagaaagtgacttacaaatccgcgaaaaacacaaatactggcggagaaccacaatctgaagcaccaccagcacaggcttga

SEQ ID NO: 144514 - DNA, 1677 bp, Enterobacter cloacae
atgtctgctgttgaatctaatttcccccaaattggcgccccagggaactctctggtcgcttgtatgcccctaactggcctcagtgttaacgaggataactttctgcccgaaatgcgggaagagcttggcatcattgccagccaggtcgaatcctataacgaagagcttagtttactgaggtccatgtccactcagtttatgaaatacggaaatcagaagctctattcctacctctcgggctataaccatctcatttcagaaacagatgccctgtacgcagaaaatgcacttcgttctgagtactggaagcgggtaatggcccttaccgatgtgctgtccgtgatgtctgacgaaaaaaagaacgaatgggacaagcaatttactgctgaccggtatcaccggcctccgcaagagatccctgagtttacactcgacgcagtagttgccacggttgtcacattgctcaatgaccggcatcagttcattaaagagcgcgtctatgccgtttttcaatcattaagccgtcaccacaaaaccaataaagcttttggtttctcaacccgcatgatcaccgtcggtgtctgtgaaggggtgaaagacaagtgggtaaaacttaaagttgaattcaaagaatcaggactcatgccactgtcggaactgcgggtgatctgttcttatttccggggagaaacagttaaaccggtctatgacacgaaaaaaatggttgagaatatggttggtcatgctgggttcagaaattggatcagcctggatggcaacagtattcgttttcgggtttacaagaatggttcgatgcacattgatgtacatcctgatattgcagaacggcttaacaacattcttgctgccattgtccctctggcgctgcctactgaacgcttagcccattacaaagccacgttgcaggagttcccggcactgaaacgctgcatcgattttcattcacggatgcagctcgcagagctggaattcactcggaatgaaaaggaatggtccagctggacatcgctcggttatgccggtgagttcgctgataaaacgcggcaggtgaacgcggaggttctgcggttcctcggtgcccggattactagctaccatgtgacatttgattatgacccgaccgaagtgatgcgcttcatcggtcatatgggtgccatgcccgatattgtatcccaccagttttacccttcatcgctgcgactcagtgaatacgtcgcatccattattgcgaccggggagggggagcgactgctagagccaagcatcgggcacggggatttgctgcaatgttttcctaagagcgtcaacgttaccggcatcgaactggatacactaaattgtctggtctcccgagctaaaggttacgatacaacggaggccgattttctggcatggtcagcagcgaacccaaatcagaaattcgactgcgtggtgatgaacccaccttttgctgacaaccgggctaaactccatctactggccgctgcgtctcatctcgtttccggcgggcgtttagcggccgtcctgccgctatcccttcaggggatcgataacctgctgggcgagggataccgtgctgaatggatggacaccttcgataacgagtttgacaacactgccgtctccgtccgtgttctgtatgtagaatgcctttaa

SEQ ID NO: 144515 - DNA, 177 bp, Enterobacter cloacae
atgtctgaaatctcacctggcctgccagaggaccaaaatgatgttgaatttatgatggatgatttccagcagagcctggggaaaagtaaaccggtacatgaagtgcaatttctgggagagtcaccgcaaagtgaagactccgccaacgctgccgattcgccctggtttgaaaactaa

SEQ ID NO: 144516 - DNA, 2388 bp, Enterobacter cloacae
atgaaatgcagggcgatacttttagcaccactcatagctttttcgtttacggcacaagctgagattgcagagttaagattcaatgacactcagaatcaaccaaagattgttgttccatctgtgcagtggattaatccagcaacctcattcgaggctgatgtaatctccggcttagaccggtacgtccagttgtcgttacttaatgtcaacggtgcaagcttgtggagcacgaaaagtagcaaagttacggttgatgaccgtatgacctccagtagcgggtatgactattatggaaaaaggttaagtgtccctgcgtttggtgaagataattacaccctgagggaagtgatcacagatctccaaaataatgaaatttctcgccgggactacgttatatctatcgaccgcactccccctaaaactagcacaattggatatacgcgaaatggatggcaatatggtagcgaagccatctttaccagcgttccttcaggtatgcagtatgcctctgttcaggctctcgtcttttcaggcctttcagacagtcgctctggtctcgaccgggctgagtactttcttgtcgattcgaacggcgttgaacgaaagagaggggctgtaattaacctggtcgataattcagtaaccgtccaaaatactactgcgagcgatccagccctggcgccagcttctcagtctgaataccgtatgggcctttatgtttatgacaaggcaggaaataaagcatcagtaagcagacaaagtgtgattgatcgggtcaaccctccttctgttctacaggtgcttaataccaggacaaatacctgggaaaactactcagctgggataactgtttacagtaatccaatatcattgcgggtactcaggaataaaagtaactttactgctgctaataaaacaagctttgggtgggcagatgccaattatcaaagttctgacagcacatataatatttattcgttcaattttgttttccccagtaccggtgatatttatcacgaattccagacacttgcgggaggcgttcgtcggtaccatcactctgagttatctttcactccttccccaaccatggaacttgcaccaaaggtcacaagcaaagaaatttttcgtagtgataccggtaaatggagcagtgctactgggaatgtaagaactgccaaatttacccaaatacgcgtgactaccgaacctcgtaactatgtacaacgggttgcagctaattcgaaccgtaactggtactgccttatcccggtaggaagcactggttgtaccatgaacgtggattatacctttacttccgataaggggatgcaatacatccatctggtctcaggtaaagacggtactgctatttatgataatctggctggggcattcgtagtgatttgggataacaacccaccggttattaacgccgtaaaaattaaccgtatggataaaaatgtaaccatgacggttactgatgatgaccggataaatggatggcaaataggagcatgggatacccgagaatttggcgtggtgcttaaaaccgaaacggggaatgtgattgacctacccgccaggacatggacagagagtgattttaaaacaaaaaacgcggtcatttcctatgctgatctgccggacggcaaatataccgttctgtccgcctatgcaagagatcttgtgggcaacacggcaaactacgtgataaatgatttgcttaccattgactccactgcccctctaatttcctaccggtatctgaatgatgatcctgaaggcaaactggttaagggactagaaaacctcagaattagtgtagctgacccttcaggtgacgcctcgcttgaatcactggtgttgagcggtggaccaaacagtgaacaggtgacattagcttattccagtcagggctcaggagtttatacgccagagtacccgcgtatctttcccgtaatagcaaaagaggatggcatttatacaattgaagctcacgcagtcgatgcctctggaaaccggtcctcgaaaaagctcaatttcctctatcaaccagcaaacatgatcactctggacaggctacgtacccttgctactgcggctgcactaaagaccacggataaccagccactggcttttatccggacaagcgtacttcgccgaaaggatggttctgtcattactgggcagttaaacggtacgctgtccgtgcggaaagatgctgacttcccggtaagtgtagctggcgtaaccgttgcgccaggagagacaaaggcaatcatttttgatatggggcagggtgaagaacgtatttattctgtcacaccaggaaagagtggcgtttctggtacatctgagtttgccgtggaattcccgcagttctga

SEQ ID NO: 144517 - DNA, 2457 bp, Enterobacter cloacae
atgcgtaaaatactgacaggctgtatcattgccacggccatctcttcaacttatccggcggcggctcagattttcagttattcctataccgacaccaatcagctggcaatgacgcttaagcctgcaacgcagagctatctcaatccggctggcgccctgaccctaaacttaatttccggtctagaccggtacgaacgtgtgactgtaaccagggacagtgataaaaaggttatgtattcgggactaacggccaagataagtgttgcagaccgcattgttgctgccgacggcacagagtattacggaaaggacatggggttacctgcacttggtgaagggtctttcacggtaatcaatgacacgctagatctccagcaagccgtcgtaagttccacaacgtatcgtttcaccatcgatactacagcgccgaagtacaccagcatatacccaagccagaacgcaggctatgacatggtcctgagtggaccactttgggagctcggtcgcggaggttctggccagttttccatctttgctgacggcgttgatgatgcgtatggcatagacaagatccggttggtcatcaagcgcagcaatggaacagtcgtttccgataatacactcagctacgacacggcggcaaaacgtgccttttacccctggataaaggaagcggtcactcaacctggcatgcccaccagcgatctcaatgaagaattcaccttcaattttatcatcactgataaggccggaaacacgctgaatattcctccgcagcgctttttatttgatgaccagataggtgaatatacgccctttgcggtccatgactcacgagtcagtacgagtgtggttccagggatctcttcagggtacgtaccgtttgtgcgggggctctctgtactcgaaaacccgtaccggatggtcattcgtattccccgaactaactggcagccataccgtaacggcggcatcaccattcttaacaattatggcggctctaaggttatttcagaagacacgacctatgtgtacgtagaagtgaagctcccacagggtactctggatggaaactactatcgccctgtgaacaggtaccaatgggccggtggcggtctgactcagtacgcctcctggctgaactgggacccggcggcggtaaaaagtcctgcgtgggggagtcctgcgattgagcgacagaagtctgacggcacttggttcaatagcgtcgactggaaaaattttctggcttcagatatgccggtgaacctaaccaagatccgtttcactgtgcaagcacgcccctacgaacaagcaattaccggcagtgccacctgcaagatccctgccgggtcaacgtcgtgtactgtcgacctgacacaggcgattacaaacggtaccaccggctatatacatactgcctatgaagtgcgttcgacaaccgagtccaccttcttcatgccgctctgggaaaacatcgcctggcatacaaaggggcccacagttactggctacaactacaatgatgcgaccaacattcttcaggtattcgtcaacgagccaggagacggatggtatttcgatgccgttaaactgagccgggtgtggttgtctgacaaatcccgcaataacgcggatatcaacgtgacaggaaaacaaacggggcgtaacacagcaaccgggaattatacttacgacttcaacctgaaacagatcccggagggcagctataacgtgcagctcaacgcccaggattctttcagcaacacgggaagcttagcctacaaaaccgtgacggtcgataactcgccgccgtccatcagtatcaactacgaaaacaaacctatcaccagcaacgtgacagtgttcggcttggaaaacgtccgaattcagctcgcagatactctgaccaaaccctcgttaactcgcatgacgcttcgaggtggaccggtatctgatgctgttgagttgtcctgggtaaatctcggaaatgatctctatacaccgaattacccgaagatcttcccgtcacttaatgacggtgaaacctacacgttgaccgtgtatgccaaagacgagatgaacaacgttaaagaaagcgccgtcgaatttaactacctgccgaacaacctggtacgtctggagaaccttaagaccatctccgtcagtaccgccctgaaaacgtccgacaacacgccgctggctgtactgtatgccagccagctgcgcaagaaggacggttctatcgcaacagggaaacaggacgcgatactgacggtacgtaaggatgcggccttcggcgttacggtgaatggggtttccgcagcaccaggggagagcaaaaacgttcagctggatctgggtctgggtgacagccgcagcttcccgattttcccatcgatttccggcgtcagcggaacgtcagaatttatgctgaatatcgaggaactgaagtaa

SEQ ID NO: 144518 - DNA, 393 bp, Enterobacter cloacae
atgcctaaccagatcccgaacaaccctacacttccgaagaatttcgacattacgcctaacgagaagcgcagcaaggcccagctcgatgcctggtgggatcatccttactgcgtcacccataacgagaaatttcacgtgtactgtctgaacggcggggcgtgggataggccgacatggctggctcaggctgacacgtatgatgaggcctgtgaactggcagaacggaaacaagctgagtgggtggcacgccgggaacagcctatttactatatgacctttgagccgccttttcagatggtgcgacagccgcaacgccctgatcatgatgctgtagtagttgtgtcgttcgaaacgaaggaagaactggacgcctggagcgcagcgcagcaataa

SEQ ID NO: 144519 - DNA, 273 bp, Enterobacter cloacae
atgccttacatccccgaaacactggaaggaacgtttttccgcaagactattgaaacatcaccggaaggtgaaagcctgtactggtttcgccgtgcagatggcatagaattcgccgtcattgagtcggctcgctacccaggcaatgatgccgtggtaatttgcggggacgggcgcccaacaggcaacacgatttcagaatcgctttttgtcattactgatgacatgcgggcgcttccccgtggcgtgtatgaacaggaggcgcatgatgcctaa

SEQ ID NO: 144520 - DNA, 159 bp, Enterobacter cloacae
atggattctaacgctgtagctaacattccagtaggaataattatccccgcgaacgcggatctaaaactgatcatctttgactttcccagcatccgtccgctgggccagcagcagcaaacacgggttcagcaaggcgatacactgtaccgggtactgtaa

SEQ ID NO: 144521 - DNA, 327 bp, Enterobacter cloacae
atgtcacacaatatttttatagctgagtttgatgatggacttcggatgtacggtatcaatgacggtacagcctgccatatgcatgcttttttgtttcagacccaggcgcaagtagaacactggctgggaagcggtgatcgtgatacccgcaagttacctgtaatgccagaaaacgcctcattgacggaggaaaacgtcactatcggccctgacgaaacatgggcttttcgctcccgagcttcacgcaccgcacaatggatcaccggcccccttgaacatgacagtgagtcatgggaagaccagtctgtatatggccacagcacgtga

SEQ ID NO: 144522 - DNA, 516 bp, Enterobacter cloacae
atgaaaataaacatgggtagtctgaaaagcgctgcaccgctctttgttcttattggcttgatgatcgcgttttcggcctatgtgaaatcatgggcattgttatacacgttgctggcgtcatcagtcatgctcacagtcatgatatcgttgccatttcttgtctcgcctttacagcattcaaaattcatagtcctgcgaattttacgtttactggttattacgctctgggcggttggccttgtcggcgtactcttttcagttgtggaacgccttgtatgggttaatgctgacagctatccgtcatggctggcgaaggaactggattccccgaccatcacggatggtgaaacttttattaaagctacagagtcttttgagaagacctgcggtaaaaataaaggttctctcagcgttgtcgcaaggcataacggcatgtttatgcgctgcgatgatagcgtctctttcgacacctggtggaagggggtttaccaacttaaaacacctgagactcgatga

SEQ ID NO: 144523 - DNA, 882 bp, Enterobacter cloacae
atgtctagtaataacaacaagttatctcttgtcattgaagagtccctaaaagattccggggaagttatccaactgcttcccacgctaagacagaccattcagccgaaagttttactccgtctgggtgtgtttgtgccaacactgaaatccacggataagggtggccggaagagtcaccgcatcgatgccaccgaacccctttcgagactatccattgtcgagggtgaaggctacagccagatccaaatttatggcccgcgcctcgacatggactctgacttcaaatcatggtgtgggatcgtttatgcattgtctaaccgtccgctcgactcggaaggtcagctggagctgaatttcccggagtttgctaagttctgcggttttgacactaagcgcattgataggcaattgaaagagcgttttgatgcttcattgacgcgtattgcccgaaccagtatctcgttcattaagaaaatacccggtacagacgatcagataacgataaacatgcacctcgtggaatccacgtactacgacagttccaccgggaaaatcgtcatcaagccaaattcgaagctcaatacgctgtatcgcgtcgacggtaaaacccgactctacctgaagacgttgcagaaactggcccgtaaggagtccgcacaggccctgtatctgtatctggctgagttaccgagcaccttttaccgtatcggatttgaccggctgcgtgaacgcctgcaactgtcctcacatcttggcaaccagaatgccacagttaaaaaggcgctgggccagcttaaagagatcggttttctggaatactccatagacaaagaaaacggcgattatgtactgaatattctgaaaagaaacatgaagccatga

SEQ ID NO: 144524 - DNA, 2421 bp, Enterobacter cloacae
atgaaatatcagactataactttggctatggttttgctcggcgtctcagttccggtaacagctcagatttatgaatccagctttacagataccaatggcattgaagtacacgcgccttcaacccggatgctactcaatccggcttctaccgtaacgctgacgcttatttctggattggatcgctttgtaaacgttaaagtgacccgggaaaccggggcgcagttgtacaataccaccactacccgtaccggtgtggctgatcggctaaaagcagccgacggcagtgaattttacgggaagaaagtaactttacccgctctcggggaaggaaaactgatcgtccaggtcaacattttggatctgaatcagtcagtggtagctacgtataactacaactggacaatagacaccacacctccggctgcaaatgcccttacagcaaccacatcactgggcactggaactggagcggtatttaaattaggtcttgaagctgtggcgcaatacagctttttatcaacgggcatcgctgatgcggttggaatagataaaggcatatttgaaatctatcgcgctaatggaacccttttcagctcaacgccaatgaaatacaacgtcggtgacaagacgatgtacctgccctacaccttcgcaagtgtgaagcaaccgggcatccctgatagcaaccttgacgaagaatttcaggcaaaagccaaaatttacgacaccgccgggaatatccgcacgttaccgacccaaaaatttcggtttgataatacaattggtgagatatcccttttcgctgttcatgatccaaatgatgcaaccagcgtcgttcccggcgtgaaaaactacccggcctataaagccggtatggtggttaacgaaaaccctatcaggctggtgtataaaatcccgagatctaactaccgggcatatgcagagggtggactggaatttattaacctttattcggctgcaaaagaaatcgcttctgatgccacctacagctatgtcgaaatgacgctgccatttggtgccttcaatggggatatggctcgtatggccaactttggacagtgggcaggatacttcccgacctacacgatgacgctcaacccgaacgcaaacaagacgcctgcttttactggcacctgggaggattttcaggatagcaatggcacctggtataagtcgaaggacttcgagacagttctgtcttccagattgccgattaaaatcgtccgggcaagatttaatgtagaagccagaccgtttgagcaggaagttgggggacgcctaacctgccgcattccggttggccagacaagttgcgaagctcctgagaattttgatatggcggtagggactcagggttataaccgtacactttattatgtacgcagtgtcgcgaaccctattcttcgttccgagcagtgggttatgacacgctggaacaatcaaatcgtcccagaaattggtgagatcacctacagcccgacatctaagatactgactgttgaagctcatctcaacagagataatgattggttcgacggattcagactcctcggattctatcttaccgataagaactccaaacagcgcatgacgcctgtgggagtcgaaaagtccagaaacgcgggtaactacacgattgagtatgacctttcccggcagtctgaagggcaatacaacgttgaagtgaatattcaggatcgtttcggtaaccagacaaacaaaacctatggcgtgatagctctcgatgccacacccccaacggttgctattaccttcgaagggaagccggtaaaggatgacaccgtcgtctatggtctggaaaatctgcgcattgcactgagcgataacctgaccacacctcgcattactcgtctccagctaactggcggaccgacatcagacaatgttgaactcagttggtcacctgctggtaaagacatatactcgccggaatatccgcgcatattcccgaatttcgagccctctgaaaactatgctctcagtgtgacagtgtcggacagccagtccaacacaaaaacttacacacagaagttcagttatctcccgaataacttggtacagctgcataaccttcgaacccttgcagtaaagtcggcgctcaaaacctctgataacgtgccacttgcctatctgtctacaaacatgctccgcaagactaacggtgaaatagccaaaggcttacagaacgcgaccctctcagtacgtaaggatgccaacttcgggatagtgtttaatggagcggaggcagctcctggggagtctgtaaatgttaatatcgacatgggtatgggtgataatcttctcatgccggtttatccatcagagaacggcaagaccggagccgctgagtttatgatccaaattgatgagctgaagtaa

SEQ ID NO: 144525 - DNA, 468 bp, Enterobacter cloacae
atgaaattttacagaggtccgttgatcgccgccgtctatgcggcactgctgttcccactttgcggccaggctcagctgtacaactattcgtacaccgacacacgtggtacgaaagtgaatgctgaaccctccagagcgtatctcaacccaggtagcgcaattacgctgaacttgatatctggtctcgaccgctacgagcgcgttaccgtgacacgatcatcagataatgtgcagatgttccagagtgtcaccggcctggtgacagtggccgacaggatcactgccgctgatggtagtgagtactacggcaaatccatggcactgccggtactgggcgaggggacttttgcccttaaatccgaaaccctcgacaataagtcgaatgtcgtggccacaaccagctactccttcagcattgatacccgcgtatcttccccgcaacagatgatgcagattcctacgtgctga

SEQ ID NO: 144526 - DNA, 387 bp, Enterobacter cloacae
atggatgaagccggaaacagcaccacaaagagcagccggttccgctacgtaccgaacaacctgattgaatttaataccatcaagacgctggctgtgggcatggggctgaagacatcagataaccagccactggcgtatctgcggaccaacagcatccggaagaaagatggttcgctgatcacaggagtgcagaccggcacgctgacggtccgtaaagatgcggcctttgcggtcagtatgaatggggcgactgtcattcccggagattcgaaagacatcacaatagacttcggtcaaggggatggcatcctgatcccgatcttcccggccaccagcggcaaagttggcgaatcccgcttcatgatcgagctgccgcaaatccaataa

SEQ ID NO: 144527 - DNA, 699 bp, Enterobacter cloacae
atggaaaacacagtaataccgacggtaacagaaaacgagatggaagaggtgatcacccgtcacacggcatacgggcaggtatcggtaagccgcacgacaacgacggggcagcgcttgtatgcctccgacctcattcataaagaggtgattacgctgaccttcagtgaatcagagcaggttgagcgcgatggagtgatccgtcatcggctggcggaaggcagacgccgttccccacttctgaaagtcagtctgtctccggctcagtgggcctcaatgatcacatcgttcggaatgagtgacggcgtgccgtgtaccattaacagtttgattcgcggcgactatgagcgccagccggagattggctatattgagtcgacacgcgaacgttatgagcgtcagatccgggaagcctctgagcgcgagatggcgaaagtgaatgaaaagctgaaagcactggctttgctggtggcaaaaggcaaggcaggaaagcgcgagcttgaagaagtatatcagtctctgtccggcgcaatcgccaacctgccggttaatctggccttcagcacccagttgatgcaggaatccatggacaaaatcgtctcacacggcaaggccgaactcgaagcctccgccatgggcgtggccgctcgtctcggtatgaaagaaattagccgcttggcctcgttggaagacaagaagtaa

SEQ ID NO: 144528 - DNA, 330 bp, Enterobacter cloacae
gtgaatgagcacaacagtaaggtgacaaccatgaaagaactgatttcggtagctcaggcggctctggactatatcgatgccttacccagcgacatggtggcatcactccatacgatgcctggctttgatcgcgattgggcaacagaagtcattgccgatgctatcgtcgaaagtaacgagtcccgggaacagatacagcagcagtcgcaggcaattcagttgcccgagacctgtttctttgatggcccgggcaacacaacagaaacgtatttcctggcagacgatgtcagagagttactccggtcagcgggcgtccaatttagcgagtga

SEQ ID NO: 144529 - DNA, 255 bp, Enterobacter cloacae
atgaagggtaaaaatatcgtggctcgtgtcgtgcgggaagcgacctataagtgggaaacccgccacaagttaacgccagaacaatgctctgaaattaatcaactgatgcgtcggctttcagaacaccttgcctgccccgtttgcaaagcaatgtccttaaagcaactcaggcacgcagaatacattttgaaatgcggaacgtgcggtgaagagtttcttatcaataaacgtaaagaatcggctcacgcgagttaa

SEQ ID NO: 144530 - DNA, 264 bp, Enterobacter cloacae
atgacgaacgctgacgcatctaacgttaagaccagtccagaattaccaactctcgaacgtgtctatgctctgctcaaggacaactataaacccgcaagatttgctgatcgggatggggaaatctgggggcatgagtattcatggaatctggcaaaatcaagcctgcaagacctggagaagtacgggaaatcgtatgtatcgaagcattccgaccggatgggcgatggattcagttttggtcctgacctggtcattattcgctga

SEQ ID NO: 144531 - DNA, 141 bp, Enterobacter cloacae
atgcacaacacacagatcgccgtgctgaccgttgataaaaacgaagtgacctttatgcttttcgcctggcttcgcatcgaggtgtccaaacgtttgatacattacggaggcttgatgttctgcccctgtctttccaagtaa

SEQ ID NO: 144532 - DNA, 777 bp, Enterobacter cloacae
atggctaaattaatttcaactcgtgaactggcaacaattattactgcattactggtaaaaccggaattattgggcgagctggattctccagaaaaacatcgcgcactgatggaggatctggggcgtgttgtggcagagcattgcggcggcaatgtcacggaaatcgcattgccggaaaccgatggtacggcagttgatgaagctttgctggatggccagcctgtccgctatctggaaacaaaagaaagctccccatatctcatcgtacaccctgacgactcactaccgtctctgacgcataacgtttggatgcacgctgatcctgatggctgggaagaacatttcgatggcgaggacaatcccctgatggaggagttgagccagcagttccgccagcaggtgtatgcgcttctgacgccggaatcgcaggcaacgccttcagagattatccggacgttacaggactggcaactgggtgaaacccagctgccagaagaagactgtcagtcctatcaggtgaaggtgttgttagaagagaaaaacattcagtgtgaagtggtgaatgaatccggcacgacttgtttcggcctcatttttgagatcgatcggggtgtaccgacgctgcacatcgacacgggcagtgattcactgctgcatattcacgcggcacatgacggccttgttctgacaccagatgcgccgaaccacggatttgaagatgctccagtagaccgcttttcttataacagcccgtccctgttggtgccaggggtgtaa

SEQ ID NO: 144533 - DNA, 777 bp, Enterobacter cloacae
atgccaaaatgtctattacctgccgagcttgcggaaattgtctgtggattactggtgcaacccacattaatgaatgaattaaaaacaccggagtcgcataaagcatttatgcaggatatcgctgagctggtggcgaaacattgcggaggagagattgacggtgtgatcatgccggtggatcgcgatgaatcaagccaggccgattatctgacctctccggatgtaaccccttatctcgtcgtatctcccggcgcggacatgcactccctcaccgataatgtctggcgtcaccatgcccgagatggctggcttgaccatatcaaaggcagcgacgaagaaagccctgatgaattgccgacgcataaagagtgctcagttcgccgctacgccctccagcggatgctccttcagacacaaaccaaccatgctaatcttccctcgcaggtggtacgaatgcgtgattactgcaacctcgacgacgaacagcccgggtcttcagcagagtttatcgttactatggcgctcggcggtcatgcccagctggcagtacaggatgtggaatcacgcctggtaatggccctgacgttgttaattgaaaatggtgttccctcggtccatgtaaacgcgggtgacactgatccttcagttctgcacgtccaggctgctcacggcggcatggtcctttcaactgactccctgaatcatgaattcggtatttcgccgcctgacaggtataccaacggtcgccctggcttattagttaaagcagcctcctga

SEQ ID NO: 144534 - DNA, 468 bp, Enterobacter cloacae
atggataaatactttgaccagagcggaattgaaatcgacaacgctaagattcagtgtattgattcagtaaaaggcaccggggaatatatttatcgggtcacttgcaataaatgcaaaggccgtggtgagcgtaaacacttttataggagccgctgcatggcatgtaatggtacgggctatagcctggtcacaacccgtacatgttacaccctttccgcgttatatcgcacatacccggaagcggcacgcaagatttcagcagctcaggcagtagtgcgtcagcgtgctgtacaatcaaagacttccgcgttcaatctgtggtgtaagagcaatcaggaactggttgacgccatcacacagcaagacggggagaacagctttctgaacagtctgaaatcgacgttatcacggaaatatccattaagtgataaacaactaacggtcgcagccagaattctcgggatttaa

SEQ ID NO: 144535 - DNA, 297 bp, Enterobacter cloacae
atgatccattcatttaaagacagacggctggaaagctttttccgtaatggaaagtccacagcaggtattcctgctgatctgttaaatgcgatttcatgcagactgaaaacgttaaataatgtaaaaaacgaacgcgaattgttatcaagtagtttgcgttacgaacgcttaaggatgaccgcaaaccggtactcttccattcgagttaattcaaaatatcggttattctttgtgtggaatgatggcgtacataacgttcacctgtcggcgcatgattataaatcgctaatccattaa

SEQ ID NO: 144536 - DNA, 1182 bp, Enterobacter cloacae
atgaaacttttcggtattttatccagggatgcaggcacggatgcgatgttttatattcagaccagcactaaacaacaggcaagcttcatatttgatgcccttgtcccccggctgaatgcgcattgccaactgatcgacccactgaatgaaacaattataccttcactaagccggacgacactttctttacagccctggtcccagaatacccagacacggacgagtgagctgaagatgacgacgcacggtctgactctctccggggcagtgatggtggaacactcccggcagatcgtcgacttctgcgataacctgggcctgcgcctcgatgcacccaccgggaaacccagctggacagaactgatcaatgctgaccttgagcagcttaattccccgcgtttgttccccgtccttacccaatctggcacggaaggacagtttcagatctatgtcccggcaccggctgtcattgacgccgacgtagtcattgcaagcgtgatcggcgagtgttttagcggcgttaccccgtactgcgtgaacggcactccatatccgctgactgaaaagccgctgatccggatggaggcacacgttagtgacatgcatacacgggtttttgagctgacattcgtcagttataacctggcccttactgcgacggtatatgacaacaatctgcgccaggttctgatgctgtgtgaagattttggtgtcacccttcaggggcgagcgggtgcatcctgtcatgcctacatgcgtaacgaataccggcggcttgcacatgtaggtgtttgctcacgctccggggctgaagacgatgtccgcgcttacagctcatataaagaggaaaccctgatccggcagctgctgaatcaggcgacggcggacagcacattgatcccggcgcgacacggccagcaatttaacggtgtgctgatgaatgccaccccgtcatcagcaaccaccggatttatctacctgtcacaggaattcccgcaaggccagtttatgatgacggcggaagtggtgaatgccagcagcacgccacgggggatcagttacatcgaaacggtggacggttaccgttttattgtgactgcatacgacacgagagcgatgaattccctgaccgaatttcttgaagttaacgagacctattttaccccataccgctgggcgtag

SEQ ID NO: 144537 - DNA, 378 bp, Enterobacter cloacae
atgaataaattagatatcatttccagtcagcttaatttcatttcccttcttaatgctgtcggttattccgtatctgatgttgtatttaaacgtcacggtgcatcaaccgactttaatgcaggtttctggacgtttgtcgcggagcagaaagatcgctatatcgaagtgtcgtgcagcctgtcacatcctaccgcagaaggcacgcagcatatcgatgtgcgcattgatatgtttgaagacccgattgatgatgagatctcccggactttagacaccaacacctatgccacgaattataaatatattgagcgagtgccgtttactgaatccgtcaaaagagaatttaccaccagccttggtgatattatttcagaatag

SEQ ID NO: 144538 - DNA, 435 bp, Enterobacter cloacae
atgagcattcaggaattcgattttaccacctgtgatttattttccattctggactctctgaattattcccgcgaggatattaatggtcttactccggctattttccgggacggcgaattatcgagagtctctctctctgtcgtccagtctacccgctcggcggaaatcacgatcagccagcgcgtgagcaccgccacaggtctccgctgctatgtgctgttgattgcgcagcatgaagaccgcatccacagtgaagccctcagccaagatgctgaggcgcagtatcaggtgaatcgctttatccgcaagatggctgaagtcacggatgccagcaccaaatcgatcaagaaatgctctcagatgatgaaaaaaatcataaaggagcaccagtttaaagccaatccttctttcggccagagtttcatcaagggttga

SEQ ID NO: 144539 - DNA, 258 bp, Enterobacter cloacae
atgcctgaaaaaaacttcattgtcaaaattgtatgccggaatggcgagtatgagcattccagcgtgaagcttgtcgccagcgatactgaggcaaacgccagccagacggcattactgaatgagtgtcgcgacgaggtcgaagcactgagttttgaagacggcggagtgtatgatcttggcggggaattcttctatcaagtgaagagctgccaacagctgccaccggaggatgcggagatcctacttcgttacctgtga

SEQ ID NO: 144540 - DNA, 636 bp, Enterobacter cloacae
atgaaaagtaaatttgctgagctgccggtgaaaaacgggaaatccggtaactggacgctggactcctttgtgattacgccagaaaaagcgcagaccctgaagcttcgcgccgaatatacaaaggatcaggatgaatatatcccggcaggcgtctaccggcgtttgtcctgtgataacgaagtggtgatgtccaatacgccgatggagatccgtacctgtgaagctttcattgagcgagcaactggacgcatcctgattaacggactggggctgggaatggtgctgcacgccattcttcagaagcctgacgtgacccacgtgaccgtcattgagaagtctcaggatgtgatgaacctggtttccaaagcatttgctcacgatccccgcgttgaaattatccttgcggatgctctgaaatactgcccaccggcaggcgttaccttcaatgtgtgctggcatgatatctggccagatttttcgagatcaaatcttgatgaaatggaagcgctcgaacgcaaatatctccacctgtgcgactggcaggactcgtggggtaaagagcagtgtgaagctgccctgattcgtttcgcggcgctggaatcgtcactggagtccctgatgcagaaagggaagtga

SEQ ID NO: 144541 - DNA, 612 bp, Enterobacter cloacae
atgaagagttgcttttctaatttacctgttaaagatggaacatccggtgcctggacactggacagcttcgaaatctccaaagataaggcggttagccttttcctccgtgccgctacggaggatatcgacgcggttttacagcccggtaactatcgccgcctttcaaatggcagaaatgtggtgatgaccaatttgccatacgaaatccaactctgtcaggagttcataaagcgagcgacagggcacgtcctgatcaacggactggggctggggatggtgctgcacgccattcttcagaagccggaagttaacaacgtgactgtcattgagaagtcgcaggatgtgattaacctagttgccgaggcctttgcccacgatccccgtgttgaaatcatccatgcggatgctctggaatactgcccaccggcaggcgttacttacgatgtgtgctggcacgacgtctgggcgggattatcgagttcaaatctcgatgaaatggaagcactcgaacgcaaatatctccacctgtgcgactggcaggactcgtggggtaaagagcagtgtgaagccgccctggtccgtttttcaaggatggctgatgagcaaccttaa

SEQ ID NO: 144542 - DNA, 1269 bp, Enterobacter cloacae
atgagcaaccttaacagcgatttgattgcgcggatctatgccgcgtcagacaccccgttaacgaacgaagagctgtatcgcgaggtacaacgcgaaacggggatgtcggatgcagaactacagaaaatgaaggcgttcggctcggacaaaatgcgaaccagcggcgtcaagcatcaggttcgctggtatcagcagacgctgcggcaggccggggtgatcgagcgtgtcccggaaaagcggggcgtctggcgctatgccttcaaaaatgacaagaagctgcatgagtcctgggacaaactgtgcgtcgttggcttctcaacttcgctcggggcatcggtcttcgggaatgcgtacgcgttcttcagcaacatcaatgagcaaatccatctctgccttacgtcgcccccgttcctgctgcgtaatgcccgaaattacgggcacggcggcggacgcggtgagcaggcgtatattgactggctgctgcggattcttgagcctatcgtgaagcagctcgtgccggggggcagcgtggcgctcaatgtgacgcaggacagctttaatccaggcaggccatcgcgctctctgtatctggaaagactgacactggcgctgtgcgataagctgggtcttgagctgatggacagactgaactgggtgaaccgagcgaaacccccgtcgccgactcactgggcgtgtaaacagcgtgttcagctctgttcgtcttacgagccggtgctgtggtttactaatgacgcgcaaaaggttcgttcgaacaacatgcgcgttctccagcctcattcagagcagcatcagaaattgcaggcgtccggcggcgaaaaccgcactacattttacggggatggcgcttaccagcttaaaaatggcgccttcggcaataagacagaagggactatctccaaaaatacgcttatgtttggcaatgcctgcccggatacgcggctctgccatcgcatcgcccgcgaactggggtttccgctgcacggtgcaacgtcacccactcgactcgccgcattcctgatcgagttcctcaccaggcctggtgatctggtagttgagccatttgccggtctgcacaaagtaccggttgccgctgagcggctcggcagacgttggtatgcaacggacaaaataatggaatggctcgggatctcgcgcagcctgtttacagaaatgccgggataccagagcagcccgatactcgatgacctggttgccctttaccgtgatgaactgcgggaagggggatga

SEQ ID NO: 144543 - DNA, 309 bp, Enterobacter cloacae
atgaagaatttgactgaacaggtttcccccattgaactgcaaaagggcgaccgtgttgaagcgtacggcgcattaatggaagtgatgcacatcgttgaatccggctgtgatgtccccggcggcgtccgcgttgccgcctgcgtctcgcgggttatcggtgacaccaccggtactattccgcgtggatggctggaaacgcccgaacaaatgtcggaacggggggcaacctgggccgcagagcttccggctgggctgtactggaacattcagggcaatgcccatgccagagtcagccgggtgacgaactga

SEQ ID NO: 144544 - DNA, 447 bp, Enterobacter cloacae
atgactatgaaagttttttctccagatttatccaaaatgaacccgcacggcttatggcaggtggtgggtctggataatgacggcattgcgctgatggacaaaattagccacggactggaaggtaaagtcgctcattccatttctgaatgggcgaacatcacgccgtcggaactgcgcaaaatgtccggcattccgaacaccaccttcaatcgcagcgtaaaagcccgtttcactgcggatcagagcgaacgtctggtgcgtattattcgcgtcattgaacgggctgtagagctgttcgaaggcgacaaagaggcagcacagaaatggatgaacgagccaaaccgtggcttgagctggaagactccggcagatgttgtctcttcggaaaccggcgcactcgaagtgatgcgcctgatcacccgtattgaacacggagtctattcgtga

SEQ ID NO: 144545 - DNA, 459 bp, Enterobacter cloacae
gtgatcctgtatcggatgaccaagacccgctatattacgactgcatggtcgggattaggtgcgaaagaagcgggaggccgctggaacagtgtcggcacagcacttgtctatctgtccgagacggcctctctgaccatgctggagacgctggtgcatatcaatgccccgcagcttctggacgcttacacgctgctgagcattgatgtcccggatgaccagatccaggcctttgacttgaacctgctgccgccgggctgggcaagtgaagatgcgcccgcagaacttgccctgtatggcgataactgggctgaaagtggctcttctgttgccctgcgtattcccagtgcattatctccggtggagtttaactaccttttaaatccggctcatccggcgatttttgatctgatgaaaaccgtccagaaaattccttaccagtacgacacacggctgaaatag

SEQ ID NO: 144546 - DNA, 231 bp, Enterobacter cloacae
atgatgacaagcgaaaaaatctttaaaatcagtgtatcgctcgttgtgttattttctttcgtttactgggggcttgatcccgaatttatctgtaaatttgccagtgacccatccagtacctgtgattattctgagcgtattccattgcttaactttatttcttcagtatgggcattgatgctgactgtgactctggctggcattctcgttaagtgggtcagaaaaaattag

SEQ ID NO: 144547 - DNA, 333 bp, Enterobacter cloacae
atggaatccgaacagctcatcactaaaattactcagacactgaaacgccccgacggctctgaagtgcgtattgtggtgcagcagtcatttggcttaggcctcacgccttcgctgggtgtgtatgtcctgcgtcgcccgaccactgtcgacaactggcagttgtgcaaaaacacaccgcacaaggactggcgcaccatgtcggtggatgaataccagaaacacgggcgttctgaaatgctgcggtacgtctccatcggcgaaatccttcgcctaagcgccgcgattggcaaaccgatgagctacgttgatacctgtccgggtttacagggctga

SEQ ID NO: 144548 - DNA, 261 bp, Enterobacter cloacae
atgattaacaaacagggcaacgctgtaaatctcccggacttaagccgactgtatattatctcaggccgcatgatgtttgatgatgaggaagaagtgatgctggttgaagccgactcctccggtgaagcagaagcggcattccggcgacatatcgccgacagagaggcacacattgaaaaggcacttgtcatttcgtcggcgtcccttcaatcactgttaccagaccggatcattgtttccgccctgacacataccttataa

SEQ ID NO: 144549 - DNA, 807 bp, Enterobacter cloacae
atggcaaataattacactcaggcatccttcacaattctctgttcacaggaacaggctcagatggctctggacgcgattgcgtatgttacggacacggatgtgtcggaaggtgatcacctgctgtctaaacctgcttcagagtgttccctcactgaactgctggtcctgggtattattcagaaccacccggagtgcgatccgtttgagccgacttttggtcagccggagtcaccagaagacaattacgagctggaactcaaagcggaaatcaccggtagcggtctggcaatcagccatgatgaaagcattaacctcgaccacgcaatcgcggtaacaactgccgtgttgtcggtgtttaacctgcctgaaatggtcacaatcaatgccgctttcgtctgcgaccgaccacgcgaaaacgagttcggcggtgcgacaatcgtggtgactaaagatacacaccactatgaggaaggctttaatttttcccgcctgatgaacgaagcccatgatgccggtgttcagtatgcgttggtgaaagtgaaccagtataaccacgaaaacacatacacagaatgctatctgatgagctgcaaagcgtctgaatcgccttatgacgttgcacgccaccgcctggcctcggacgagagtacttctgacgatcctgatgaggatggagtcatcattctcagcgaagaagacaacaccagcatggcgcttcacagcgtcaccgaactgacgcccgtcgtgtacgacagcctgagcaaattgctgccttcgctggacgtattgtgccccgtgactgcctga

SEQ ID NO: 144550 - DNA, 447 bp, Enterobacter cloacae
atgttcaataaacttttgattgcgtccgctagctgcatcaatgaatttgcgagtgaagtcccgcaaagcgtcttcttttccattgatacatcgctggctcagcgtatccgtgaactggcggcatacgtgaaagagaatgatttgtacgttgcagagtttttcttctatgactgcctctggtccgaaacatcggaagaggacattgaggaactcatggcgaaggctgcatttattgaaagtgacagtaacgggcaggaaaccatgctccgggacgtcatgccgtcctctcgcacggaaacaacttccatccgggtcatgaaagaatcatttcaactgacggctgtaccccgccattgcggtgatgacatgatgctcaatacccccagaattccgttggcagagctggaatcaaatacgacggttttaattacccagcagtattcgtga

SEQ ID NO: 144551 - DNA, 1803 bp, Enterobacter cloacae
atgtatatcgaaataaaagaaacattccttgaattaccctcagaaattcaattttctgaggcggctaacgctgccattctgacgcaggataaatggggcgatgtctggcaaacactgaagaccgatgcggatctgaattataccgatgccggtgagccggtcagtctcgcatcgcgcgtgacgacggcaaccagtgccatttatcatgcgattaccgaaggctggaccatgtgcgtcggctacagcggcgggaaagactcccactcgctactgcacctgttcctcatggccctgatccgtgccgtacggaacgggtcgaacgtcagccagcaccacttcattcagatctccaacaccctgattgaaaaccctgagatgcatcatcagtccacgcaggttctcagccagctccgagcctttattgccgaacagcaactgcccgtgaccgtcctggtggcccagcgtttcctgaccaaaatccagtacgactggagccttcgggattatatcggccgcaaagtgtttgagggcgggtatgtgcgtcttcagcccaatgttttctcgtcgtccctgaccgaacgactgttccatatctgttgcagcctcgattacgtggaggcccagcgggccgcagcggtgcgggaaaagttactttctggcgaggtcgaagatacggcgcataaccgccgcatggcggagccgcagtttcgactggtgcaggaagccaacgtgctgcatatcgactttctctggtcactgcattgctttaacccgcgaccatttcgcgccatcgaactttaccgccaggtgtgggaagggggggcactggatctgctcgacgatgagccagctatgcaacccgtaccccgcacgccgatgccagcaccacgctggatgaagttgccggaaggccgtatcgggacgtcatttgacgggctgtctgatccgtctgccgaaatggcctattttgacggtcgggaggatgaccgtgcttcccgcagcctgctgagcagcggggaaagcctgaacatcgttgcattcgaagaagaggatgagctgacggtcgatgaagacactgcgtcctggattatctggcatgaatatgacggattacgccagcgtgtgtctgacggtgagtttacccccgtggcggcggcacagtacctgcttagatacggcgccgtccgaatttcccgggggaaaggtgcggtgtaccaccgcctcgctcaacgcgggcaggccttttcacgtcttggcattaacgaccagacgccgctgccgtccctgctcgtcagccaccgtttcaagatcctgaccgactgcgattaccgcctgctcgttgcccgtaaactgcgggggcagcggcagaaactgcgcttctggtgctgtgttgcggcctgtgtggcgctgcacacccacaaccgaacgcctcttggggcatggatcacgacgcaactggagaacgaacgccagcaacatctggcccggacgggtgacgaactgaaagccggtctgctcgacgctgtactgactctctgtaacctgcggattaagcctcaatcaatgcaaccggaggaacggttgtattaccgggctgtcagaaaacgctttctgacgacgttagccaggtgtatttcccaggagtacgacgaaaccttacgggaggttatttgggcgctgaggatgctgtccggtccccagtcttcgaaaaagacgggattccggcatgtggatgattgccgggagagtactgcggcactgttaaggcctctgctgaatcgtctggtccgcctgctggcgtga

SEQ ID NO: 144552 - DNA, 495 bp, Enterobacter cloacae
atgaccgataaagaggataaaaaaaggaacttaaggaagataaggggcatttcaatcaactgggaatttaataagcccactggtaaggaacacctgctattaattattgccatagtggcatgtattttccctagtcagatttttttcaattcctctctatggagcggcttcctgtatttaatttgtgttgcgggtagttatgcatacctggctatacctcattttaaacatcgtaaggaaatctggaagggatggcttgaccagtcgctgaaagagtaccagccgcttgatctgcaagcttgggaggtttttaaggcccgcgttagtgaggaaggcatgacttatgttgcttttgaatcatggatgaatactgaggctagtgctttatataaagaacccaaacaagaatggtcatttgtcgacaaaacaccggtcggagaaaatgatcagtcagaacctgttcaacagatttcagtaagtaataaaaaagaatag

SEQ ID NO: 144553 - DNA, 225 bp, Enterobacter cloacae
atgactattcaagaaaaaaataccgttttcatttttaatgcctgccacgctgacaaggccactgcctccagcgccaatgcactttacagcctggaagttgaatatccgatgaccctgaatgatttgtcattgctgtgtgagtctgtcgcgaaagcgttggatgcacctggttgcgtgaaatatgaaattacgaccgagccggtagtggaagcggatgaagattaa

SEQ ID NO: 144554 - DNA, 699 bp, Enterobacter cloacae
gtgaagacacgtggaatgctttttaaagatgaaatggtcagggcaattctggcaaaccagaaaacacagacgcggcggattatagagcctcagtacagttcacctgaatggtcggtaaggcctgcgcaaacaccgcgacatcgtgggcatacgcatgactggtggcttccaacaggaactcagccaaattcggcgcttcgcgcctgtccgtacggtgtagttggcgaccgtattactgtacgtgaagcgttttccttgctcgggaatgaagatgcgtgcgcggtggactggaatgacaacattgtgatggacagatctgaagcagcccgcatttaccgtgcgagctgtgaacagcgttcgggggattatgggctgtggtcgatccctgatgaggccgactggaagccccgtacagaaaatatgaagttcgaaggtgcgtggacaccttctatccatatgcctcgctgggccagccgtatagtactggaaatcaccgatttgcgagtagagcggttaaacagcatcagcgaagaggatgcgaaagctgaaggagccccaaccgaatgttgtgttattggcgataagcattttcttggcttccgcagcctttggaaagacacctatggagaagacagttggcaggccaacccgtgggtgtgggtaatcaattttgagcgcattgctggggaagtcgcatga

SEQ ID NO: 144555 - DNA, 309 bp, Enterobacter cloacae
atgaataatgaggtgagttcgctgggtacggaaaaacccgaaggtccttttgttcttctgacgttagtcggtgatggttttatcttcgatgagcggcacgagattatcaggataaatggaagaccaaagcaggtcggagtaaagcgaaattattttgaatctgatctgggggaagggaaggcgaaatactggacagtggatattaatgaggcccatgtattccccactctggatgccgcgaccgaacagctatgtaaattaagccgaccacacctgattaaaatccgaaaactaattcaggaaatttaa

SEQ ID NO: 144556 - DNA, 978 bp, Enterobacter cloacae; identical to SEQ ID NO: 144050

SEQ ID NO: 144557 - DNA, 2586 bp, Enterobacter cloacae
atgagcacacaaaaaggctgtaaattctgtacccgctatgggttgccacttttacccgttcgcccggcggttgtggcaaaggatgatgcattacctcttttgccaggtagcgtcaccgtacctgcagtagcaaagggcgaaactgcatggacgggacgcttgctgcgtgagggctatttatacatctggtctgagtcaggtaaccgctggataaattattttgtcacttgcgaaggatattattacccgctgcctgaaaatggagatgtgcctactgatattgcaaatggtaaggctaagccatgcgttactcagccagaagaacttgcgagtgcatcactgataacgctcccggtaaagcccttgggcatgaaaaacggcgtgttctggttctgctggtccgaagtggaatggacaccagtggtccgcacaaagcatgaagaagcgtcttatcgcatccagtatatgcaaccttttgacatggatggctggattaatagcggtaaggcggaccaggttattgcaatatcagcgctgactgaaactgtggcggaatacagcagtgaaggaaaaaacagcagcggcaggatatggtcccctgcaccatggaaagctgccacgacatttgaagcccttttaattaaaaaatcggcagacaagctttacccaaataaaggggcaatgattgtgctgcaggatccacctgcagtcttgcaggatctctccgccgttatagactttgaattgcaaaaaaacgtctacaaaaaagccgaatatcaaagggagcttgctctggcttctgcaattactggtttgaaagaatcgatgaatcgtcagtttgaacgtgacgctattgagaagaatgagagccaggaacgcaatgcgctttatggcccctttggctatagcgtgaacggtgatgttccggataatatgtatacctcgatcggtgatcggaaagtaaaatctgaggcagccaggaggtgggcggagtatgaacaatactatgaaccatcaaaagtggctggttttcagaagaaatttaatcaaattttacagcagtataatgacagaatcgtaagcccacgtactgaaatgtatcttgagtggataaagggcagcgtattgctcgaatattttaagcataattttgatacccaggaattgaaaagtggtattgaatatgtccagacgctgaattactgcattgccgggatgcaggacaaagtgggggtcattcgtcattttaatgatttgttgtcagggacacccacggatgtaacaaatatactggctcgtgctttaatattaaatcaggatgttctggctgaaaagttagctaaagctactgaaggcttttcggactggtttgccattccctggaatggtatcgccgatgcttttaaagatggtatcgaaaaaatgcgtgacaatgctgccggtgtggcaggaatattcatcgggttactttcaggtatattaacaaaacagatcgcacaggcattagaatcaaacaaagtctacggctgtttagttgcgatgggtgcaataacaaataaggcactggttcctttagaaaaaacagggaaatataaagagtttgtttctgaagttgtcatgcaactggctaaggaaagcgggctggacagcagagtaaataaagacagcttacgacattatgtcagacgggagttgagacgactcaggatcgacgggttgccagtggaagtggaggaaacaaaaaaattcctggttatggttgatattgacaaagtgcacgagatggcatcgctgccacccaaagagcgtgctattgcattgagtaaattacttcgaacctcggcagacgttgaagctcagcaatttagccgctggcagggcgctgtccagcgtggagtcacaaaagccggacaggctatgccatttacattaggggtatgttccgggattcttcaggttgcagcactttttatttctgctgatattcacaataagaaaacgctcactgccgatcagggagaagcgcattcccgattttgggcgggcgtattaggccttggaagcacgacattaggcattattgagaccggtattaaacaatttcggttatttgccaatgctgcgtcgaggctccgggttttcagttctgaaacctttctcagatgggttggttatgtggggaaagcattaggcgtggtggctggagtgattgctgcggggtatgatttatatcatgcattcaatgaattaaataaagggcatattggactttttgttgcttacggtatgtcagggctcgctggtttgtggcttgcagttgctgtagtttgggcgatacctgtgataggaacgtttatagcagttgcgattttgataggcactactatttatcttgcgtttcagaatcgcgataacattcaaaaatggctggtgcagtgcttatggcgacgaatacctgttggcactgattatacgaaggaaaatcaagaaaaatataagaagatagaagctgcagaactgcctgtatggccaaccatgaaaatggaaatggatgagcttaagttagctctgggagtggagggataa

SEQ ID NO: 144558 - DNA, 837 bp, Enterobacter cloacae
atgcaatcagaagaaaaacattctggcccggaactggtgcctcatgtgtcggatgatgttgcattgctaggtcattgttccaaattactcaacaatcaaattctgcatggaattagttttgcttctgaaactgattatctcttcactttagaagaatacaatgcagaattaggtggtctggttatcgactgggctcctgaagatgtatatcagttatacgtcgtcgcaatggaagagtcgttggaaaacgttaaatatcttgtctttacaaaatcactctatacaactgatgaattcggaaatatcaaagtgaatccgcttcttgaagcagaaacacgttggtatatgtcgcagtcatttgagcttacatgtgccactcatggtatagatgctattgagtttaggtcagagcttaaaaaaagcttgtatgaatacacgcacagttttgaaagtgaaaatgttaaattatctcaatatcatcaggataaagagattattttgcatgattgtaaggaagatatgggatgggatatctttttcgaccgtgactatttattggcagaaaataaactggcagtaaaatggactgatcgggatataatggatgtctattctaaagcatttaaatcaacaattaatttgtttgaaaaacttgtcgtaaataacaagttaacattaagggatacatcaggttgggttatcgtaaaccctacatttgagcgccagttcgaatggattgaatctgaagtattcgaaattgtagggactcatcttggttacaacgttgatgctatcagaaaacagatggttacagcgtgtaagatgaccttcaactaa

SEQ ID NO: 144559 - DNA, 1053 bp, Enterobacter cloacae
atgactaacgccgcaactatattagaaaccgaaaattcattactggaagaaaatattggtaatctgttacccgcaaatgttatatctacaaaagcatatgcgaataaggaacaatattacctggttaaggccaaagatttgtttggtattcctgaaatgtccgaggatatgatagttccagtatttaaacgtttatctccacatcgtgcaaacctgaataaggattatataccgaatgctcgtatacttgagcaagtagtacaattgctcgtaagtaacgatatagatttaagtgtatgcctgaaaggggagtctggttctggtaagactgaaatggcaatgtacattagccatatgctgaattggccgctaaccataaagcaaatcaacagtaatattcgtgctgatgaacttgaaggtgagcgtagtctcattaacggaaacaccagttttgtgcccagcgagcttgtaacggcgtttcaggaaggccacctcattcttctggatgaagtggacaagattgaccctgataccgccgcgaagctgcatatgcctatagagcgtaagccctggtcactagccgccaacggtggcgaagtggttaatgccaataagtttacgcggtttatgggtacagcaaacacaaacatgagtgggggatctcgtaagttcgtttcatcacagcggcaggatgcagcgtttattaaacgcttcctgattgtggagatggaaaggccttcagaggttgcattaaccaacgttttgcttaaacgctacaatagcctgcctatgctggtaattgaaaaattcgtttcggtagccgttgcagtaaacaacataggaactgaagacagtgtaatggatattcgtcagcttgtggcatgggttggaacgtcgatgacgttaaagaccatgtccttactggatacgtttaaaattgcttttgcgtcggctctgcctgcacatgccagtggtatggtgctggaagccatcgatttaaaactcggtgacgataagaaccgtacaatggagtattacactgcaaaaaagtag

SEQ ID NO: 144560 - DNA, 1128 bp, Enterobacter cloacae
atgactttcaatacttctaaacttaataaagtttccgctaagcaaatctgtgataactttgtaaaagcacatcctgatttgttggaaggtgctgttataacaaaaatcgaaatcagtggttgtcagggctctcggcgtaccgataaaatcgaactgtcctatggcggcgatgatataacggaccagaagagcgtgtctaaaagtgaagttcgctggatagacataaaggcactgagtttcaaaagcactatcactagtcgaatttcaacactctgttcacggttgtgtatccgctatagcaatatgtggattttgcctgtcgaaagaatggaggagtttctggaagaggcacaagaaattgaacgtgaatttcaagccggtatccagaatgtggttgataactatgacactcatattcaggctgagaaagatcgcagtccgttgatgtcagatttaatcgaccagttgaaattaacgaaagatgattttattaaatcattccggtttaatctggcgcatttcattccgttttcaccgattagtgtggagggggatgaaacacaggacttttatcaggaacaactgataatcgatttggccgatgaagctatgaaggtttatgcaaaaatcagtaaaaatgataatttgcgttccagcacgattgaccgattaaaacagatgcaagataaaatcattagctttatgttcattcataaagaggcggttgttcttgcagaagctatcaagcacgtcatgaataatttacccaaaggcgccatttcttctccccgtgatgttgcggtgttaaagcaatggttctatttcatgagtgatgcgtcaatgctgaaacgtattatttctggtgagcagaaagtaacagattggctggattccattacccggtcattcaatattgattcacaggataatacggctaactctcagaatgcttttgaggatgatgttttttcttcagcaaatgtgttcagagaagatccgcttgaagaagttgagaaaaacgcagtaactgcacctttgtctgctgttgtccctgaagaagatgtttcccttcaggccagtggtagtaatagtgcttttaacagcgaactcgaactgaacggctggtga

SEQ ID NO: 144561 - DNA, 2013 bp, Enterobacter cloacae
atgaaatttgatttgaaatcttcaccccgccatattcaacgcctgacgaatatagccagcgtgataagcggtataagtggtcttaatgttgtaatagacaataaggtacatacaccttatttcaacagcgaaaagaacgtttgtgtattacctaatggtgattatagcgatgagaaattcgtcaagctaattgaagggtttatatgtcatgaagctggacacggtcgctatacagaacatgaagtataccgtgaagcttttgttggggaactgattaatgcagatggcttcatcagtatagatgataagctgaacgctgaatttcaaacccttaaacaaaagaaaatcgcatatgcccgggcttaccgtctacatggacttattaatctctttgatgatgtccagatggaagagaaaacgggtattgactatcaggaggcaaaaaagcgcctcgcggtaagttatgccttgatggttgaagctgggcgaatgacggttgatgtttcttcaagccctcaaaaccctgttcagtttattgaaatgttcctgcttaatacattgcgggttaacgttctccagcaagaagggcataaagaaacgcttgatccatttttcgattatgcaaagaaaatccttgagcctgtaattttagaagttgatgagattattcatcaggctctaagttgcaaaagtacgcaaaattgcgattctctggcgcgtaaaaccttggctcttttagagcgtttacgggatgaagccaaagagaaacagcaagaagaggatcagaataaagacccgcaaaacgacacagacaattcatctggctctgagaatgaacctgattccgaaaccaatggtgacaaccagggtgaaggggatggagattccgaagagcaagacgatgatgctggtaatggtaaagcacctatggaagataatgagccgtcagagcaatctaaaggggatgaagaaagtgctgagagcggtaacggtgaacctgatggagagcccgaaaccgatgaatcggctaaccctgactcgtatgatgctgacggaactccttcccaaatcgacagttccaatggaaatccttccgatggggaaagtaacttttctcctgagcagtggagtatccttgccaaattgctggatgattttcttaacagcgatgaggaaagtgaagattttcatgaggctcttgcaaatgaaatctccgtaattgctgccagtgtgtcggatgaggttaaagctgaatttggtgcaaatgagtgggatcttccagatttgcttattgatctgaatgtctacaatgaagcattaaatatcagtcagactcttggggcagacttatctgttttacagcaggtaaaaatgcgtggtcaatttaaaacccgtgatagaggcttgtcattcgacattaatcgattgatccagtctccgatgggtgtgagggatgtattccggtcgcaaagcgaatctaaaaaccggggccacgtcggcttggttattgttcgtgatatttcaggttctatgattctggatcaccgttatatccacgcaattaagactgaccttgcattaactttggcgattgaagctaattcaaaaatgcacgttgctaatgtgatttatccgtttgtcgacaaagactttgaagttatcaaaacgtttgatgaaaacgcggaagagacgctttcaaaattttcactcggctgtaaagggaataataccccaacgggttccgccttaatggctgctgtagaattgttacttgaaagccagtttgacaggaaaattgttttccttattactgatggttatccgacagagtctgattacaccattagtgatgttcttacggtagctgaaagtaacggtattgaaatcgctggtgtaggcattaaaactgatgagttaattggttttgatgagggcaccttcgtaaatgttgatgatatttctttactgccgaatgtggtcagtaaattagtacatcaaattctatctaattaa

SEQ ID NO: 144562 - DNA, 222 bp, Enterobacter cloacae
atgactcagataaagacttaccgtgtcgagtatgaaaaagtcgggatgatgcatcgtgtccgtatttttggtcgcatgggtgaagttgtcaaaagtgaattgccaaaagaagtaattctccgggatgtatctataccggagggtaatgtaaaaatggcaacatcaatggttgatggttttatccagcgtcttgaaaataatggcttcaagtctgaagcgtaa

SEQ ID NO: 144563 - DNA, 1332 bp, Enterobacter cloacae
atggcccttattcttagattctgcgttgtgggtttctccctgttttctgcatcgcagagggcattgagaaacccacaatgccagataagagagaacaaaatgacttatgcatcaccggctgttaagcgtacaccacatgaagtatctgagcactttattaaaatggttcacgctcgtgttgcggaagcctctggctggcgctatgtattcgatagaataccggcatttaaagatgcttgtgataaagcacctagccaggttccttgccccttcaccggggacgggaaatcaaagttccgtttccgaaaaaaagacctctataccggttgtgctattcacaatgatttccctgtgaatgcattttgtgacggtattgatgtgctggcagagtattacaagttgagcaaaacccagacttgtaagaagatcttgactgatttctttggtatggatctgtacgctccgttaactgatgcggatctcgaaagtgaacggcgttataaatcaacagttcgtgcaaccgaaacgcttgatagcgatgaagttgaaaaacggctgcgtaaacttgaagtgttatatcactatacaggtgaaatcaagccagggagtcctgtgggcatgtatctccgaaatcgtggtcttaaacgaattctgagtaatctgcctaaggatcttggtctgaacaaccgactttactatatggataagtcactagagaaaccgtcaacttacccgggaatgatcgcaatttatcgtgatacacggggacgtcctctgacaatccatagaacgttcgtagagaaaaatggtgataaggctcgggtagagaatccgaaactgatgatgaaaccgcctgccgatatgaccggcggctcaattcagctgtacgacccacactacaactcaggtacccgtacctggacgttaggtgtggctgaaggcatagaaaacgcgctgtcagtaactgaagcgacttcaacaccgtgttgggctgcgagctctgcctggtgtcttgaaaacgttgaagtgccggatagtctactgcctcctccggatgtgaaagaaatacagttttacgtctgggcggataaggatgttgtgaattcaagaggcgcttgcccgggtatggagtcagcaatacgacttcaggcccgaatggaagagttttttgcaaagcgatatcccacttcagagctgacaattaaagtctttgaaccagatttcgatattcctgaagggacgaaaggaatcgactggaacgaagtattgaaattaacaggacctgatggcttcccagtaaaatgggctcctgaatgtcttgctcagctttaa

SEQ ID NO: 144564 - DNA, 525 bp, Enterobacter cloacae
atgaaaactgaaaatcaagacttatttaataagtttgctgctgtgatttcatctcgtatcgttgagcaaccatcatcatgctattatcttcatgatagtgaagttgaccttacgattttaaaacacagcataatagataaggacaaaaacctgttgtatgtaattcgcccttcaggtacatgtttgttacgctgtgataaatatttttttccgaattactatcttacctgtcgtggagattataaagcattcatttatgtgcattttaatcttgctacaggaaaagcggaagatatcacgtggcaacaagctttagaagttttgtccaaaccgggaaggcccccattgagaggttctcttggaagatttgattatttaaaacttgtggttgatgatcttcgtacccgtggttatgccgattttctaccggcatataatctggatggacttcgtcattttgcagtaaaggatgagcgaccatctcttgtcagttatatcgacaatgtcatagctctttgcgcataa

SEQ ID NO: 144565 - DNA, 879 bp, Enterobacter cloacae
atgaaattagctacagatcttgtcaatgcagttctgataaaggatggtgttgtaccggtttccattactgagatgcctgtacagtctcttgtaaatcctttgacacaagtgcatctcagcctgtacctgaaaacaacgcatttatcgcggttcgtccctgactatgtcgagactctgaaagattgtccggtatcgtatgatatcggccttgaacttcagcagtgtatcagcagtgctgaattgctctgcgaagacatggaatcgcttgaatttatctctgtatggatagaactctatacgtgtaattcaaagcaacaacggtttgaggaaagtaacttttctcttcgttccgaagatatcgagctggctaagatgctagcttgttcccatgatctcttgattagccaggctgcttgtttctggcttttatattttgatgacttcatgagatatgtgcgtaatagactctgtactttactcagagaagttttaatactgattgccggactgcggaatgcattcttgcaccgtaatgaagatcagttaattaagagagtgaagtacgggaatgaaatgctggaggtaactcttaaagctattgcactatgttcaatggaccggtatctgaaatcatttacctctttacgaacagaagcggcagcttcgggttttatcaaatgtgttaagtcttatatcagtacagggtggagacatggttatatagtctgtcactattatcgaaatggacagtctcttggtaagtcattaccactttttataagtgagacgtctgaatacagtatacagaaacgagtaaatcgtcttatatcttccacgatatcagggcgaaataaagatttaggtctttctgatttctga

SEQ ID NO: 144566 - DNA, 936 bp, Enterobacter cloacae
atgaaaattatcgagaaaatcattaatgcatttctgatgtcacgcaatcacgctgtgaaggtcagcaatgttatctgcttaactggttgtgacggtaaatttactggtatacgctgtgacgccgatgtttcatttgattttcttcattcgtatgctaacgcatacagttcaatatttttagatatcccgttccctgggttcgaagaccagaacattacggattgtgttaaacgtcagttagatgtagtgaaaaataagcagaatcggtctttctttattgaccatattagattcccggttactgtcaaggaaggattcactctacagcgcggtggtagttacgacgtgactgatagtgaatataacaagcaacgattgctgcatttaactcgacatggacgttttggtgaagactatctcacgtacaaagaaggactgagtcccttcttttcatttgtgaatgtagaattacatgaaactatgaaggaaggtattcgtttagcacttgatgttttaaataagataacaactgaccaacctgaccgtcttataaaggactttaaatatcatgactgttacaatagttataatgttcaaatattttgtaaggggttgccagttgatattctggaaacgatgatcgcacctgactttttgtcatccgacatgtctggtagtcgtcagatcatcaaaaatgcacgccgctatcttaaaggctttgcccacagtaatcgtgtttacatgaagtacggttggcgcttagcggatatcgacacgtctgattatgctaaagtcatgtcagataaagaaatgcatgccagagatgatcttaaaatgttttgcggtgtctttgttaaagagtgcttcgcatccggaaaagatgaatacgaagcctaccttcaagaaagacaacacgctattcgttacgggtattaa

SEQ ID NO: 144567 - DNA, 921 bp, Enterobacter cloacae
atgaaagctatttataaattaattgaagcgatgctggtgaagatgggttttgaaggtgctgcgatccaaagtgtcaatctggaaaccggagtcattcagagtcttgttgtgaaggttgatattccagtccggactttaaaaccgcatttaatgcgttatctgcgcgactgggagcctttatggggccctgacgtggataaccatcctgttgcacaatattgctcaggagctgcgttgttgaaggctgggccggtcactcttgaaaccttgcagtttgaggtttcagtgtcagcagctcacctgcgtcttgttgatgttgagccagactggctgaatgaaggtgtgaaccgtgaaaaactggactatgtctattatcgttccagcaatgcagacaaggatttaatccttggtatggttgaaaacggtcacaatttcatcagccatcttcatggccagttacggtcacgcttatctcaggttcttccgcttattttcgcagttacagaaaaggttgcggaaagttcagttccacaagtgttaaccaggttcttcagtgttgaccatcaaatcaatactcagatagtagttgaaccggtacccgtttcagttgcagaccagataatttctgccaactgggatgtgagtagtatttctggggctgacaagttcctgaaccatgttaatcgttacctgtcgggtagggtgatgaagcggcgcatttacgctgttattgaatcttgcaacgatggccctttaactctcgacgcgaatctaggttgctttacttcacctcttctcgtcactgagtacaaaatggttcaatcgcattcttcatcgctgtacagaaaggctataaataactcgcttaagcaaatcaattcgtatgctccagagcattcggatgatctgctttacatgtaa

SEQ ID NO: 144568 - DNA, 936 bp, Enterobacter cloacae
atgtttaatgaaaacgatgatataaattttgttagcgccatgcttaaaaaacaacttggtctgacagtaattcaacaggatattaaactgtttgataagtctaatttctttgaacaactctcattcaaagcagaagtggcgactgatgatttgttattctatcttgattcatatatcgaagagttgataaaacataaagcgccgtattctgaaaccgaagttctccggaataaaatcaaatacctttttaaagtatatgaaaagtctgggtttcagaaaataacaattcgtggttatcataatgcgcatagcactatgaaatttttcgatatagcaacatcaatattggcggcctcagaatcgttgcctgaatatgatgaatttcagaaaggtctcagaaaggaaatttatcagaatagaatgagtgttgacgggaaagttcttattgcccggtatgcactgaagcaatttttccattctgattttggcgactttatctatgagtttgagaaaaaaataacagagtgtctatttaattctcttcaggttatcaagtctgttaaaaattcatttcatagtttaggtcaatatcaatatcaccgtcgtgtaaatcatgaactgatgttgcatcttgagctgaacactgatgaatacccggcttgcatgcctgatctttacattggtttcaatgagtctgaaggcacgacgggggcgtattgcgatgatgaaaaactcattcgtctttatacctgcgtaagttccggacacgatgtgccggttatgatgaacgttcgtttcactggcagtgatgggagtgttaagtgtgaatcctcgcacggaaccttctcttctgtgggaccttgtggccgagtacaaatctgtgacagagcagcgttgatccatgaagcgattgaagagtttcgggacggtgtttaa

SEQ ID NO: 144569 - DNA, 957 bp, Enterobacter cloacae
atgactaattatactgataatcaaaactacgttcgtgcagtactggcagacattggcattgattttgatgagacagagattcatatcaatgtctctcactgccagggcgacgaggtttctttttcttgcagtatatcagccagtgaattaagacagtctgtggaccattatgcggaaacgcttaatgctactcaactggatggactggatgctaataccctcaagaagcgcctggtttacttccttgaggtcttcgaccaagtttccggtcagtatctggatatctctggtaaacactacgcgactagccgctttgaatacgatgatgtctgttgtgatatcctaagtctttctgcggatagcacacaacctggtggctatgatcgtgaagaatacaaaaaactgatggaagttgatggacaggttttaatcgcccgttttgcactggaacaattctggaatacgcattttattgggcttatcaactatgtatcagatgaaataacatccggtcttcatgatgcttatcgcactttcagtgatataagcatggccgcttatacatttagtgagtattcatattcacgtcgaattaccgacgaactgagtctgcatatttcacttcaagaggacgatttcgacgatcaattaaccgattgttatatggatgaaacaacgctgccgtccggcaaagtagttttacgtcgtaataatgaatcgattattgatatttatgaaagttatgctgcaaaatcttactttcatatggttgctcatgttcgagtccttgatcaagatggtgaagtcgttaatgaactttaccaaggggtgaatgtatctgaattgactggtggccgggttaaaatccatgaccgtcaggatctaatttatgaagtattctccacattacgtaaactcatccccgctacagaggttaaagtctccgttgcggcatga

SEQ ID NO: 144570 - DNA, 270 bp, Enterobacter cloacae
atgcctgccaccataagtctgagcaatatccctgtgaactcggtcttttcccacgaccaaagccagttctcttatcggcatgttgatttcagtattgagttgctgctttcttcgggaagtgactcacagctggagtatctttttctcaaaccggcagctgaagtaaaggccgatctacagcgtcgtttaggccgtggggaactctttgtgacaacagacagttgcgacaattttagcgaagtctatggctgtatgggacacgattgctga

SEQ ID NO: 144571 - DNA, 591 bp, Enterobacter cloacae
atgatgactgaatcgttctatgactgggttgtgtactgcatcacgggcgtaataatggcgtcggcgctcctcgaaggaaaaagaacccgtttcccggctgcatttttttacggaagcattgtgcttctggttgttttgattgtggccggtggcctgaactggtggttttaccggtcaaaattcggctcagtcgtcgttatttttgctgctacaacactgttaatgacccgattcaggatggtcatttatgcgctcaggtttcggtcgctggttgcaggtctgcaatcacacgttaacaaggggttcaggataatcctcgttttacccgaaaatgaggacgagaagatcgtattaatgagcatgttgtctaaaaaaatacccgcaggcgcgttgttttatacccaaactgctctgggtccatattcaggggatctactgcatgcattgggacaaaagcatcttatgggcgaaggttacctgcttctctgtgagcaacaacttcctgcccgaacctggctaagcactgtggaaaacggtgaaccagagacgtctcttgcagtcaattttcattcgatccctgatatggagtga

SEQ ID NO: 144572 - DNA, 258 bp, Enterobacter cloacae
atgtacaataccgattcacagaccgtaccagctgacaccctgtgtgaaagcagttctcaggtgaaaattcagttaagtcgaagtgcctcccgggcgctgacgacggcgaaagaaattcttgaaacccggggactggaatctgtatcaactgaagatctcgttcgggcatgcctcgaagaaaatcatcctctcgatctggccagcatctatcttgagcatcgactaaaacagaaggggaccagcatctgcgaattttag

SEQ ID NO: 144573 - DNA, 537 bp, Enterobacter cloacae
atgaaaagcaatcttcatccttttggagcgtctggcacgaaacgagtactcaaaacggacattgcgttgtcgctgctctgttggatgtttaccagtccctttagcaactggaccgaaaaatattttaccggcacagaggtgcctgaagcaccgatgcccgagttgggtcaggcacctgaggctatctttcgatttgtgcttaatgatgatggttttgatgttggttatgacgctgtgggtatggatctctgctgtttctctatcccactatctgcaatgccaacagtaaatctcgacgaagaagagacgttatccaggctgactggcgaaatgatccacggcgtactgctttctctgcctgagtaccttgagatgccagacaggcttgtctatcagctaaatgatgaggtaatggcgttcaattcacactgtggcaacggaattctccatggatggacgtcagcgcaagagctgtggcgaaacgagatcttgccacgcacacctattttgatgcagcacacctcagtcattcactga

SEQ ID NO: 144574 - DNA, 447 bp, Enterobacter cloacae
atgaaaaagcgactttacctgttggaatggaaactttgtgagacacgagcctggttaggatggatggttttttggttgatcatcagttttatgctgttatctgcgatgttgatgacagggcatttgctaaacaagtttgtcctagcgcccgtctggctgtttatctggtgctctccctggttatgcttcttgttgaaggtacgcgtgaccgagattgataaagggctggtgaatacccttcagctcggaggtttaccggtttgtcggtggagccgtcctgtagttcccggcatttggtctgttgatcgaatgaacggccgctacaggctgaaccgtattggcacggatggcctaacggtacattatccgtggcgcttgcattatcagcctttgttcctgactccggataaccagatttctgatattaacgggggtaaacatgaatga

SEQ ID NO: 144575 - DNA, 609 bp, Enterobacter cloacae
atgaatgaaaaatatgacgctgtagtgagtgcagctacctcctgtctgttgtatgtccgtgaaaacggaaggtcaggcctcggggaatgcccggtggcgtattcgaatgaactcatcaacagatggcttagttcggctgaacgtcgtaatttgcattctcgtcagtgtttgcgttcgatccgaaccattctgaagcaagccagaaagtgtcgtcagcctgattttaagagcgtgatgcatttgctggtggaaggtaatggcgttatcccggatgttacagtatcggatttgggtaatgtgcagagtatacgaaatgaacttattggactgggctggtgggtgaagttcggtgtaccgctggactggcagcgtatcaatctgcaacacaggcctgtcagttttggccttttgtccgaccttaatcgttgtttcaggcatgacggccagcaggctgaacctctgcccctttatacaacaggcaattccgatgaactgcggaaggtgttggaaaagtacagctaccggctgcgtatcgcatcttcagaagtggttgaggatgtaacggtgttgcgctgttttattgaaaccggagtgatgaatgtccagtga

SEQ ID NO: 144576 - DNA, 960 bp, Enterobacter cloacae
atgtccagtgaaaatttacctttctaccgtgatcggattctggagcgaattgaacagctcagagcctttctgaataaccatcagccggtgatggcggaactgatgactgtgggggccgtcacgcgccacgaagagcggctgaaagaggttaccccaattgaggtgagtactatttctgatgcctctgtagatgacattatccgtgtatttcaggatttttgtatcgatgacatcgatgtactcagcaggaattcaacgaaagtaacgaccaaatatccggggctgattattgttcctgagggtgccgaactgctgagcagaattattcgcgatatcaacgacgccaaaactgactttgcctcagctatgaaaagggtaaatgatcagaaacacatccgctttgaggaagttcaccgtaaacttcccggccttgtgacagtggcgtctactcgcaaaattatgtttgtggaggcacggcttaaaaaagttactttttgctggcgactaaaccggaaccaggtaaaaaccaacgccagtgagctcatcgcgatgctggataagcgtcgtacggcagcggtcaaatcgccagcgaccactgacctgacagtggttgcgaacatcgatagggcgaaggcattacttgaaagaaaggtcctacaagacggggatgcgttacgtctttgtcggaccaataccttcccggttccgatcgcgcatctgttctcataccgtcctgaaggcacggagcgtggaagtagcaaatacgccgagacggattacaaggtggtgaaagcctcactgcccattttcgctgttggacaaaagccagcatttaaaggtcttcagaactgggtgcctgcgtcggatgacgcaccgtcaaatgcacgaaggatcaaccatagctacacggagcttgtacccggtgcggatcttggcattttcattatgagtaaggtctga

SEQ ID NO: 144577 - DNA, 909 bp, Enterobacter cloacae
atgcaatggatctccactaccagccagaagctcgatgagagactttatcgtgtctgtgtctgggtgaaaaaataccacgaggacgctattaaccgtgttgtattgacggtggatctcagtaaagcccgacatgacccgggagaggataaggtacggtccgagttactgtgtggccattactttctcatgaggaaggaaaacaatgcgaaatcggcgccagcggatcaaaactttgaatttttacctgacggccgcaacctgagctggcagacgtcgaccccggggcttcagcagcttctgctgaacaataatgtaccggagtccctcaggaccctggctgattatattcacatacgtctgaccaaactgacaatggtcccgatgtcgggaaccataatgaaagctgcacaggaagacagtatcagctgggtgaaagtggatctgcgatatttctggcagtatgaactggttgattcccatctgggacctgtccaggtgtctcataaggcgcttgtgcgttttggccgtctggctaaacacgatgaaaatgccagcgctattcgtatgcttcgccagcggttgtcatcaccatttattcaggaatatgagatgcctgaggaggagctgaagcgtaagcaacagatcatgaataccgccgatgtgaaaatgctttttcatgctcattatccggggcagaaattgctgttggcccggtatgccaatggctgggtgctggtggattgtttcctgttccaccatatcaaacccaaaaagaaggcgaaaaacaaaaccaaagcaggcaaatcagaaacacaaaatataaaaacgacggggagtgaggatcatggaactgggcattatggtgtgcatcgtgttgttactctcactggcagcggtgtggatcagtaa

SEQ ID NO: 144578 - DNA, 330 bp, Enterobacter cloacae
atggtgtgcatcgtgttgttactctcactggcagcggtgtggatcagtaacaaggcggtgggattactggaaatccattattttaagcgaccgctgagcatggaatatgcggcgtggctgagggtgatgtgtgccggtttgttgtttatttttatccagatggccccggcattcacgtttctgtatacgcttaagctggtggcactgttaaacttgggtgtgcaaactatgaagcttaacggcgtttataaaatgaaacgcacaggtatgctgccgccgaaagacgcccttcaggatctgaaccggtttaatcctttccgtaagaaataa

SEQ ID NO: 144579 - DNA, 1182 bp, Enterobacter cloacae
atgaatagccagccagtaaccagacggtttgcagacaacgatctccatcaacaattgtctacggttaaagttaatgacaagcaactgatgcgcctcatccgctatttttctcacctgaaataccatacggctaagacgtatctccattggctgcgttcctggaatgagtggtatcaggcaaatgcaggaaaggaggtgaacgaagattggcccgccagctctctcccggtgactgaaactccactgctggcctatttagaccatcttcagaagtcactgtcacgaagcagtattaaagggtgcctgcatgccctgaacagtatccaaaggaaagcactcgatcagcctgggatcatcacatctgaagtaggttatattcttgcggccctcgaacaggctgaagcccgaaagcagaaagttacccgccaggctacgccattcatggtgacggatctaaaggcattgattaaagcacacagtacgacgcagtcggtgcgcaaactccgcgacctttgcctaatttggacagggtttgaaacactgcttcgctcagcggagatcaggcgaattcggatggaagaccttgtgctggatgaaaagaccggcagctttaccttgacggtataccggacaaaatccactgtcagtaccctgctcacctatcatctgacccctaacctcacagccacactgagaaggctgatgggtatggtcggaagggatcaatacagccatccgaaggactatctctttcaggccgttaactttcaggataacggatatatgccacctgaatggggtttacgaagccagggtaacgaaatcaatgcgctgctgagaaaccataacatgccctatctgcctacccgaaccccgctcgggggaaatggcgaacccattcccgtcgaggatgagggtatgcttagtaagaacacgctactccgggcctttgaagcgctttgggaagagcttcatccgcaggaaacgggcacccgatgctggaccggtcacagcgtccgcgtaggcggtgccatcgaacttgctcatgccgggtatacgctcttgcagatcatggagatgggtaactggagcaacgcggagatggtttcacgctatatccgtaacattgaagctggtaaaaaagcgatgacgcaattcatgcgcggagcgctggatgagtag

SEQ ID NO: 144580 - DNA, 213 bp, Enterobacter cloacae
atgtccgaaactaaacaggcgtatttgatgaaatttcgtaagtgctcttcatttgacacactggaaaaagtatttgaacgactctgtgaaaagaatgttggtatagtttcactagaaatttccggggcatatgaccatcgaaaagctgaactgacaatgaaaaaactctacgataaagtccccgccagtgtatggaccctggttcgtcagtaa

SEQ ID NO: 144581 - DNA, 642 bp, Enterobacter cloacae
atgggaattaaacctttattaattttaactcttccattcatctccttttatttaaacgcggcgagcctaaacgagttcagtcaaaaactggatgaaggttaccgttacgcctgtaacgcaactcagacgggcaacgcagaggttgcctctctggcgcttgagaactacagggcaaatttcactacctcagacccaaaagttggtttcagccagataatgaatgatgaaataaacaaggttgtctcgaattttttcagaatgggcatgatccaggggaacaccagtactgcggcctgcgagacgccttcggagttgctgagtcagaccgctttggcggtatattcccgacaggaaaaggcggcgttggcatcgagccttgatgctgtccgcttcactgaatatgcggcgcaggcctacccgatttttgattcaatccggagtacaagcatcagtgaggatgaagtaattaatcagattaataaaattgggaataatgcaattataaatgacaagaatgctattgacgccagcaatgcgacaagtgcgatgaaaaacgtagtgactgtacttttttctgcccggagtgacccggaacttatgcaatttatgatgggttatattgatcaacacaaactgcattga

SEQ ID NO: 144582 - DNA, 1074 bp, Enterobacter cloacae
atgcgaaagagctatacctatgggattcctttcggactccatcgcgaaactggacggtatctggacatcacggaagtaagcagagggagtgcatgcaactgtatctgccccgggtgtcgtacggatttgatcgccaggcagggtgaggtcaaactctggcactatagccacaccacggacctcttcggtgattgtgacggcttgatggaggcgattcggggaaaaattattgaagttgtccgggaaagacatcttctcggtttcccgcatcttctggccggttatgaaggcgggaaggtgccacttgatgaggtaagcggcagcggaagcatgttcggcgccacggcagatctgtttgtgaaggttaacgacctctgtgtcgccgtgtttcttgataccgatcgcagcgtggccgggaagctgacgttcgaccatctccatccctcggaaatggtagcagcattacgtatcgatctgccggatatagaatacgaaatcagtcaggtacaacttggcaggcgagatggaacctacagcgaacgtatcgagaaaattatcattgatgagacggagtcacgagagtggttgtatcatcccatgatgcaggaactggggactgaacccctgaaggtttatcagggccgtgagcctgcggaagcaggaccacttctccagcgtctttccgactgctacatgaagctgccggacatcttaccccagagcatgaatacgctgataagaatgcagcaggacaccatcgtttgtttgtgtcggctcaccgtcagagcatccaatatagcccagactgatgaatttccgctgtttatacgttacttccgtctgcattgtctcgacaccagtgagcatgtgaattacgagaaattgctgaactggcaggacatgatcacaaaatcacaggaagggcagtcgctaacgatggaggaacgggattatctccaggaaatcgcccgtattggcctctacaaccaccgacttaaaagtgtctgcctgacggcctgcgaagacagtaaggtggcaacaactgaaggaccaacaaatttctcattgctctga

SEQ ID NO: 144583 - DNA, 393 bp, Enterobacter cloacae
atgaatacgttcgaacagtttaaagcacaggtcacccaacatgcctgtggactcggtccggaacaactggccgggtactgggggcggtccaccagcggcgaatgtgtttcgccatcgtatgaagtgttcaggggttatccgacccgccatccgctggcggagtttgtggagatggctgcatcccgcaacggcatcaggccggatgactacctgggtgatttactccgggggccgcatgaggttgtcggctccctgacggatgacagcacgtcacccgccgccagcctgcctgtctatttcttcccgggtgccgggatttacgctgcggcggtcagtgataccgaggtgctcgatgtctggatgagctggccttgctacccggaaaactggtga

SEQ ID NO: 144584 - DNA, 594 bp, Enterobacter cloacae
gtgggtgccgtagccctgcagacaggcctgatagcccaaggcgcaggccagataggtcttgccgctgccgcaggggccggtgatcagcaggttctgcccgcgttgcagccagtcgccctgggccagccgggcgatctgggctcggtcgatgttgcgcgggtgctggtagtcgatctcttgggtggtggcgctcagcttgaggcgagcgtggcgcaccagccgcgcctgtttgcgttgctcgcgcgccagatgttcttgctcgaccaagagtcccagccgttcgataaacgacaggccgtcgtaggtcgcgacctgttcttgttgctgctgcagggcagcggccatgccgccgagtctgagctcgcgcaggcggttgagggtctgttggctcatgctgttctccgcttatccatggcgcgaatggccaagggaacagggaaatcacctaaatatctgcgttgccaagtagccgagctctcgatggtaaaagagagccgaaaaccggcagacttatgcttctgtgtcggattcaacacccgcttacgagccaaaacaggaagattcgaaacccgcagcgacccgatttcagcttga

SEQ ID NO: 144585 - DNA, 549 bp, Enterobacter cloacae
atgtggcaactaacgtcaattcccctgtattcaaaagcatctctttttgggctggcgattaacggggttaaatgttccggcactcaaacagcatcccgccctgggctggcgattaagggggttaaatgttccgacacccggacagcgtccctcccttggctggcgattaagggggttaaatgttcccgcacccaaacagcatcccgccctgggctggcgattaaggaggttgaatgctccggcacccggacagaattcggccttgagctggcgattaagagggttcaatgtaccgccgctccgacagtatcccgcgctgggctggcgattaaaggggttaaatgttccggcacctggacagtatccgccttgagctggcgattaagggggttaaatattcaggcacccgaacagtatcccgccctgagctggcgattaagggggttaaatatacaggcacccgaacagcatcccgccctgggctggcgattaagggggttaaatgtgttccggcacccggacagtatcccgcctagagctggcgattaa

SEQ ID NO: 144586 - DNA, 1005 bp, Enterobacter cloacae
atgagtgatgagcagcatatcgggaatgacaaatcccgttatattaatgcacctaagcgtactgaagtcagccatcgctccgggcttccaggcctgaaatcacagcctcgactgaggaagctgtttgctttacataatggacgtaagctggaagctgaacacatcattgtaccggctgagaaggtggaactggaaaccgcagtacaccctatgaacccacgaaaccaggaagctctcactgtaaatgcagttcgagatatcctggaacaaattaaggtacgtggtgttgatacagaaggcgttgctgtcaaacgaaatggggtgtatctgcttatagagggcagtcgtaggcgtttctgttgtattcaatctgcgaaggatttgccactatgggtgttgccggatgaattatccccggaagatattaattccatcattacagcagcacagacatcacggagattttcttaccgtgaagttggattccagtatttacagaaaatgaaagaccttggatttgcaactaatgaagagcttgctaattatctcggaatcagccatgtatctgtttctaagcgtatccaggcggcgaagatagataattctcttattgctctctttcctgactatgaaggtattcctaactcgtattacaatcgcttatcccgactacagaagtacgtcgaaaagaatttattctctcttgaggaagttgtagataatgttcgggaggaaataaggagcttggatgtaaccgatatttccgaagcacagaagacagtaatagataaaattactacagtagttgaacagcttgacataaaacctcctagcaaggggtgggaaactcgtgaattagccgtgtttgataataaagataaatatgcaaggattagcaaaaatgcgtctggaagaaaaattaggtttgaatttaatagaattaatagcgaattgatcgcagaaattgaggagtttataaaatcgaagttgaaagaaaaagaataa

SEQ ID NO: 144587 - DNA, 393 bp, Enterobacter cloacae
atgaaatctatattggccgtcatctgtatttgctgctgcgaggtggcttttgcttatccttatcgcatctacacagcacctgatggtgccattgtgaaaaatatactgaccaatgaagtgatcggtaggacaccggttgaagttgatgtcagtaatactgaagcaggctccacgttcgggatatctatgtatcggcatgagaatgttgcaataaaaatattcacagtaatgccaagcgcggaaaataactttactgtttcaggtcccgacgttgcaacaatgtctttaccaggtaaagcccctttaaacgtaattaatgacagtaatgcagcagcagttcacatagatctcaggccttttctttctgaacctgtacatcaacccattcaatag

SEQ ID NO: 144588 - DNA, 522 bp, Enterobacter cloacae
atgattaaagcagccggagtgatttttatctgtcttttgactggctgtcagtcggttggaagcaaaattgcagacctcccctcagtaggtttcgaccctgtgatgagcaacaaaagtgaatcctataccgacggaaaagttacttttctgattgagagttcaggcactgatgtctggctgctcgccaagaatggtaccaaggaatttattgagttatcggatctaaatctagccggaagccgttgcacctattcatcgcgtgggaaactgttattaacacctggttcagtttcattgtttactgttccgactgttggtttactcggcctttgctacgacaacactgaccaattaacgtttattaataacgcatttaccaaaatttcacaaaagtcgagtgatggacccacattgccattgttgttcagtattagatatgaatttcccggctcgggtgaaacaaacacaacgctagttacgcaatcattaagtcttgcatttttggaacaggagcaatcatga

SEQ ID NO: 144589 - DNA, 840 bp, Enterobacter cloacae
atgcagaaattaaaactgataattttaccggtgctggcatttgtgtggccatcaatcaatgcaaccgcatcgactaaaacaccaatgcctacttctcagcagtcagttgctaaatctgaggctaactatgaatttatttctatttctgcaaaatatgtcgacggtatgtggcttgttaatggtcaacaaagacctgtaattaaaacaagcatgactaagcgtaactatctccagatcgcaaatcagtcaacacttacgcctttgaaccttgtgatacccaaaattgcatttgacgttatagccaaaaatggcgttttgttatcaaatattgtatccctggatgaagatgcagccggtaaaaaaattctatggttagagccgggttccagcctgacaatctctttcgtcaatgacctatccagtaccccattacaggcgatagtgtccgtaagtaaattgaataaaagcgttattgcgatttttggaccagaccagggtaaaaaattcaccctcccccaaacttcaaaatcacaggatttttcaaaggagtatgacccttcaccagaagtcgcactacgtctcaatgtgcccaaaaaaattcactcttccgtcacaatcccagatgtcgcgactgcatcattaccgtcctcacatacctacgagattatagcgactgataaactcaggtcttttatgttttcagagtttgtttgggttggtaaacgtaacagcttcctcgttggttctaattatttctccaaaaatttgacggtttacccaggtgaagaattcgatatcagcaccatacagaaaacgattatgagggctagtaatgattaa

SEQ ID NO: 144590 - DNA, 948 bp, Enterobacter cloacae
atggcatctgagcacgtccagacaattgacctgactaattattccggaagggttttctttctggcagacccccatggacattattcgacgctttgtaatcttatccattcgatatcgagcccagatgaggaactaatcattttccctaccgggaatctctttgattatggtcctgagcccatggagttaatgacagcgataaacactggtatttttgatggacgttctgtgcgagtgttctcagcagccggggctggtgaagagatgatgaagaagctcttacccacaaataatgatcgtaggacttattacccaagcacatttcttaacgaacggtggtgtgcaagaggcggacgttggcataaacaaattaaccgcagttatcttgaagaggagatcagcaaactgctctccacccagctggccacggtgatgaaggtgctttttaaaggaaatattactatcggtgtttgtccatccgactacacggacatacgacagggtttcgacaatacctataacgctctcctcgcgtttaatcaggcaaacgtgaatatctttcagagtcagtttctttttggtatggatcacgcagtcagcccaatgaatattagcgatgtcaacctcgttgtactgggtcggaatccggtcaatagcatcagaaaggctcatgggttacctttgactaacttacctgtactcgtcggcaactgtctccatatcaatactggctcgctgttcatgtcagcaattagcgatccagcactactagccccaggtatacctcgtactacagttccggcaataacgctggtcgagttgatactggcctcaacaccaaccctaatttgccaccaaatgatccttaataagaacggcatttacacacaaaacacaacaccacttgacctggatttaaaagataacaacatagaggctgctttataa

SEQ ID NO: 144591 - DNA, 1035 bp, Enterobacter cloacae
atgactgaattagtaaaaacaaaactggctgtagctgaatcaaactctactgaattagagacacttaaagttgttattgatgatggtagtaaagcggcaaaactggtttgtgttaacaatcaaggtgaccttgttcccttattgactcaaaatagtttcgttgcagatttccgggtaagccatgacgggcttattccgtttaattaccttattgatggccttcaacgattctctcatcacagtgaatctagtaatgcccttgaaactaccgacgttgcgcatcagtacgatgagatcagtcgtctgaatgttcaccatgctcttcattcctctggtttagagccgcaggatgttcatctctatgtaacattgccacttagtcagttttataccgctttgggtgaaaccaatgacgaaaacatccaacggaaaaaagacaacctgatgaagccggttgaacgttatattgatggtaagcgtgtttcatttaatgttgtttcagttaccgtgtttcctgagtcacttccggcggtaactcgtgcagatgaaattgagttaattgaatcttttgaatcaagcctggttatcgatttaggtgggacaacacttgatgtagcaagcattactggtcagctggaacagatctcccgagtcaagggttttgaccgtattggttgttctatcgtatatgatgaagtccgtcgttatctggattcttcaaagctgaacgcaagctacgcgtatattcaacacttggtcgacaatcgtgataacaaagcctcactaaaggtttcttccgatgatcttgatggtgtcttccaagccgtaaatagtgccgtagcgcaacttcaagaaaaagtgatcaaagcagtcactcaggtggaagaacgtccgcacaatgtattcctagtcggtgggggttcttacctgattgaaccggcagtgcgtgaacattttgataaatcgaaaatcatcatggtagataatccgcaattcgctctctcactggctattgcagatactgtttttgcgtga

SEQ ID NO: 144592 - DNA, 678 bp, Enterobacter cloacae
atgacaaaaaaaactgagaaggaaaacgatcgcatccagattagcgcgttttggttatcggaaaggcaatctccgtatgcctataattttctaaaaaaaagtgacttaacacatcgtggcgaacagctttccataataaggtctgcaatcactacggggttagtgctaaataacctcttccccgagctatcaagttttattaatggactgaatgagagattaacggctgctgatctaaatcggttttttaatgatgaatttaaaaagagtgatttaagtaatgaacagttgaaagaacaaataagtcttatgcttgattcgaaattcaacgatttaattttaaagattaataattgcaagaatcctgctgctgtattttcaactaattgtcaaactgatgtcagtgatgcagtaaagcctgagacagcaaaggaacagcggttggaattaatgtctacagaactggccaaaaactccatgcctgtgactgtagagaccttgccgcctgttgcgatcgcaaatcagaatgattcagttctaaaaactaatcatggttctccggacgttaacttagctcaaaccgaaaccatggcgctcagtgaacaagcgcaagtgcagggtgtgacaacaaagcagaagaaaagggcaaatgcaaacctcgcaaatcttgcaaagtaa

SEQ ID NO: 144593 - DNA, 453 bp, Enterobacter cloacae
atgttatcacgcaactcactaatacatggtttacgtcgagatcagttaatcgaagttctgtctatttctgaattcccagttgtcctggtcgagaatcccttcattcagcctgaatcaacgggcaaaaaacctgtaatttttaatattgatgaatttcatgtttctatcgctccaatttcctcccttaagtacgactgggaatgggctccaattgatacaatactcatcgaagtggtcattccacctgcggaagcagacctcgtaagcgccgagaatgattttcttcgcgatgcgggtattggccatattcaatgcgagcctggtggtgtatcgatacgccgtacagtgacatttgttggtggtatcaccgccgacaatttgctgtatcagcttaggcttatgtgcgtgagtgctttacacctgattggagaggaactggaggatgaaagttaa

SEQ ID NO: 144594 - DNA, 435 bp, Enterobacter cloacae
atgaaagttaattacaagaaactattacctcttgtagtgctcggtttaacaattgcgggggcttactcgcttttcaacgcaagaccggcggagcccgacttgtacgattttactggcaaagttcttaaagccacgtctgttttccaaccctgtgataaagaatccacaccttcgttaaacgttaaaattgcagataacggaaacatacatatcaatggtgttgcatcaaaagttacttttgttgaaaaagtttcgcctgatgaaatttctgttaagtgtgctgggttaccaatcaaaaatgctcggcttgtgcatacgagctcttacaccatgataatttcggaaggaaaaggtggttttgttatttcggatttgatacgcatccaggataatgaagtcatctccggtatatggttctttaagaagagagcatag

SEQ ID NO: 144595 - DNA, 558 bp, Enterobacter cloacae
atgaaagaactggaagctattggaacgaaggctctacgggctagggtcttcagccagtcagtggcgatggcatttgaagtgaacgtcgacataagtcggtctgctgataattcagccttcataagcgaggctgaaaaatattaccttactctccaattcgcccctccggctgacaatagagaatatgggtggaattcagagggaagtattctcatgaaactatcccaaaacgaagccatggcgctggcttctgtcttcctgagaattaaacctacacttaaaattgaaaagagaaaaaccacgcatcgcacacaccaggcttacaaaaatatcactatcggcccaaatgaccgtgggggcttgttagtcacgtcaggcattgttccggtcgaaaggggttcatttaaacccataaattataatcttcccgtaacgcaaatggattgtgtttcaacaggactttttttgcttggattcttgacgcttaagatgccatgggtatcctcagaatcgataataactgctctgcgcctttcggagtcgaaaagctgtcagtga

SEQ ID NO: 144596 - DNA, 4221 bp, Enterobacter cloacae
atgatttccggaaaactccaggctgatatgcctgccgtcacgtttaatcccggcccgggcgattttgttgcattcgtaaacaataatataattactgcctcaggctctggaaccgcatgtaatgtgacggttgatgatcgtgcgacatcaacggtggataatcttgtctgcttctttgagtggcttccaaatagctctggatttactgctaacgggttcacgttaaccgggattccaaacagctcaggagacctaaaactcccttacaaaatttcctatttttccggtacagaaaggcaaaaagtagaagtagtgaaaggggagtatacagttaatgctctcgtaccggttaaaccgacgatcaccggcctaaagtcgtctatgaatgggctggttcaagagggttacacacttaaatcttatattaaggatgaagtgatcaggagttttgccgtctcagtagaaccccgcaattttgtgcaatatatttctatcggatcgggttctgcctgtgaagtccctattggtgggaccagttgcacgatcgatgtaggaagtattaaagtaagtgattcggatttattgataggttcacgggaaataactgtcaccgctaattcgaaaaataattactttgcccctcctgaagcgcaaaagcttacgctgacctgggactaccgtcctcctgttgttgaccatactctctggaatttcactgatgaagctaaaactatcagtattggcggtcagcaaatctataccggcgctaaaacggtagctgtagccgtcaaagtgccccaggaagagactgaaggcgagtggtggctaccaacagctatgacgctgacgatggtgccggacggggttttcaagccgacaacaaaagtaactttggatgacggtacggttatcgactttaagcaatcctgggtaacaccgatacggcgtaccctccagcccgtgagcggaccccagaaggtcggcgatgagtatctgtatatctttgacttaacagacctgacgaatggctcttatgccgccacgttcactatagagaatactagcaagaatacgtctacgtacaatgagcccgaaagcaaactgatgctttctgataaccccacactcatggtacttaaggatggggcagcgctggcaaaacgagcacctgtttatttcttaaatgaaattattgttgccgcattccaggggcaggccggggttgcggatattaaagccgttactatcgataacaaagttgttgaactcaccccaacgaactacaaaggcatttattatctgccggtgggggatgatctagatgtgaatgctgaccacgaaatcacagtcgtggcggaaaacctgtatggcaagattgtgacattcaataccactttcacgtatcaaccgacagggtttgcgcttaaaaacttagaaaaagacgtcaccttgtattctcgcgttcggcaatataccgatctgatgagtcagacagccggtgataaatgcactctctttactacggaagagaacgcgcaggcttatcttgagtggtatggcggcaaatctgatatcactgcctgttaccctcagtggaacaatgtaccggacgggcttgaattttactttaaaggcaggacgccaggacttacggggttcttcaataaaactggcgaaaacctgctcgattaccaagtctatatgataaacggtagaggctctaaagctgtgtcggccaaataccgccgcgtattgacaactcaactgccatataacccaatccttacttacaagaaaaataagttggtaactgggatcaaccctaacactgcactagcgtacacgacaggtggggaagctgctcgcctcttggcaaaagtggtacctgctgatgtgacagtctatgtttcgcaaaacgggggtgagaacacaaaaacgacgtttaaaaaccgttcatcaaacaacgatgcaactacattcgttcagcgtctgaaagtagccgcagccccactgtggacgaaaaatgtattcgacattgctgtagagtactcgaaggacccgacaatgcggaccgccgatacacttaacgtgtatacggtccccgacttcagcattcgggctacgatggaagtcgaagacaaaaagacggctactacaatggaattaccgttgaaggtgtcagttgggcgctataacaattcaactcgcaaaagctcatttagccggacgacaatgggtgactgggatgtaaccatttacgctcagaaaagtatctatggtaaagatccagaaacaggccgttttaaaacgacgtatgaacgtaccccattaaccgaggcattgccggtgaatgatgccggggtagtcgaaacaaaaatcaaaatcgagaatatggaccttgggaacatgcgtcttgtcgggatagctaaagtccgttcgcctttcgctgattttgaattgacccgggaaacaagtgcggtcggcatacgtgtgtataagggtgaagagctggagggtaatctctcaaagagcctgattatcggccgtatcccgctcagtacgcttgtgaacttcaaatcggccagcacagctaactctgatgcgcttgctcctaccgagtggcaggagtcgtcagacaatgggcagacatggacgatgctttcggacatgactgggaagagaagtatttcaatcagaaaaactgacgtcggtaagtggctctacagggccaagatgaccaacaagtttacgtcaaaagtgtcttatagcgacgtgctgacagttgtaacgtacaaacagcctaagctaagtattgatgttgcggaaattcttgaaggcgatgatttaccagtctcgttgctggataatgatgagccgattccgcagggtacggctgaagtaatgtggtcggaagataaaattaattgggtcgcgggtgacactacctataccgtgactgccgctgagaagcttccgccaactatctacgcccggatgcgctatctggattcagacgacctggctgaagagtcctcctggaaagagacgtctgcgcggttaacggtcgctaaacccaagcgcctttccgtttcagtgagcagcatttcaaaggtagaggtgggaagtaaagttactttagatggtaaatactccaacccgaacagtcggtaccagaacggaaatgacgtcattgaagaatggactgcccctgacggacagaaaatcagagggcctaagttgtcgatgacgctgacagaggagatgctggataagcaaggctatgcggcatttacatacagtgcatggctcgctgacagcaaggaaagtaccatttccacgcggaaagtatcgattaagtcctgggtgtataagttccctgaaatgaaagtcagtacgaagctaaaatacactatggccccgtcgaccttacacgtcgccctgaccggaataaaagacggtgactatccgggagtaacttattcacgggagtggatctacgataaggaaaatatctccatttcaaaagatgaaggagatacgaaagagtttgcaattgcgaagccgggtaaatatacgttgatgatcgttttccgcgataaccgtaataacgaacagcgtattgaaaataccttcgtcgtcgatgagcaaactccgatgactgttgaaatgaccccaaaattctctaataagttcatgagggctcctcttgatgtcacactaagatctaatattaaactggcgcactctgctgacagtattgatacggtgacgtataaagtaaatggagaggttgtccagggtagtaaaaactattgggctcagggaattcccggtcttactgagaaaaaatatgaaatcacgctggatgttgtcagtaaaatgggacagcgtggtacagcatcagtagattttgatgttgtaaaaaacgccgctccgcaatgtgtgctaagccatacagaatccaatatgagctggagtttcacaaataaatgtgtcgatactgatggcaaactggttcgttatgaatggtatatcaatgatgaactaaggaatgtttttggcagcactgcgacactatcgaaaaatcttaatcgtgggaagcaagatatccgtgtagtcgcatatgatgatagtggagattcagcaacacagcgcacggtcgtatatggcccagatgaggaaaaatcaaaggctgtagaaacaactggtacatcgcagtaa

SEQ ID NO: 144597 - DNA, 513 bp, Enterobacter cloacae
atgagcgaatacatacctaagaagcgtgggttactgagttttgattggtacgtgccgatcaatttggcaattctgatactggtactggccatcttctttactcgatttacatttggacatgggctattaaatggttgtttacctgctgatttttacatgattgacttgaaggataaatctgtcaaggcaggaaacatcattgcatttcatatgccaaaatcagtccgatttatacgtgaaaatgagaaggttattaaaattgtggcgggggtaggcggagatcgcctaagagtcacaatggatggcgtttataacgggagcaagttttataaagctaatgccagacgtatttcaatgaaatacaacatacctgctgagtctattgaaagagaattaactattccgaaaggagaagtttttttaattggccaaacggatcactcatgggactcacgattttgggggccggttaagttgacttcagttattgggaaaacatatgcgatctattga

SEQ ID NO: 144598 - DNA, 1509 bp, Enterobacter cloacae
atgcgatctattgaattaaaaacaacgattaagcctctggccacctgcctggcgttttacgccttgatgtccaccgctacggctagcccccagtatcaacaggttgctgacgacattgctaggcaagctcaagtattgggcgctcagtcaacgccgccggaaacagcagaaggcccgctctcgtcaggctctctggattctccggatgtccagaagtacgtccgccaggctgaagctttgaagcaaaacagggacatcagtcagccaacgaatcggggctatgtaccgggtatgaatgctgacagtgtgcaggcggttatcgatcatactcaggctatacgcgctcagaataataattctgaagcagttaatgacattattcgcagacgtgatgaaattcagggaaatattcagctgaacgactcagcactgaagtctgtcgaaaataaaccagaagtaatgcgcagccagtcgacgaatatcgaaaaaatgtttggtacctcagggatcaccgccgctgacttcgaacgaaaaatagatagcagacgggaagaggtgctttcgacagaaaacggtatcactatctttgcgtcatttagcctgcctgattacgtcctagaagatctactccgtaccgcgtcacaaaataaggcgagagtggtttttaatggtctgaagaaaggcacgacgcgtcttccggagactcaggctgcaatcaatcagttggtggtgaaggggaagtttgactctccactgattacgattgaccctgatgcgtttgaccagtaccaggtcacgcaggtcccgacaattatctcccgtgaggaatcccgattcgctaaaatggtcggttcgtttaacgttgatttcttccagcgagaactggccagaaatcccgatcaggatattttacctaatgctggtacgacctatccggtcgaagagaaaagcattattaaagagctcgaagagcgagcacaaaagtatgactgggagggcgccaagaagcgagctgttgcagacacatggaagaaccaattcatggttaatctgcctccggctcaggagcacaaggaatggttaattgacccgactatcagggtcactcaggacgtgaaagataagcagggccgcgtcattgcttctgcgggcgagctgattaacccgctgagcaggttcccgcagaacctcaccatgataatttttgacccattgaatccggggcagcttgattgggctgagaagcaatatcgccaacttcttggcagcggacaggttatgccgatgtttacgcgaattaaacaggaaaatggttgggaccatctgaatgatctgcgcgagaaatttaacgggaaagtattcaaagtcaatgagcaaattatttcccgcttccagattaaaaacactccagtgttgatttcaactgaaaaagataaattccggataacgcaattcagtgaagctgaaatacgtggtgttggagaaaaaatctcggcagaggagaactga

SEQ ID NO: 144599 - DNA, 132 bp, Enterobacter cloacae
atgaagatcggatttattttaggggcgctgctggccacatggctgactctgaattacccggacctgatgagagagtatttcaacaaagtggttacgtatatggaaagcgtgacaacattcattactaaatag

SEQ ID NO: 144600 - DNA, 3177 bp, Enterobacter cloacae
atgaaaactaggaaattaattgcttcaacaattattgcgtctatgctcgcaaatactatgagttgggcattttacgtttcgctcattaacatggttatgacaccaaaaatatacgcagctgatgcgatatttgatcagttggaaaacaattttgaccttgcgaaccccaacgcaaatcgaaatgcaacaacaagtgctcaggatattgtagagaagtacaagaatgctgattccggggaaaacctgagcggaaaaatatcagataaatatgtaggtaaagcagattcaataaacttagacgttgggaagtacggggcgctgaactcaaacgaaagtgttatgagtaatgctgcatctgacggcaagtcgatcggtaagaccgtacagttaccgagcatgacgggcggtacgatcaactctaattatacgaaagagggggcaaagttactttccagagacagtagcggtaacattggtataagtaacaacacgaatacaacggcaggaaccaaaaccagtacaggagagctattcagctcagagcagaagcacagtgatattcagtttaattccggtggccggtatggagatgaggatggattcatcaatgacatcaaaaatcgaaaaagtcagctgtttgaagcgcagagttacgatggggttgcctaccgtacactggtgaatgcaaataaagacaacccagcatctaatattaaacctaacgaccctatgttcaatgctggccgaaatgaaattggtaatgctgtagccggtacaggcaactggctacagagttgcaatacggaaacaaaaaaacaaactattactacacactatccagattataaagagttttactgcaactcacccaagaaagataactttaatagttgcacaataactcgtgatttttccgtacctgtttatatctcaggtggtaatggtgatatgtctatgtgcggggataattgtgtgagggtctggttcggcagaagagacgacaactattggaacgatggagtatatgacaactcattaaccttaaaatttcatcctgatgcaaagcttgcaactgcgaaaataattaatgcagagtgggatgatcatatgagggtcacgcttgatggaacgcagatttttgctcacatagatggagaatatagaagtagcaattatccatcaccacaagggccatgggagctgaaaaaatcatggaagcttgacaaagtctacgatattaccgaccaggtaagaaactctgtatatcaggaggtggaccgtgaagtgacaatggcgtcacgcgtttgggtaggtggcggtggggaaggctattttgaagttgagctgacttttgaaaatatgaagctggaggataaacatatacaggaacccgcaggttgttttgatgcagtacaaacgccgaattcattctgtcggtttgaccggtttgtgaacatggatgtcggtacaaagcggctcccggaaactgtgcttaaaatggccacaccgctttataaaggcgataccgggttcttaacctggaaaacaaaccttgaaggttacttctgtgatcccctggcgaaggaaaagctgtgctcatatgatgcgaagggaaacatcatgaaagacgccgcaggaaaagacctctgctacaactacgacgacattaaaaatatgcctgacgcttgcggcacatataaaaatgatgctgcgtgtgtgctcgatacacagacttgtgcagaaggttggttcgatgaaggcacaaatacatgctacatgtatgagcagaaatatacgtgtgacagaggtaaggacgtcgtcagagaggtagagtcacagactaacgcctgtgtaggtatgatcccatgttctggtggaacatgcgaaaccggcccaaaagaggaaaacaatgattttgggaaagtggccgcgtactcaaacatggttcagtacatgcagggtgaggcaaaatgcgaagatcccaacgaccctaattcctgctccgtctttgaggggaaagcagaatggtgcggcaggtccgttggttttgtgaacgggctggccaaaacagattgctgcgaacagccacagggtaccgctggctcactagaggcgattatgctggctgggtcgatgatccgaaacacgaactggacacgagtgaatgctcagctggtaagctggaccggtggggagagtggaacctgggcttcaatggctaactcggttggtgaatggacagcatcggcaggtaaaactgttggtcagatgtggaacaatgtcaccagttcgctaaccagcgtctacgaaaatgtggccggtaaccttgggcgaacagtaggttcatccactgctggtggaagtggtcaacttgctaaggagacaatgagctctttcgggcttggtacccttaagaagatggccatggaaaaagcatatgacttgcttcccgatacagtaagggacttcgtttttaaaaatgtagcgacaacgggtggcgaagtagtcttttcagcagcaattcaaaactttatgcttgcattaaatgtcattggctggatttataccgcatatcaaataacaaaaatgttgcttgaaatgcttgtggcctgtgatcaaaaagaaatggaagcgtctattcataaaaatcagaaatcctgtttcacactggatactgaacgctgtgttaaatatctcaatatgggatttacaaagaagtgtgttaaaaaagcaacagacatgtgctgctacaattcaatgttatctcgcgtgattatgcagcaggcgtatcctcaacttggaatagatccggttgcttcgagttgcgttggattatcaattagtcaaatacagagattagattttgataagatcgatttaactgaatggattaacgatgccgtccaggtcggagaagttcctgatcagtacgctacattctccgagtcatcgataacagaaaatttgccatttaaaaatgaaaattaccaacttccatcccaaagaacgaaagaatcaatgggtggtgaggataatatgataaaagctagacaggaaaataatcaggcaattaaagaggagaatgtggactgtagctatctaccacggcccgcgatttgtgaagttgggtcaacttatgtagacccaattactgggaaggaattaccaaaatactaa

SEQ ID NO: 144601 - DNA, 873 bp, Enterobacter cloacae
atgaaaactaaacgttttgtatctctggtttctgcttttgttgccagtgcatcgctggttggttgtgcccgggatgctggtaaaaccccgaattctgcacagcacagcgacactcatgggctctactggcatgctaattctaaagactcggtagccaaaaatgcttactctttggccggttttgacgttacttttaatgaagaaacagtccagccgggtggcgatgcagataacttgctttccaaactgctaattagtggctctatgggctatgttacaggagggctcagtggattaagtattatgagtttgggatcaatgtacagctcctctgacgctgaatatatccaggttaaccaatacgtcgtctttgtcccgaaccctaaaaaacttccttataacgatgaaagcttagtacgtgccggtgctgcatatgtttataatcacaccaaagagtcacaggtggcactcgggttcaatccttcgaagcaaagtgcggctctggcttcatgcaagattgatatggcagtgatgaataaatggagtacctgcgacctcccttcaaagccagctgccgacgtaatgccgactaagtccatgtacagcttccaggttattcgcccagcgtctggatctgaaatccctcaacttaatctacctgccggtgattattcagtagttcgttacgtattcattccatttaaaggcaatgaatctagtactaacttctcaggtattattttccgttctgacagtccaaaattcactaccccaggtggcgttgctgcatctattaacggtaaagattattatcttttcgcaggagaatatggtcagaagggtttccctgaaaaaactcttaaagcaaaataa

SEQ ID NO: 144602 - DNA, 1809 bp, Enterobacter cloacae
atgggtaaaccaacagatgagcaaagggtcatcattgaaaatgcaaacgcaaataatatggttattgcagcaccagggtctgggaagtcatttacgatgatcgaggctgtgatctcaatcctcaggcagttcccatatgccaaggttggaatggtcacatttactcgcgctgcaacaaattcattggctgaaaagctgaaaagtcggttaagtaaaaaagaccaggatagggtgctggtaaatactttccacggctttatccggatgcaactggacatggtcaactggaagggcaagatgctgattagctcggcacagcgttctgtaattcatcgtgcgttaaaggagtcaggcgcgcctttccgttacccggaagctgaatttgctattgatgcgattggaagggaaatggatacagacatcatttcagttcgccatacgcgtcaacaaatccacttgttcaacacataccaggcaatatgtcagaaagaccacgtagctgacttaaatgcactctcacgttttgtcgtgggccagatgcactcaggaaaaatgcagccactaaatttgacgcatttagttgtagatgaggtgcaagacaccgactcgattcagtatgcctggatcgcactacatacaaggggtggtgttaacacgagcatcgtaggggatgatgatcaggcaatctattctttcagggcctccggcggggtaaaaatattccagcaatttgaaaaacaattcaggccaaacatattttatctaaatacctgtttcaggtgtgaaccagaaattcttaaggttgcaggggcattgattgaaaaaaatgtttacagatacgttaaggatctgcgttcagctaaaagtggtggtggaaaagttaatttccgctcatatgttgatatggatgaacagattcaaggcatcctcaatctaattaaccaagacccaaatggctgggcaatccttagcagaggtaatgcacatcttgatcagcttgaaagcctcatagagcagccggttcttcgttatggaggcaagtccttttgggatgagaaagagacgagcgacgtactgcatctgatggctttctttcggcagtccaacgatgttcgattaatgaagagggtgctggcgcttttcggtgaaaatgaagaagttttggatcaaacagcatttagcatgaaagggagaaaagtaacttttggtgaactgagcatcccagatgcaagttccctggaaacaagaacacttcactcaaacttcacccggtttacacaggagactcgggataaagttgaaatcgaaaagcgcttcgcaaatctgattaaatggatggaattgtcatcaataaaaatgaggactcagaaaggttcaccttcactgacacgaattgcgttagatacctgtaagcaatgggctgagaaaaatggctggcaaaacatgataaatcgagctgcggcgatgtgtttggggcctaaaaagaaggatgaggaatatacgccggataaagtagttttatcgacattgcatggttcgaaggggctagaatggaaaaaagtcattattatgagttgcaatgctgaccagatcccaagcaagagatcagtggggcaggaagcgattgaagaagagagaagacttctatttgtaggatttacacgagcagaacaacagctgcatgtaatgtggtacggtgatccgtccttctttttaagcgaatgcgccgaagaaaaattgaaagaggcagcgaatatgagaatagaatcaaatttaacagaagaattttccaatcagtatttacaataa

SEQ ID NO: 144603 - DNA, 876 bp, Enterobacter cloacae
atgtctaaaagcaaagcacgcagtaaagcccttcttctggccttcgccgatctgattccggatatggacaaggcagttaacaagaagttattggaatctctgattatttactcagggcatgataatgaccttattgttattttgaatgaagacggaccaactataattgaactgaactctttaaaatcggtttctatgctggcccaaaagctttcagctttttcaacttattatcatgtagaaatgcagcaaattcatgtcaatccaattgactttgagaaggcttataagctactcaaagaagcacctgcaattcccatgtttaaaactttagctgaactggataagtttttaaatgaagagtttgaaaagtatgggttgaacacattccttgatgtggatgacctagattattcactcgataaatccagagagttaaaaaatgatcagttgattgcctgggtttctgaaattattgtgaagcgcgataaattagcattgcgtaatcgctttaatgaagtgacaaaggcacattatgaaactgtagatgcattgtatgcagccgtccgtcccttaatgaaagaattaggttttcctgatgaactcatgctacatacctttagtgaattgagcgttttcgattccaaaggctgggaccatgctatcaaatctaaaattgaatttctcacaaaacgagaagcgcaatatttagatgacaaaatgaaggcagaaaaacggcagttaacaattgatgaacttttgactcaagtcaatagcgctaaaacagctaaagaaccaagaccttttggtcagacgttttgttttgctgttcttggcatgatgtcattgatgttcattgtaaataaatttatttaa

SEQ ID NO: 144604 - DNA, 378 bp, Enterobacter cloacae
atgtcacatcttgaatatgttaatgaagttaaagtgtccgggatagttatcagtgcaatggagaaagaaatgactgacggtaacgttgggttattaataaagctcaaaaacagaatgaagactgaaattaatggtgaaatcgctgagagagaattttctattcaaatcaaagtgtcaccagaaatgtattcaggctgtttcactggtataaatcaaggtgatgagttaatggtctccggttatcttgttgtggatattgtcacgttggaagggagagagcaccctcttgactacatgagagtcgttgcaacaagtaagttagctcacatacctaaaccccccaagggttttgggcaaagtagctttagacagatctga

SEQ ID NO: 144605 - DNA, 222 bp, Enterobacter cloacae
atgaaaatcataagcaaacgtcaggcaatggcgatataccgccagcattctgaatgccggttgcttcacttctgtacggaaaaatatcgctggtccggcagcatctgccattactacggtcgggaagtgcaggaccttagcggtgtgctggcagtttttgctgagcgccgacaggaccgccaggggccacatatcatcctacgttgtgtcagcctcaattga

SEQ ID NO: 144606 - DNA, 345 bp, Enterobacter cloacae
atgaaaaaggacacagccaacgaagtaatggatacgttgcaatggggactaaaatgcgacatcacaccacatttcggggcccgtctggcgcaggaaggcaaccgcctgcattacctcgccgatcgggccagcataatcggccaattcagcaaagcagatttacgccatctcaatcaggcttttcccttgttgatgaagcacatggaactcatgctcaccagcggagaacttaatccccgccaccaacaccgcgttacgctgtatgcgaaaagattaacctgtgaagtcgacacgctcggctcttgtggctacgtctatatcgccatttaccccactcagcgctga

SEQ ID NO: 144607 - DNA, 342 bp, Enterobacter cloacae
atgaaagcctttcctgcaacaaatcagcgggtggcgaagccatgcccgtcgcctgtggccgtctggcagatgttacttacccgtctacttgcgcaacactatggcctgacgctgaacgacactccattcaatgatgaaagtgttattcaggaacatatcaacgccggtatcacattagccgatgccgttaactttctggtggaaaagaacgaactcgtgcgcatcgatcgcaggggatttagctggcaggaacaatcaccttatctccgggctgttgatattctgcgggcgcgacaggccaccggtctgttacgacaaagccataatcttttgacacgctga

SEQ ID NO: 144608 - DNA, 795 bp, Enterobacter cloacae
atgttacagaacaacatcaaacagctccgtacccagctatctatcactcagcgcgagctggcatttatggtcggcaccagtcagcaacaaattcagcgtatcgaaaccgggaaggttgctgcaaagctgagtttcgcacaggcaatatgcaatgccctggagaaacctctaaatgtcgtgttcccgaaaagcgataggctgataaatgacttccgcaagaagcgtcgtaaaaccgatgaagaccttgaagcgatagctacaagcggcattgaaatggacagtgatctctggacagtaaaactttggttacagggacagcaggactatttgctgttgcccatttctgctgcggataagcggaggttttattatcattttcaggaacaaaccgccccaaacacagatcgcttcttcgtttttgattcttctgggtatcgttatgcgttaaatatgcgcgaagtggtatttcatcagttcctgtctgatggctttgctcccatcataagcgaagaagaagactatgaagatgattattttaatgtccatatcaccctggtgaacggtggccctgtgattcctctgagtgttgagcctgatccaccgcaaaatgaagatacggatgatatcggccaattgaatgcgttctttgagatgctggattgtgagcctgaaacaacggagcgttatatgctaaccgacgaagatggcgaagatgcttttatccgtattggttctattgccatggtgcgagtcgtacttgacgcgctggagtcggtggaagaagatgaagagtag

SEQ ID NO: 144609 - DNA, 2682 bp, Enterobacter cloacae
atgaaatctgctaacatctataataaagaattaagtcgccaccagtttggtgggtttattcctgtatacgaccagattcctggcacgaattattttctaatagacggtaatcggcttgggtttatgtttatttgtaacccctcacctggtgtttttgataatcagcaggatgtgttagctgaattatttaaaatggattttcctactgacactatctgtcagacctcattaacagcactgccggacctgaccttgcatttaagtgcctggtcggcagttcgtggtggtcgaatggaaggacatgataagcttaagggggacttactcacggcctaccagctggattattatgatagaagtctaaatgaacccttaaaaccggatcatgataaattaatgcttcgtgactttcagatctggatgtcattttctattccgttgaaatctgcgcttcctactgaaattgaaattaatcgcatcgatgcactgtactctgacctaatcagtaagttgaacacactgggcctttttccacataaagttagcgccgaaaactggctttattgcatggataaattaatgcatccgggaaaaacatcacgttgggctgaaggtcatgttgaagtcaacactatgaggcgtcttaacgaacagctaaatgttccggggcgaaaatatacagtaactgaaaataatttttcatctacaacgcagagtactgatgtttctgaacatcgttatttcaaacaattatctgtggtcaagttcccagaacatgtaaattttggaagcatgtatgaacttgtagtgaattggatgaatgggcgtaaaactatatttagcccatttatgataactcaaacagtccatttcgccgatcccttaaaattagctagagataacgtcagatataaggcaattactaacaaacaagctagtatcccaaccgtcttaacgttttgtccaagactgaaggacatggataatgattacatggcggtaacacgtgaactggaagatggggcccgtcttttacacagttatctgacatttaccgtcatggggaattcagcattagatgtccagtctgccgcagaccagttaaaatcattttatctggaaagtcgcgttaaagtggctgatgattcatacatcatctttccatcttttgtctcttgccttccaatgtgtaatgaccccaagacgatactagatctggaccgttttgaggtagtcagtaatactggtgcagcgcatatgacccctctattcggcccatggaaaggtaatactgacagacctgtacttaacctcgtctcacgagagggccagctgttggggcttgatatcttcaagacttctgccagctataatatggttgttggggcgacttctggtgcaggaaaatcgttctgggttgcatacatcattaataactatcttggtgcagggccgcgttctaataatctgatccattatcgtgatacttttgaaggtttcaaaaacaatgcttatgatgcatttgaccctgatggagcccagatttttgtagttgacgttggtcgctcgtatcagggtatttcggagcaatatacaaatagtcagtttatagattttggtaaaaagcctgattttactctgaatccgttcgcatttttgaccgatgtcactgttgcagaccgagtttttgatgaagcgcctgttttcaatgacgactcaaataataacgatgaagaaaaggataaagttgcacagaccattatggtcctgaatcagttaaaaataatggcatctgaaaaaggaaatattgacgactttcaacaatcggtcatgcttcaactgattggtgatgaatataacgaatcacgtaaagtcggaagtacaggctctattacaggatttgcacgccgctgttctgcccatgaagataagcgtattaaagatatcggtgagcaattagggcaatggtgtgaaggaggcatttacggaaatcgatttaccgaaaagctcccgccaataaacttcggtagtcggtttatagttcttgagcttgaagagttgaagggtacccctcacctccagacagtcgtgctcatgtcgatcattcaagctgctcagcatgcaatgtttatcaaaaaggacggtcgccgccggttgttcatccttgatgaggcatgggagtatattcgcccggataatgcttcaggctccagtaatcagtcaaatcagtttttctcatctttccttgaagctgcctggcgccgattcaggaaaacgaactgtgctggtatttgtattacccagtcctttgaagattacttcacctcctcggtaggtcgagccctgacggccaactcgccgtggaagatcatcatgaagcaggaaaaggagagcatagaagccatgaaggctaataactacttctccacgactgatgctgaatatgagcgtatgaaaaacatacgaacgataaagcgtgcattttctgagatgctcgtccgattcgagaatttccaggagatatgtcgcctctatgtagacaggaaaatggagctttgttttacgactgacagtaccgaccgtggaaagctatgggaaatacaaagccgtcttgattgctcttacggcgaagcaattgagatactgtatgaacaggaagttgctagcaatgcagctgcataa

SEQ ID NO: 144610 - DNA, 951 bp, Enterobacter cloacae
atgaacattaaaaaagttattttcagcgctctggttgttggttcatcttcatacctagcgggttgtactatcggcagctcagaatcagaatgtccgggaattgaaaaaggggtcgtttgtaaaggccctcgtgaagttatggaactaacgaataaccgtgatgatctttccggccttgcggaggaagaagctaattcgggaaaggagaaatcggctgtcaatgacagccagtaccctgcccaaatttcgccgcctggcgctgtgcaataccctaagtctgccgtcttggtaaataagcctgtgacatacaagacgacgcaaattaaacctgctggccaagtccccgttatgtacgatgagacattaaaaatgggcgcgccaacatcaacaatcgggccacggccgataagcggcgttccagttaattctaatgtaaggatgacaacgagctacagctcaacaggtgcatccggtaacccttttatccatccgactgctgatgtcatgaagcaaacaacacaggttgtatctccggcacctgtaccgcgctacgttgcgccaaattccgatatcagtgctagtaaagacctttactccgttaataatggacagcctgtaaaccctacgctcagctctggccagatccagcaataccgtacacaagggtataaacaggctgtggtagctccagaaccgcttgctgtacttcagcaaggccgcgtcatgagaatcacctttgcaccatacacggacgataatgacgctttaaacctgcctggctttgtctatgtgaatgtcaaaccccaaacttggattgcgggtaaaaattcgacatcaaatccggcgcgaatagttcctttgcaagttcaggatgccgctcgtgaaaatatgcaacagcaacagcgagcaacgaaagcagtttcgtctaacggtattatcagacaactctga

SEQ ID NO: 144611 - DNA, 825 bp, Enterobacter cloacae
atgatcacagtgtgtccaccccttacaaatgctgctgaaaatgtattaaacaacactgatgcagctgcattaatggaaaaagcaaaagaaggtggagtgtccacgaaacctttagagggcgtactggcgaaaatgcaaagctataagcctaaagatgttatttacatcccgactggaggtctttatctgttccaggatgaacgttcgcagttgatggctgtgaccactgatggacgttatacaataacgggtggtagcgtcatggacattcttcagagaaagtcagtcttatccgtagaagatgtacgaaaatcctactttattaatttagacgacgccccctttcctcttgatactgtggcattgatccctttaggaaacccaaaactaaaaagacaagccgctatttttatcacgcttgattgtgatggttgccaagatttaataaaaaaattctatgacgaaagagaaaaataccgggttgacatcattttaatcccctcccccggtgagccaaagcaagaattacgtcaactatggtgcagtaaagaaaaaggcaaagtgaatgaccttgatatcttgcgttggcttatgggaaataagaccgatatagaacaaaggctcctgacaaaaaaagaggcagaaacatgtccggctgagccattggtaggatctctgatgctggcaggtatttataaattacagggcgtaccttcagttgtgagacaagacggacttgccggtaatggcataccgaaagattttgattcatggttaaaacaaagtgtcgaacccttactcaaaaacccatttgctactaattaa

SEQ ID NO: 144612 - DNA, 507 bp, Enterobacter cloacae
atggaaaataacattgaaccaggaacaaaaagtgattctgctgaaaacgtgaagcttgaggcggctaaacctgttgggggtatacgtacaaccaaaaaagtaactttggaaatagatatcgagaaaaccctcaagtatttgatgctagctggcctagctgtgcttttcgtgatctatggatacaagggggcgagttttgtttatgaaagcgtcaaagcaatgtcgaatccgtcctaccaaattgcagtacttgatatgcaaactttaaggaaagaatttaataagcagaatcctgagccggatttggtacagtctaaaaacaactttgaaaattactttaaagcattaatgaaagtttaccgttctcgtggctatttggttattgatgcatcattagcagtaacaattccagataatgttcaaatagtctcttatatcgaccttggtggaagttttggtgaggtacaatctctacaaggcgaaacaaaagaaagtgagatacgataa

SEQ ID NO: 144613 - DNA, 318 bp, Enterobacter cloacae
atgacaagtcagtacgaggtacctccacatacctatcgtttcccttacagaattaatatgcctttgttgattctattctgggatgcaaagcaattgggtataacattcgtgactatcgcgagtggtaatatttttgatttctttataacttctgtagttgttgcggttgtgttttggtttgcatataaaaaagcagctgaagaaggagttagaggaaaactcaaacacaaactgtggtggttcggcttgtttccagggaaatcagtgtttagtagtcgttactttaccgatccatttatcagaaacctctattcttga

SEQ ID NO: 144614 - DNA, 354 bp, Enterobacter cloacae
atggaactgacattgaatactaacgttgaaagagaacaaactaacgcttttgcatttctgaagtctaaacatgcaaaagtgcctttgtttattctcctgtttttagcaagttgcggtttagcgtacgcgggttccgacgacggagccttcggcgatatctgggcctacatgagcgaagcattaactggtgcgccgggtaaaatcatcgcttgcggcatgttgttctccgtagcttatttcggcgttgtaaaacctaaccttggtttggcgctggtttcagcattaatgatgctgattatggcaaacggtgaaaaaattatcagcacgttcctggatgctggtatcccgctgtga

SEQ ID NO: 144615 - DNA, 528 bp, Enterobacter cloacae
atgctttttggtgaaattcagctatcgaatcccattaagagaggtactttcagtccaaaggcaccttttcaggtcgattcatccaaatgctttccggtcaaagacaccgttacggcgccattcatgcaaatgcctgtcaaccaaaagcaccttttactatcccattcatgcaaatgcttttcgaccaatgccccgtttgctgcaccattcatgcaaatgcttttcgaccaatgccaccgtttgcggccccattcatgcaaatgctttcagctaaaggcacctttttactgtcccattcatgcaaatgcttttcagctaaaggcatcttcccgcctcattcatgccaggggtttccaacgtaggcaccttacacaaactcattcaagcaaatgcttttatacaaaaggcacttttctgtcgccattgaagcaagtgcttttcacaaaggtcacttttctccccccattgaagcaaatgcttttcaccaccactatgggatttttaaacgatttgcttttattttcatga

SEQ ID NO: 144616 - DNA, 282 bp, Enterobacter cloacae
atggcgctcaatgactacgcccgctccaacgacccctttacacgggtcggccggcagcaggtcgctgtcgacgtctccagcgtcatccgcgcgtccccggacagcttccgcgtcgcctgggtcgagcgccgatacgaaaatggccagctcgccgagaccacgcgctggaccgcgatcctgacgatcgtcgtgcagatcccccgaaacgccgaccggctcagggcgaacccgctcggcatctacgtcaacgccatcaactggtcacgggagcttgggcaatga

SEQ ID NO: 144617 - DNA, 180 bp, Enterobacter cloacae; identical to SEQ ID NO: 144106

SEQ ID NO: 144618 - DNA, 2064 bp, Enterobacter cloacae
atgaactcatttcccattgaacaaggtgagcaactcagggtaggtactgtagattttgtttcacccaatgaaattagagcactattagatatcgattcacctgatgctgtcgctttgaatgcaggcacacctagaaattttcctagagtaaacagctatgtattagtctcatgtgataatggttacttagttgggcaaatagagtggcttgcagttgagcattcaccttatcctaaacaaagagatattcaagattttggtctagtaaacctaccatttcctcgaaaaaaaataagtttaaatccagtcggaactcttaaacgcttttccaaagatggtactgattattttaaatttcaacgcggctctgaatcatttccttctattggttcagctattttactaccaacagatttacagcttagatcaattgtcgagtctggtgataatagacgaatagttattgggcaaagtccacttgctaacaatgctaatgtagccgtagaccctgatagattatttggtcgtcatatagcagtacttggtaatactggtagtggtaagtcttgttctgtcgcaggattaatccaatggtcactcgaagctgcaatggagtcagaagtaaaaccaaacgccagatttattatattagaccccaatggcgagtatgtacgtgctttgggaccaactacaaaatttaaaggcagaatttttaaagtcgaagctggggaaaatgagcatcaactccaagtgccatcttggttttggaatagctcggaatgggcatcatttacgcaagcgagtcctaaagcccaacttcctttactaaagcgttctctaagggcaatgagaaacgaagattttgaacttgaaacaacctcaaatatagaaataaaacgttttctagggaatgttctcataaccttaaaacatgataaaagttcagggaaaccctttggagcttgggggcctgcaaaaggctttaacgagataatgggtaaatggattgaaagctttgaaggatacagagataaacttggaaataacaacttaacgaatgtaatcacaataatgtctaaatatagacaagataggaatgtacagtacgcaaccatgcaagcgaccgtgcctgaaatagatagcattatcgagagtgttacctctgcatttagagagttcggagggtttgagaaagagttactaccaaagaatgaagatataccgttaccatttgatggtaataacctggttgcctatttagaagctcttgctcaagaaaatggcagtgaacaatatgttgaatatttggttgccagaatacgcaccatgctctcagatacaaggatgagatctgttactaatgatgctgataatcggattgacttagctaaatggttagagaaatatcttggtaccgattgttcaagagatgataacagttgtatttctataatagatctatctctagttccaagcgaaattactcacattgttactgctgtgatttcaaggattatttttgaatcattgcaacgctatagaagactatataataaatctttacctacggtacttgtagctgaagaagcacatacatttattaaacggtatcgtgatgactctgaaaatcaggatgtcgcagctgtttgctgccaagtgtttgagaaaattgcacgagaaggcagaaaatttggtcttgggatggtggtttcctcgcaacgaccatcagaattatcacctacagttttatctcaatgtaatacttttcttctgcatcgaattagtaatgacaaagatcaggagcaagttcataaaatggtacctgataatttgcgaggattactccgtgagttgccttcactgccatcccaacatgcaatactgatgggctgggcatctgagcttcctgtcctggttaaaatgaaaaatttgacgaaagatcagcaaccccattctgatgaccctgacttctgggatgtttggacaagaaagtatgctgatgggaaattggtcgagagaactgtcgattggggagctgttgtaaaggaatggcaacaaaagtga

SEQ ID NO: 144619 - DNA, 483 bp, Enterobacter cloacae
atgtcaaaaaagaagaaggcagtttcattgtttgtatctttatcgcaaataaaggccataaagaatatagttcttgacgatgaaagtacaaaatttctttctggcgcacacccagaagatggtgatttaatcgcagccgattttgtatatgataatataaactattcactcattgatgggtgttcttctgtgttaggagttcacagattatcttgtaacttcacttttgaagttaggagtgacacaactaatattgcaatagaaaagcatataaataattttaatatatacaggattggaataaaagcttcatttctttcactagaaaaagaaactttaaaagtacaattttctatagatttcataagctatagcgatagctcattcttatctaaagaccgaataataaattcattagacctcctggcctcctcatctgaatacttttggagctcagcaaaggaaataatgaaggataagtaa

SEQ ID NO: 144620 - DNA, 498 bp, Enterobacter cloacae
atgacatggtcaaaggttttatctttcctcctcaacgtatttctttctacttatctattcaaggtgttagtagatgaaaaagttgatcttaaactagcatgtggcatctacgctggctatgtaataatttacatgctgctgtcagataagttttcctcgtgggataaggaatcaggaatatcaaaagcaaaagcaatcgcttcatctagccaagaacaatgtgagaaatataaagattgtatgctgggagtccatcacttagcattagattgtataacaagtgataaaaaggggaaggaacttcgttatcagttaaacattatgataactcagctatctgaagcggttttcgactctaaaaaatctagcaacgtttataaaggcgatgaacaaaaagaaagcaacgagcaaaagcaagcctcggaattagcattagagaaaattatagggaaggttatttctaaagaaaaacaagataatggtagtaaaccaaactag

SEQ ID NO: 144621 - DNA, 264 bp, Enterobacter cloacae
atgaatccggacggattcaagaaattcaagcatgactgtccttgctgtcggctctgtttcagacaaaatctgtcggtatgcatccagcatcatgcctcccgcatcccccccggcacgccggaggcaaccggaaacgacggaaacaagcaggtgtcgctcatcatcactaagagtcatcaggtccccagaagaaaaaccaaacatggctatatcctgttaacggcaacgcagaagaaaggtttacagggtagcgggcaggaatga

SEQ ID NO: 144622 - DNA, 387 bp, Enterobacter cloacae
atggccaagatatcgatcagtgaggccgcacggctgaccgggaagagtcggacaacgttgcacaggttgattaaaacaggtgaactgtccacctgtcatggtgcaaggaacgccagaatggtcgatgtttcggaacttatccgtgtttttggccctcttgagcatcgcccgtctgaacagggagctgcacaggtttctgaacactctgacacaggtatttccgcgcagagtgaacaggttattgcacagctgcggcaggaagtggaacacctgaaaacgttagtttccgccaaggattcacacatcgatagcctcaaacaagcgatgctgctgatcgagcacaggcataccggggactcaccctggtggaagttctggaaacgctga

SEQ ID NO: 144623 - DNA, 192 bp, Enterobacter cloacae
atgacgaaacaagagaaaaccgcgcttaatatggcgaagttcatccaagggcagtcccttttgttgttggagaagctgaatgagcttaacctcgacatggaagcggacatgtgtgaaaaactccatgaggatgcagagatgctctgcaggactctctatgggcggttaaatgctctacaggatgcaggttaa

SEQ ID NO: 144624 - DNA, 435 bp, Enterobacter cloacae
atgtataactcaattttggttccaattgacatttctgaggatagcctgacgcacatggttatccccttcgttcaggcacatacagcacttaacacagctaaagttcactttcttactgtcattccatcgctaccgtattattcatcattaggcctggcctattcggtagaaatgccgaagctgaaagagttccagcacgcggccttagcgaagctggatgaaatcgttaagcaattcaaaatccctcccgacaagatacagtctcatgccgtgacgggatctccaaaagatcaaatccttaagctcgctgacacgatcgatgccgacctgattatcatcgcttcccacaaacctgacatatcgacatatttgctgggttcgaacgctgcggcagtggttcggcatgcgaaatgccctgtcctggtcgtgagatag

SEQ ID NO: 144625 - DNA, 612 bp, Enterobacter cloacae
atgttacggcatttattcttactgaccgccacaacgttcttatgtgggtgcagctatcatttcgggaatgatgttgatgcttacgatttaatgtcacgcccggtaggcaacaagaaatttgaaattgtagcgcctgatgacagtatacaatcgcgcatgtttgcagcccggtttgcgagtggattaacggggatagggtttaatatttccaaccatctgcccgactatattctcagattcagttacagtaagacccaggaaaatatgcaatacagtgaacagctggtgacgggcataaccggatatgtcgtcgagaagaagacaacgaaaaaagataaacacgggcagactcagacggactatgactataaacccgtcagcgggatcgtggggtcagagacgatatcacagaggcatttctggcgccgccttgatgtggaagtctaccctgcggggaaaggggcacaacaggttcttaaagtcagtatgcagagcaatgcgccaatcccatcggacagcattgcgtattccgcaatgatcgacgctctggccgggaaactggatgccccgctacgctccggaaactatgtcgcatcggttccctggaactaa

SEQ ID NO: 144626 - DNA, 468 bp, Enterobacter cloacae
gtggtacttacgatacgcttcagcgccaaatgcctggtacacatgcaggcctgtcgccgcccccatcgcagaaacgggtttcgaaccagcgaagattggaaattctttaaagaagaatttaacatcgctgctctggctcaacacggattcaacgaccggcgctaccttcatacagaaatggcactggtagtcgaaaaactcgatgacggcgacggccgcattatccggtccaatgttgggagtctctttggtctcgaagagagccggtgcgtaagggatgatccgctcaagggaggcgttggtattttggttttcaagagccttacccgcttcaagcagatactgaggattttttaccagataggtagccgctacctttcctacttcatcgttactggggagctcagttttaaaatatttcgacgtgatatacacagagccagccgtcgcaatcaacacagaaattaa

SEQ ID NO: 144627 - DNA, 201 bp, Enterobacter cloacae
atggacaagattgtacattttaccgtcattaatacttttaacgatttacttattgcgaaagcctcgctcgaccgtaacattgttgagatcaacgctggtaagcgctttgatcattttgaagaaggacatgatcagtatgtacagaaagtgactgacgctttacttatcgtggagggacgtctggagaaccttaaaaaatga

SEQ ID NO: 144628 - DNA, 720 bp, Enterobacter cloacae
atgaaacattcaattttttttactcacgatggttatttattgccagcggtcgtaaagcctttccacggtaacgatgggcactattatgccatgatcacacgtgaatgctttgcctgcggagggacaggagaaatcgcaaacgccgtctgcgtgacatgtaatggaagcaaaacgtcaccggccacagaggaaaaactggtactgaaagagggcatcgaatttcttgaaactatcccggaatttcgctgcaatcccgatctagacgcttggaaacgtaggcacagcgggcacctggcattgttacaagccgataattctaagtttgcagtaagcatttcacagcagttaaacaacaatctctttttaacagttcgtcagttagaatctttctactcaacttaccaacccgtttctaaagatttgccagaaaacgctgatgtacctgttgagcattctttcagcattggtgatgtagtgagtattgatatcatttttacagaagtgcgagctgctttttcaaaaggctcccacagctacttttttacttttacaggcaaaaagcagaatgatggattcgcattaacaggtaatgtgcaggatcatgttttattggggcatagctatcatctttccggaagggtgagaaagatccactattttgactctgtgccctacgcattactgacggtgtttaaattaaccacaaagcctagtgcgtag

SEQ ID NO: 144629 - DNA, 291 bp, Enterobacter cloacae
atgctgggaaaagaaactatcgtctgggtcgctaagcgggatgttcttcttaccagactgatgtacgagcttggtgtacagacgctgctctgcgaaaattacctggaagaggaactccctcagcgcatgaaatccaccagtttcagatcaggatatttgcctttacgccccgcgctaataaataacatgaataaaaaaaacaggctcacacactcagagctgaatattcttatcgactgcgcccgaggtctgaatgcctatgaaatcgccagtctgcgccatatgggataa

SEQ ID NO: 144630 - DNA, 321 bp, Enterobacter cloacae
atgcttctggaagaaagtggcggtaaagtccttcaggtccttaatcagagtgttatccgactttgcccagttcatggtgaaatcaaagctgtttttatcccgcttagtggtactggcaaagtaccgggtatcagtcccgttggaaatcacgaagagttgcaggtatttaaacagggagttatcgctgttaaagctttccttgctgtaacggtgtatctggttaaaggcttcacgaatcgccacaccgcgttttttgagttcgatttgcaccagtggaaggccgttgaccagaatggtgacgtcataacggttagcgtgtga

SEQ ID NO: 144631 - DNA, 399 bp, Enterobacter cloacae
atgactataaaaaaatcagcgctggcggcaacgatcggcgcggcagtggcattgactaccttcgcttctcaggcggaaatcaccgttcttaagcaggatcctcaggcgggtaacccgctgagccgtctgaacttcaccgttggcggcagtattcgtcctcagttccagaacatgaccggcgacgacggtaaaaacagctacaagcgtaacggctttgacggcggcacccgtttccgtttcgcggctgattactacctgtttgatgacatcagctggatcagctactacgagctgggtgtcaatattcctgcgcagtttaactgggatcaccactacgccgacggcgcacacgacaccactcgtcgtatgctctacaccggtctgaagagcgatacctga

SEQ ID NO: 144632 - DNA, 1458 bp, Enterobacter cloacae
atgcaggtcactattgacggtgtcccgtatgcacccgcctgcgcaatctcatcgcggatcggcattgccatttcgacgcatcagcgcgcagacgttttaaaacgagcactcgaacagcacatgaagcacctgccagctggtgcgctggtggtggtagtggatgatggttcaaaacctgcagcggtagttccccacggcgtgcagctgcttcgccatgaaacatcacttggcattgttgcttcgaagaacgccagcctgtcagccctgatggatgccgggtgcgagcatatttttctgtgggatgatgatgcctggcccatcgccgataactggcatcttccctacatcgaatcacccgagccacacctggcttaccagttcctcgatcttgttggccagaataagctcaatgacctttcggtgctttaccgtgacgataagcatgtggcgtataccgggcagcgcggagtgatgctttattaccaccacagcgccatcgagaaggtgggcggattcgatccggtttatggtcgcggcatgtacgagcacagcgacctagctctgcgcatccataacgcaggacttactacctgggcttacgctgatgtcgtcggttcagcaaagctgatccattctctcgatgaacatgaagcggtggaacgttcagtgccgaggcccgaccgccaggcgctggtggaacgtaatgtgaagatccacaacggacgacgtgataccggctttaccggttacgttgaatatcggcgtcagcgcgacgtcgtcgtcactacgttactgaccagccagcctgaccctcagcgcggtacgaaaatgacggcctcgcctgacatgctggctaaatgggccgcatcactccggcagtgtggacgtattgcgctggtggatgaattactgacggcaccggcagacgttgagctgtatcgcgttcctgatgtgaagatgaatgtctacttccggcgctggctgcatatctggcagcacctgcgagatcaccctgaataccggttcgtctggtgtactgatggtaccgatgtcgaaatgcttcgcgcgccgtggggagagatgcagccaggtaaggtttatgttggttcagaacctaagacatacgcggacacctgggcaaagcagaatcatccagagcgtatctatcaggaattcattgaagcgcaccggaacgatgtgatgcttaacgctggtctgctgggcggtacccgcgctgatgtcatggcgtttgctcacggcatcatccgtctttactacaggatcgagagttatcgtttctggaagaaagaacaggctggcgctgcggtgggtgatatgctggcgttcggcattgtcgcgcagtcatttgctgacaggctggtcaccggccctctggtacataccgttttcaaaactgatggtatcggtggggaggccacatggtggaaacacaagtga

SEQ ID NO: 144633 - DNA, 1113 bp, Enterobacter cloacae
atgtcagataacagccagaaaaaagtgatcgtcggcatgtccggcggtgtcgattcctccgtttccgcctacctgttacagcaacagggctataaggtggagggcctgttcatgaagaactgggaggaagatgatggcgaggaatactgcaccgccgcagcggatctcgccgacgcgcaggccgtatgcgataagctcggcattgagctgcacaccgttaactttgccgcagaatactgggacaacgtttttgaactcttcctcgaagagtacaaagcgggccgcacgccgaacccggatattctgtgcaacaaagagatcaaatttaaggccttcctggaattcgccgcggaagatctgggcgctgactacatcgcgaccggtcactacgtgcgtcgcgcagatgtgaatggcaaaagccagctgctgcgcggtctggacggcaacaaagatcaaagctacttcctctatacgctgagccacgagcaaatcgcccagagcctgttcccggtcggcgagctggaaaagccgcaggtgcgtaaaatcgccgaagagctggacctgatcaccgcgaagaaaaaagactctaccggcatctgcttcatcggcgagcgcaaattccgcgatttcctggggcgttacctgcctgctcagccgggtaaaattgtcaccgtcgacggggaagagattggccagcatcaggggctgatgtaccacacgctcggccagcgtaaaggcctgggtattggcgggaccaaagaaggtagcgaagatccatggtatgttgtcgacaaagacgtcgaaaacaatattctggttgttgcccagggtcacgatcatccgcgtctgatgtccgttggccttattgcacagcagctgcactgggtcgatcgtgagccgctgaaaggcacgctgcgctgcacggtgaaaacacgctaccgtcagaccgatattccttgcaccattaccgcgctcgatgacgatcgcattgacgtgcgtttcgacgagccggtcgccgccgtcaccccgggtcagtctgctgtcttctacagcggcgaaatctgtctgggcggcgggatcattgaacagcgcctgccgctgcctgctgtttaa

SEQ ID NO: 144634 - DNA, 510 bp, Enterobacter cloacae
atgatgatttggatttatgctgccgtagcctgtgttgccgttgcaggttactggctcttttgtcgcaaaaatgctcttaaacaccagcaaaaggccgccggcctgattgagcagtactttgccgacgaagccatctctgacaaagagaagattaaaatgtataccaactaccgcatgatgcgtagctggtttgcactgccgggcttgatgcttgttggaccaatttttataattgtggccattgctactggtaaattcaaagcggaaagtttttctaccgaaaacagtaaagaattcaacaatgtattcgattcactgatgaaaatgtacattgccaggaaccctttgacctctgctgctgtaatgtcttttatggggttagttttcgccatctccatggtcattgggatcatgttgaacaaggtcatacagttccctacttatggggcaatctcctccgctatgctaacgaaatatctttcgttgaaatccgggcgacacgctcactaa

SEQ ID NO: 144635 - DNA, 1230 bp, Enterobacter cloacae
atgaaattgcatgaactgaaacaaaaacgtaataccatcgcgaccgatatgcgcgcgctgaatgaaaaaatcggcgataacgcatggacggaagagcagcgcaccgagtggaataaagcgaagtcagagctggaagccctcgatgagcgtattgcccgcgaagaagagctgcgccgccaggaccagacctacgttgatgaaaacgaggaagagcagcgcaataatcaggatccggataaaaatcctcagaaggatgagaaacgcgcccagattttcgataaatggatgcgtcacggtgcaaacgagatgagccctgaagaacgcaaaatgcttcgtgaattccgagctcagggtgttgtgcctgatgaaaagggcggttacacagtgcctgaaacattccgggcccgtgtggttgagaagatgaaagcttacggcggtattgccagtgtcgcacagattcttaacacctctgacggcacaacaatctattggcctactgctgacggcacggaagaagaaggcgagctgttaggtgaaaacaaggaggccagcgaagaagatactgaatttggctctgctgatcttggggctaaaaaactttcttccaaaattatccgtgtttccaatgagctccttcaggacagtgggattgatattgaagcgtacctggcacgccggattgcagaacgtatcgggcgcggtgaagctaaatacctgatcaacggaactggtacaggtacacccgttcagcctaaagggcttgctgcctctgtaacaggaacgacgacagctgcagctgcaaatacctttacctggaaggagatgaacactcttctccataccatcgatcctgcgtatagaaatggtccaaaattccgttgggcatttaacgatcagaccctgaaaatcatcgaggagatggaagatggccaggggcgtccgctctggttaccaaacatcatcggtggagcacctgcgaccgttctgaaagtgccatacgttatcgatcagggtattgctgatgtcggtgcgggcaagaaattcatgtatgtcggggattttgatcgctttatcgttcgtcgcgtgaactatatggttctgaagcgtcttgtcgagcgttatgcagaattcgaccagaccgcgttcctggcgttccatcgatttgactgtgtgctcgaagacacctcagccattaaagcgctggtgggcaagggctctgcaagcagctaa

SEQ ID NO: 144636 - DNA, 873 bp, Enterobacter cloacae
atggaaaacgtgcatcctctttcgctctcaacggttcttatagttcttaaatccaagggacaaactgtttcaagaggaacaggtttcttttatgcagataaaagagaacgcctcttcatagcaaccaattaccatgtcgtgacaggtaataagcctggttctggcgaagccccgcagggagatgagatagagtttgttgtaaaaatgaaaaaaggcgatccggtaatttttcggatagctttatttgttggaaatgaaccagtatggcaccaacattctacagatagagaagcagatattgtcttgatcaaattgcccgatgcggattacacagaacacgatatagcagtaataactcaccagtcgaaaattccaaacgtacaaattcatccatcgtcaacagtggtgttaatcggttatccgcacggagtacatgacttatcaaataagttaccaatttggaaaactggcagtattgctagcgaacctgattatgacttcgatggacaaaaattattcgttgttgatgtgtctgcttaccctggcatgtcgggctcacctgtgttttatgtttcgcatggaggctttgtaacaaagggtggaggttatgcgattgcgcctggtatgcaagctcattttatgggtatttacgctagcatgcttaatttaaatagtgaactcgaagtagatgactcgtcgggcgctcaggccataaaagttaaacatgttgaatctttagagctcggtcatgtttggaagtcttctctcatagaagaaatggctgatagttttgctgagcagcaaccaagggattcaaaagttataaccagcaagaaaacacaatggcaaccagggaaggggtttagattttaa

SEQ ID NO: 144637 - DNA, 546 bp, Enterobacter cloacae
atgatcccgttactcccggcagcgctgaaaccctcatggcgggtgttggcgctgctgttcatcattgttgtggtggcaggaaccattgcgatccttgccatccggctggcgcaaagccaggcagataaccgcgttctggcatcggataaccagcagcaggggcaggttattgcgacgcaggcgttcaacttcaaccggttcaatcaaatcgctgagcatgccaacaggctgaactcactgattgacaccggaaccgaagaaactgtcatcaaataccgggagattctccgccgtgaaaaaacctgtgatctgcctgttcctgctgacattgctggtgggctgctcgaatacgcgcaccgtttacgtgccagcgccatgcacaccgataccagcagacctgacgcagccgatgatcgttccgctgccgccagctcaatgacttactgccaggctgttttgtggatcaagccgctgctggccgttattgagaagggcaacaacaacttcgcgggaattaggcagatagagctggaaaggaaaaactaa

SEQ ID NO: 144638 - DNA, 486 bp, Enterobacter cloacae
atgccgcaaaatgaattacgctggctggtagaggcccgcaaatatatcgggcagatggaaatcaaaggcccgcgtcataacccgttaatactccagttctggaaagacattaaacgaggcggcatcaaagatgacgaaaccccatggtgtgcagcttacgtcggtgccatgctcgagcgagtcggcatccggtccacccgtttcgaatcagccaaatcatacctcggttggggggtacagcttcgcgaaccagcttacggatgcgtagttgtattcagtcgcgacggcggcgggcatgtggggtttgtcgttggacaggcagataacggcgatttgatggtgctgggcggtaatcagtctgatgccatcaacattcgcgccttttcccgttcccgcgtcaccgggtatcgctggcctgttaacgaacctctcgacagcaggccattaccgatgatgagtgccgccagttcggtaaaagaatcatga

SEQ ID NO: 144639 - DNA, 342 bp, Enterobacter cloacae
atgaaaatgccacacaatccaaacaactggcctgactggctcgagctcttacagagctggtggcgtggagagacgccgctgggtgccgtactgatggcattcatcatggccgcgcttcgaatcgcatatacgggcggaggctggaaaaagatactgctcgaaggtcttctttgtggagcgctgactctgacggttgcctccgcactggaatatatggaatggccgaaatcgatttcaattgctattggcggagggattggatttatcggtgttgagcagttccgccgtctgctgcttggcatattaaacacacgcttgggaggtggtaatgccgcaaaatga

SEQ ID NO: 144640 - DNA, 753 bp, Enterobacter cloacae
gtgaatacatttttgtcgcagtttttaaaaaaagaaggcttggtgttacttttttttactcttctagggtatggagttgctctttcatatgaacttgggtatgcgatttatttttctttcgacacggaatatattcaggtagatatacgcgcaatctataacgggataattaatgtcctctcttatttccttgtcgcccttgttttcgcgacagttttcaagcaaaccaaaactagtgatgcacaaaaattcattcagatcatcgtttacattcttcttattattgtcttgtcgtcgcctatgacagctaaaatgatatatgccaacctgataacaaccttagtgatgtgcatgggtatttttattcttcatttcacctatacttaccttgctaataaagacgcactatcacaaccggtgctggcaggtattggatgtctctttgcaataagcatgtcgaccacagttgggatttcccgcgcttccacagaggcagcattcaatgtttttaaatatcaaaattctgaatatgcaattataagaatatataatggtagcattgttggaataaaggttgaaaatgaaaaactatctcataaagagaaaatttacataccgaacagtgaagtaaaaacaatggtgctcaggacaatgaaagttcaaacaaaaccaggactgttaaattataaaaatgaatatccaactttccctaaaaactctttgggtgatctcattcttacagacaaggagtag

SEQ ID NO: 144641 - DNA, 180 bp, Enterobacter cloacae
gtgtccggcgagattcctgccgtgcaaaccctgcgtcatacgtccgagctggaagccggcgagacttacatcttcctatgcaaagccgaagcctgggcgatgaagatcggctgccatctgactatccctcaatattgcaagtaccagcaactgcgcgataagcatgagataaaaacgtaa

SEQ ID NO: 144642 - DNA, 171 bp, Enterobacter cloacae
atggccctgcctgttgacggcatcaaactccatcgcggtaacttcgccgttatcggcaagtatattcagccactactggataccgggcaatgcttccgcctgcatgtgaagccgtggcgagagaggcacagcctggctcataacgcgctcagccacttgtggtatacgtaa

SEQ ID NO: 144643 - DNA, 855 bp, Enterobacter cloacae
atgaccagccacaaaatcaatatcggcaaagcggtatacagcgttaaacagcacgaaaatggaacattcactgcacataattgcagcacgctgcgcgaagtgaaatctgaaaacacgatgcgaaaaattttcaaagctctggccgaacgcgaccacgctgaagcgctggagattgatgctgcaatggcggcagaaattgagagcatccgcccgaacatggcgcacatgactcaggcagaaatccgcgagtatatgcacgaatgccacgccgaggcgctgggcatgaatgaacaatatgatttttacagcaacccagactggcagcgccaacttttagcaaaagcacaacgtgaggcactggaaatggatgctgagacgaatcgccgtcgctatctctcagtaatggcaagcattcaaaacaccatcatgaagcgcgatgatctgccagctctggtggaagcttgccacgctgcggcgctggaaatggacgacgaattaaaccattcgaaaaacaagtctgaaatagaagaatcagcaatcagcatcagtcctcctgacctcgcacaacgcgctttcgcattccgcctcaattacacacatgagggccgcgaacgccggatcagagaagcgcatagcgaagctctggaaatcaacaccgcaatcgacagtatgatcgatgcccggcagcaaatcgcaaataaagaacccgattttttacaagaaacctgggatctggttcgtctcggtaattcttacaaagaagcaggccgtgaatggtaccgctgggcaaaagcaacagccctccgattatgggaaagcagtttagctcagcgtcaaagacttcaggcgcaataa

SEQ ID NO: 144644 - DNA, 273 bp, Enterobacter cloacae
atgaaagtaagcgttacaagcgttgagcttaatctcgttatcgtaaataaagaaattgccacctttaatattaatggtgttatttcgggcgtggttcatttgccagcttctggccctgtaactgttgtgcttgatggcggctatgtgctcggcgaatttcattgcccggtttgcgctgttaagcacattagcttgctgtctatggatttcactgcagcgcagaacgactgcggcatgtcatattacgaccacaagcaccagtatctgaactga

SEQ ID NO: 144645 - DNA, 1215 bp, Enterobacter cloacae
atgccgctaaccgatctggagattcgtcgggcaaagcctgaagagaaaccctataccaagaatgatggtaacggactttcattgcttattgagccgaacggctccaaaggttggcgcttccgttatcgcttcgacggcaaggccaaaatgctctcattcgggacttatcccacgatttcccttaccgaagccagacaaaagcgagacgaggcgaaaaagctggtggcctcaggtatcaaccccagtgaaatacgcaaagatgaaaagctggctcgaaggggggtaagcgcaagtacgttcgaagctatcgcacgcgagtggtatcaaaaacgccttgatcgctggtctgccagttatagcgaagaaatgatgtctacatttgaaaaagatgtgttccctattatcggccaccgccctatatcgcaaatcaaaccgctggaacttctggcggtactgacgaggttggacgaacgccgggctacagagaaaatgcgaaaagtccgacagcgatgcggtgaagtctggaagtatgccattgttactgggcgggccgattacaacccagcgccagatcttgccagtgctttcgccccacacaaaaaagagcactatgcctttttgacgtctgacgagatcccacttttcttgcgaacgcttaatacctacagcggtagtattctggtcaagttggcgacgcgcttgctgatactgaccggcttacgccctggcgaacttcgccaaggtaaatggtcagagatagatttcgacaaacagctttgggaggtgccgcctgaacggatgaagaagcgtcgcccccactgcgtgcctttatcagagcaggcgatcaatatactggagcagataaaacccatcaccggaagatacgaatatattttccccgggagagtccaccataccaagcctatgagcgaaatggcgatgaacgtattgtttcgtcgcattggttatggggggcgagttactggtcacggattccggcacacgatgagcactattcttcacgagcagggttataacactgcgtggatagaaacacagctcgcgcatgtggataagaacagcattcgcggtacatacaaccatgcgcagtatctggatggtcggcgggagatgctccagtggtatgccgactatatggatgcgctggagcaccgggaaaacgtgattcatggcgcgttcgggaaaggtgcgtga

SEQ ID NO: 144646 - DNA, 807 bp, Enterobacter cloacae
atgagtaaaaaaccggaatactgtcccgagtggttcgacttagaaaattatcgcgtatgcgaaaattacaccagaaatcactggtggaaatcgataatgacccgcaagattattttgtttaacggcattaaagaagacttagcgaacggaattagcaaagattttctattgcaatctcttatccatctgtccacaagaaacgatcttattttaaccggtcatgatgtaatcgaaaattccagtattgatgaaatgtggatgtttgattttattgatttatatgcagatttacacgagcagacccctgaagtcatgaatgctataaatgctatgcttaaaaagcatcttgagaaaaatagaatcaataaaatagaaggtaactcatcatcttgggatgattcagaatactcgactacattatgtaatgacttgaatctatacaccccattgagtgatgattatccgggaataaagaggtttatacgtgtagatttaaataacaatgacgaaaaaataatgcgtgatttttcagagtggcttgcgaatgagagaaaaattaataatgaagggaatcgctcgcaaaagaaaacagataatgaccttaaaaaactttgtgaatacaaggtattaccttatatagacctttttttatggggagagattactggcatcactttaacccagtttcaattggcacaattgcttttccccgatgaattcgaggtggatattaaagatcgtcttaggtcggtgacgagaccgaaggccatggagttgcttgaaagccgcgttgacacattcatgtaa

SEQ ID NO: 144647 - DNA, 435 bp, Enterobacter cloacae
atggaaaagaaaaaccgccacatacagcaggcggctaactcagatattcgcacgtctgatattacgcctgctaccagtaccgttcaagggccaaagcgcacaccgaaaaagcatcgcgcccgcgtttatatgctgcgaacaggcattgagggatggacggaaaatgacattctccgctattgccgcctttcgtctggccggaattatgccagcgagttagaacgccggttggatatttgcctggaacgttcggaagaacccaacacagacggcatcggcgcacacctacgctaccgcttttcctgccgtggtgatgtactgaaggttatccagctcgtaaaccagtacgctgttgctggcggctatctcgggctttcggatcaggagattgccgatattctctctctttatccagatagccaaagcgccgcataa

SEQ ID NO: 144648 - DNA, 648 bp, Enterobacter cloacae
atgaattctaattctatggcctcaattggtcaggggcgctgtcacgctgaaaatgacacttccggtattctgtcacttagcgggtggcggggagataataatggcctgacgatcggcgcttataaaaacggcttgccactttgcgcaaaccagtattacactgcaaaggcaccagcaaaatctggtgtcaggattggtctcctggtaatctgtgcggcgacatatgacgcgccatgcgtctttttttatgtcgttaatctggctctacctttcttccgcgtttcgggtatcatccggggcgctcgcaaagtaatggtgggctgggtgggggcttcttcggaagcgccggtatccgtacaggccggtaagaccaacctcgctcagtccaccaccagcaagattggtctcttcggtggtggtagttttaactactgtacggaggctgccaatatggctactaccctcgccacacctcaaaccaaattcatttggctgatcgccgcagttcgccgcgattgcccgacaatcaaagccgttatccaccacatcgcagcaaattcagaacgtgaggcacgccgtacattggcgcgagatcacgttaccttctttgccggtcgcgttccggtgcaggaggtacgccatgtttaa

SEQ ID NO: 144649 - DNA, 297 bp, Enterobacter cloacae
atgaacctttacaacgattttgtgcgcaccgatttccctgataccgataaatctgatctccagatgctgtcttcccgtgctgagtgcgccgccgatagcatcctgaaagggatcgccgctgtaggtaagatgatgttctacgctggtggtgctgagaacggtgaatatgagccgtcagcaacagatttccgagatattggtgggatgctgatggaattaatgccgctggcgcgagcgttatctgataccgcagccaatgcggaatatcagtgtcgtcagatgacgaaaggtaaataa

SEQ ID NO: 144650 - DNA, 219 bp, Enterobacter cloacae
atggaaaagaaattaactggctctcctgccagtggcttcgctcgccctgtgattcgtaaaggcgataaatggaaggataagcggggttgtctggtgacggtggaaagctaccgattcaacagagtgacattttatcgtgatggctactcatcgccgtgtatgcagtcggatttgcgttttttaacagagtttcagtcagtggatgaggttaagccgtga

SEQ ID NO: 144651 - DNA, 2682 bp, Enterobacter cloacae
gtgaaagataattttataaacgatgtgcgcatcaaggcgaccggccactggcagccaatttttgaacggctcggtattccaaccaatcgcagcgagggaccatgcccggcttgcggtggcaatacccgttaccgctttgacgacaaggacgggcgaggtacttacttttgctcacattgtggcgcaggtacggggctggatctggtgatgaaggtcaggcagtgcggtgcgcgtgaggcagctgtgatggtggcggaagtgatggcgctgccgctgccggaacagcagccagccagagagaagcctcaaaccgatatcgtggctaaggttgctgcgctggctgccaaggctgtatcaggtcaatcggaatacctcacatcaaaggggctacagcgccccttcccgctgctgtctgatggctcgatgttgatcacattgacgaacgtagccggggcgattaccggggcgcaggtcattaaacctgatggtagtaagcggctggtggctggcacggtaaaaaaaggatctttctttgccctgggtaacgttgatacgccgaatgtagtgctgatcggggaagggctggcgacagtcatatccggtcagcatatgcgacctgatgcgctggcggtggccgcaattgacgccgggaacctccccgctgttgctatggcgatgcgtcagcgctacccgaacgcgcagatcatcattgccgcagataacgatcagagcggcgaaagtgacggaattggaggagtgaaagttaacactggcaaggaggccgcagagaaagcagcgaaagccgtttctggctgggtttccatgccaccagtggactataaagcggactggaacgactaccaccagcaatacggcctcgaagcggccacagcagcatttaacgactcaatgtaccaaccaaagggtaagaaagtgggcgcgacactgacagctatcgacggcggcaagaaaaaacccggtatcgacgacgatctgaaaccgcgagtagagagtcgtgcggatggcattcactggatcaccccgaaagtggacaaagacacaggggaaattatcaatacagaggcgtggctatgctctccgctggagattgctggtgcggggagtgataacgccagacagcgctttctgatcctgcgttgggacgtccccggcaaccgggggcaagttacccgggcgcttccatgggaggatattggcgatcgtgagggatggcgcacgctgaaaaacggcggtgtcagtgtaacgaccaaaccatcgttgcgggcgattctggccgactggctacagcgaaccggtagcggcaaggaatggcagatcagccacaccacaggctggcacagcggggcgtacatcatgccggatggtgatgttattggtgagccagagataccgctgttattcagtggtcggagtgctgcggctggtggctataccgtcagtggaacgccagaaagctggcgtgattcggtggcgcgccttgcgctgggcaacccgtcaatgatgctgggcgttgctgctgcgctgtctgcgccgctgatcgggcttgtcggtgctgacggtttcggcgttcaccttttcgaacagtccagtgctggtaagacgacgaccgccaatatagccagcagcctttacggtgaacctgatgccctgcgcctcacctggtacggtactgctttgggtatcgccaacgaagcggaagcgcataacgatagtctgttacccctggacgaagtggggcagggtagcagcgcgaaagacgttgctacgtctgcttacacactgtttaacggtgccggaaagctacagggggcgaaggagggaggcaaccgcgagttaaagcgctggcgtaccgtggcgatcagtacaggggaaatggacattgagacgtttctttctgctggtgggctgaaagttaaggccgggcaactggtgcggctgcttaatttaccgatggagaaatccgtatcgcaccatgagtaccagaacggcaagcagcacgccgacgcactcaaagaggcatatcagacgaaccacggagccgcaggccgtgaatggattaaatggcttgcaagccaccagcaggaggcaaaacaagctgtcagagcggcgcaagagcgctggcgtggccttatccctgctgattatggtgaacaggttcatcgtgtcggtgagcggttcgcgattctggaggcggcgctggtgctggggatgcctgtcactggctggggtgagcaggaaagtcgggacgctatccagcatggctttaacgcctgggtcaaagagtttggcacggggaaccgtgagcataagcagatcatcgagcaggcggaggcgtttcttaatgcccatgggtttagtcgttttgcaccgtacccctatgacccggcaggcttgcccattcccaacctagcgggctaccggcagaaaggggcgcatgatgctgatccgattgtgttctacacgttcccggcagcattcgaaggtgagattgctaagggattcaacgcgaaacagtttgcccgcgtgctggccggggctggggtactaaaaccgccagccagcggaaggggatatcagcgtaaatccccgcgaattgatggacgccagataaacgtttatgtgctccagctacgacccgacgagatagaggacgaagaataa

SEQ ID NO: 144652 - DNA, 564 bp, Enterobacter cloacae
atgaaacagataaccaatgttaatctggaaagtgataacgctggtggtacagtcgaggtgacttactccgatgatacgttcgaaaggctgacctgttcgctgcctgtggctctcgtcattgcgaaccttgcaacgacgcttaagcaggaacgtgcaacacgcattgcaaccggcgaccgcctgcgccggatgtatacccgcgatagtgacatgattacccgcagcggcagcggcgcttctacgacctccaccgcgccaacgtcaatggacgctgaatttatgcgcctggtacgcgcggtagcaccaaagtatgacaacgcccttcctgataccgatcctcgccttgttgcgctcgatgtgctgcgttacgcacccgccgaggcattcagtgcggtacacccgaccccgctatcagagattcagcttgatcaggctatcgacgttctggaacaggttggcgactacatgcgagttaacaacgtttcaccgaagattctcaccacaggcgacgctattcgcagcattaacaccgacaacgccagtttctggcatcgcacgaagtaa

SEQ ID NO: 144653 - DNA, 189 bp, Enterobacter cloacae
atggctatttatgacccgaaattagcagcaggaaacccgcaaagcgccgggcgtaaactctttggccgtgaacaggccgagcaattgcggatgcgtaacaacttcaacaacgaatgccgcaatctggaaaaagtcaacgaagcgaatgcaaagttctggagtgaacaggatgaaaaagccaaacgttaa

SEQ ID NO: 144654 - DNA, 168 bp, Enterobacter cloacae
atgaaaaagccaaacgttaagccggtattactctctggcgaccagttcgccgcaatctgcaagatccaggagcgcgaacgccagcgctccgatattggcgtagcgccgtctgtccatcaaattgcccgtgggctggtggcgaaagcgctggcatcaattcaggaataa

SEQ ID NO: 144655 - DNA, 1092 bp, Enterobacter cloacae
atgtcatataactggatgcgccatttcgagctacagctcatcgatgagaatggcaaaggaattagccttagtgatttcaaagttacctttgatatagagcgtaacgataacaaatggccagctgtcgcgacggtcaagatctacaacctttcaccgaccactcagaaccgtattatgcagcgtgagtttgccaagattgttctgatagcgggatatgatggcctggctaaggatgttcaggagagtgaagttggtgtcgcccgggagatttcacctgaccaggtaggccaaaccaatgggcaaaactatgggatgatctttagcggtgatatccgttttacagtgaccggtaaggataatctcgtcgattcctggattctcgtgcaggcctgtgattcagaagaagcgtttgtcagcgcgttcgtcagtacgaccattcagaaaggctacaccactgaagacgtctataaccttctcatgacgagcttggaaccctatggtatcgggcgcggtatcactccggtttttccatcaacggtatttcctcgcgggcgagctttctttggttacgtgcataactatcttgatgaggtagctgcgcagtgtaaggcaacctggcagtttagttacggcaaggtcgacatgattgccagagatacagcggcacatcaggccgtagtattaaactcaaatactgggctggtgggcatgcctcagcaaactatcggagctggggttaatgtacgctgtttaatcaattcaagtattcaactgaatgggcttattcagttggatcaagcgtcggtgtaccgcaatccattgtcgaatcaggatatatttagtgggcgatttgtcgaaaaagatattgatggaaaccttgtaccaataacgaagatcaaggatgccaatggaaacctgattgatgcgccaccaacctctcaacctgccagcattgcaactgacggtgtttataaggttcggtatataaattataccggcgataccagagggcaggcatggtatatggatctggcttgtgaagctcggggcgctactgatatttattctggcgagacactaaataagtggtaa

SEQ ID NO: 144656 - DNA, 150 bp, Enterobacter cloacae
atgcctgcgcgtgatgggaatatgtacggctttgaatacattcacccgaacggaagcaataaacgctggcttaatgttgagttgattcgcggcaatatgggcgagcctcgcattattggctcgtttgactgtaagcgtatttcaggttaa

SEQ ID NO: 144657 - DNA, 663 bp, Enterobacter cloacae
atgccatttattcgaccagtcaacgagcaagatactttcaaccaaatacaaagcaatagcaatgctgcggtgaagaatgccttaccaggcattatccgatcatttgacccggaaacagtgacctgtgacgtcgacgtagcaataattgccagaatgacgaaacccggcactgttgaggaagactatcagtatgaatccgttaggtatcccatactggttgatttgccagttgtgttccctcgtggcggtggcgtgaccctgaccttccctatcaaagaaggtgatgagtgtctcatcgtcttctcttcgcgttcgattgatttctggtggcaaaacggcggtgtgcaggagcgagctgacgggcgtgttttagatctgtcggatgcattcgtgattcctggcccgcagtcgcaggtgaagaaaatcagcggtatcagtaccagcgccgcgcagttgcgtacagatgatggagcggcatttgtagaagtggccgctggtggagccattacgattaccagctctcaaatcacccttaacgggcccgtgcaggtaaacggaacgatcacttccactggcgaccaaacggccaacggtatcagccagattaaccatacccacggcggtgtacaatcaggcggcagcaacacaggaaaaccacaatga

SEQ ID NO: 144658 - DNA, 180 bp, Enterobacter cloacae
atgagcaatattgaaaaactgaaaccagaagaaagcggatccagccagaatggtaaggttcgtacctggctggatgatatcaacgggcagccggaaccagatggtattggcagcttcggtgagagtgcgatcagcgaagaatctcgcacagcggaaaccatgcgaaataacgtagggtga

SEQ ID NO: 144659 - DNA, 1068 bp, Enterobacter cloacae
gtgagagcattacttaagcccgacatcgctcgcggtctgggcgttgtcttattgaagccaggcagcgaactgatgagcctctttctccaggggcgcattctgatcgagccagaaccaaaatcaatgtcacacctgccttcgggcagggtgcctgatgcccggcagcctctggcagaagatcagtccatagagtctttttttactgatgcgcgcgttattaaagctgctggcggcctgccagcactggaggcatggctgttgcgaaggtttaaacattgccagtggccgcattctgattaccaccatgcagaagtggtaacgatgagatataaccagggcgcaatggtgctttgctggcattgtgataacgagctacgaagtcagtctacagatcgactatcggcactggcacgtaagaaccttattgagtgggttgttgattcaatattgatggacctcaggtccggtaaagatcgtgaactttcaatcgctgaactgtgctggtgggctgtgtatgccggcgtggcagacgctatcccggaagaactggccgccagggcactgaagttaccgtatgaaccatttcctgctgtttacaaagaaagcaatattgttgccatagacaacagaccgaccgttgccctgcaggggagactcgaaactgcaggggcatttaaaagatgcaggccagaaacaaaccagcaggaagtgcaggaacagcagccgaagataatagcgttgcgcgcggatccagagtcaccggaatcttttatgctccgtccaaagcgtcgccgctggacctgtgaggactacacccggtgggttaaagctcagccttgctctggttgcagaaggcctgctgacgatccccatcacattatcggaaatgggatgggcggtaccaccaccaaggcccacgatctcttcgtgttccctctgtgcagagagtgtcacgacgagcttcatgccgatgtagcggcgttcgagaagaaacacggctcgcagctgcagctgctgttccgctttctggattgggcgctggcagtcggcgtaataacaaaagcgtaa

SEQ ID NO: 144660 - DNA, 1932 bp, Enterobacter cloacae
atgcgtgaaatcatcgttgataattttgctggtggcggcggcgcgagtaccggcattgagctggcgatcgggcgtagcgtggatatcgctatcaaccacgacgaaaacgctattgcgatgcataaaacgaatcatccggacacgctgcattattgcgagtcggtatttgacgttgatccaattgcagccacaagcggtaaacctgtcggcctggcctggtttagtcctgactgccgccacttctccaaagcgaagggcgcgaagccggttaagaaagaaattcgcgggctggcgtggattgtcctgcgctgggctctggcagtacgtccccgcgtcatgatgctggagaatgtcgaagaatttaagacatggggcccgctgctggatgaagaattacgcccagatcctgagcgtgctggtgaaacattcgaggcatttgtcggcatgctgtcgactggtatcgcggcgaatcacccagcactggctgaggtttgtgaatttcttgccattgagccgcacggccagcaggcgcaacagctgatcgctgggcttggctatgaggtcgattatcgtgagctgcgcgcttgtgactacggcgcgccgacgatcagaaagcgtttcttcatggtcatgcgctgtgacggccgccagattcagtggcctgatgcgacccatggtgatccgaaatcactggaggtacagagcggcaagctggcgccatggcgaactgctgcggagtgcattgactggaatatcccggctttgtccatcttcgaccgcaaaaagccgctggcggaaaatacgctgaagaggatcgcgcgtggcatccagcgtttcgtgatcgagagcgcatcaccgttcattgtgaagtgcaaccacaccacgtcacgcggcaaatatgactgttttcgtgggcaggaactggaggctcctttacagaccattacgaaaacccatggctacgcgctggcggtaccgcacctgactaaattccgcaccggggccaccgggcagccagtaactgagccggtaccaactgtcaccgcgggtacgtcggtgcgcccgggcgggaatgggcatgctctcggtgtagttgaggctgcgctgactccgttcctggctggcaacggcggcagtgagtaccaggcaaagccgcgcccactggataaacccgctcatacaatcctcaagcagtcccgcgcgtgtgtggttgcgccggtcatcgcccgccagtttggcgccagcgttgggcacagggctgacgaaccgagcgcgacgatcactgcaggtggtggcggtaaatcacaactggtgacgccaaccctgatccagatgggctatggtgaacgccctgggcaagagccgcgcgttcttcaactgaataatccgcttggtaccgtcaccgccggcgggaataagtttgcgacggtgagcgcgttcctggcgaagcactatggtgggaattacacgggcccgggtgttagcctggatgcgccagcgcactctgtaaccactgttgatcaccatgcggttgttgcgtctcacctcgttaagcttcggggcacctgccgcgacggtcagaggatggatgtacctatgccgacgatcaccgctggtggtcagcatgttggagaggtacggacatttctcgaaacctactgtgggcacagcgaggatgaatggctggtaacgatcgacggggtgaaataccagatcgttgatatcggcatgcggatgctgcagccgcacgagctgtatcgggctcagggattcccagcagagtacatcatcgatcaggattatcgtggcaaacgctatgcaaaggataagcaggtggcacgctgtggtaatgctgttcctcctcctttcgcagaggcgctggtgcgtgcgaatcttcctgaaatgtgttcacagcagcgggaggtggcgtga

SEQ ID NO: 144661 - DNA, 180 bp, Enterobacter cloacae
atgagcaacaatcatcaaattctcgatcggctttaccgcgatcaccacggcatcatcgtcaacgttatcagatacgagccagacagccagcgcgtaatctaccgccgccctggttatgagtgggagtgcgcggcaccgttgcttatcttccgttcccgattcaggaggatcgacaagtga

SEQ ID NO: 144662 - DNA, 714 bp, Enterobacter cloacae
atggtacggcaaatgaaccaaacaggcgcgccggcgtcactaccagtttttagctccagccctatgaccatgggaagccgtgagatcgccaggctgacagaaaagcgtcactcagatgtgattcgcgacattgaacgaatgtttgaacaactgggagaggatgtaagagggtatgcgcaaaacttcgtacacccccaaaatggacaaacttaccgcgagtatcgcttagaccgcgagcataccgaatgcctcgttgcaggttatagcgctcctttgcgtatgaagatcatccgtcgcctgcgtgagcttgagggtggggcaccgtcagttcctcagaccctgcctgaagctctccgcctggctgctgatatggctgaacaaaatgcgcagctggcgcataaggtacagcaggacgcgccgaaggtagctttcgtcgaacactatgttgaagccggtggtgccaaaagcctgcgcgaaacagcgaaaatcctgaacatgcctgaaaaggcaatgatcgacgctctcctgcgagacaaggtgctgttccgccagtccggcaatctcctgccacatgcacttcgccagcgcgaaggactattcactgtcaaaacgggcacttctgacttcggccatgcctacacccagacacgtgtcacacctcgtggtgttgagtggatcgctcagcgctacgcctcagagctgatgggagggtga

SEQ ID NO: 144663 - DNA, 201 bp, Enterobacter cloacae
atgaaagagtattgggactctttaactaaagagcagcagtgcaagttggcaggtagtgttggttctactcccggctacctgcgtttggtgttcaacgggtacaaaaaagcgggtttctcattggctaagaagttggagtcagccactgctcgggctatcaccaaatccgatcttcggccggatatttatccgaaacagtaa

SEQ ID NO: 144664 - DNA, 675 bp, Enterobacter cloacae
atgaaaactatccaagagatacggcgcttaaacgctagaaaattgcgggatggtgttggtggaaattcgtacttcgccaacatgattgatcgcgaaccgacccaaacgagtaggtttatgggagaaggtgctaccaaaaatattggtgacgcaatggcacggcatattgagaaatgtttcgatctcccgcaaggatggctagataaggaacatcaaactactaatgttgcaaaaaatcctgatgtttccgacactaatagaaatattactatggttccggttatatcctgggtgcaggcaggagcatggaccgaagttggctatgctgaggtagatttgaatagtactgaaacttatccttgccctgttccttgtggcccgatgacatatattctcagggttatcggcgattcgatgatctctgaatatcggccaggcgatatgatttttgttgatccagaagttgcagccgttcatggcgacgacgtgatcgctttgatgcatgagtcgggagagacaactttcaagcgtctgattgaagatgggggtcaaaagtttcttaaggctctaaatccgaactggccagagccttacgtcaaaatcaatggtaactgctcaataatagggaccgttatattttccggaaaaccaagaagatacagaacaaaaccttaa

SEQ ID NO: 144665 - DNA, 195 bp, Enterobacter cloacae
atggataagaagttagaagcgcttttcgaaaagattgcgcgtctggagctggcagccaaacgagggttgcagatcaacgaagagattaagcctcaattaatacaaggccaggtgatctccgttgaatactgcaacgcgacgttaaagcactgtgctctttttcgtcggtggattaacgagtgcctcggatcatga

SEQ ID NO: 144666 - DNA, 372 bp, Enterobacter cloacae
atgagtaatgaccgcatgaccgtagtgcccgactttctgggcgagctggatgccggagtgttcatgaacaaaatcgcagcggcgctcaacaccaccgctctcggcgttctgaacaacggcaataaaggcaaagtagtcctcacctttgattttgagcgtatgggtaattccgttgaagagaagcgcgtcaagatcaagcacaagctgaactacagcaccccgaccccgcgcggtaaagcctccgaagaagacaccaccgaaacaccgatgtgggtcaataaaggcggcaagctaaccatcctccaggaggatcagggtcagctgttcagcatcaacggtggcactgacggaaagcttaaagcggctcagtga

SEQ ID NO: 144667 - DNA, 543 bp, Enterobacter cloacae
atgagttatatacaaacactttccggcaaaaagtttaatttcattaacccaactgccgccgacgttgatattgaagatatcgcaaacgctctatccaacatttgtcgctttgctggccatcttccagagttctacagcgttgcccagcattctgtcttagcgagccaaattgtaccgcctgagtttgcatttgaagccctgatgcatgatgcagctgaagcgtattgccaggatgtaccggcaccgcttaaagccctgcttcctgattatcgccgtattgaagcccgcgttgatggtctgattcgtactgtctttggattaccggcagaaatgtcgcctgttgtgaagtatgcagacctcacaatgttagcgaccgaacgccgcgatctggagattgacgacggcaccgaatggccgtgcctcaaaggaatccccaccagcgatattatccaggtcattcctcttcgccctggtcaggcttacggactgttcatgacccgctttaacgaactgatggagctgcgcgcatgcaacaacatatga

SEQ ID NO: 144668 - DNA, 909 bp, Enterobacter cloacae
atgggacgcacaaaatcacaaccagttgaattagtggaagatgcaccgctgaccgatggtctcagtgtcaatcttaatgctatgtccgaacatcgcctcgaaatcatgcagcagtttggtgatgggctgccgtatgaacgtgatcgtattgtccatgaaacacgtttttacatggctcagagtgctgaagccatgctggaggcaggtaagcgactggtaattctcaaagaaaatgaaccgcacggtgacttcatcgacatagtcgagtctcagttatccctgtccaaacgtaccgcgcaggtgatgatgcaggcatcacttaaatacttgtctcccaagcttgaaccaaaagcgcaagcgcttgcgcttttgggtaaaacaaagctgtttgaattgatgacggaagatgacgaagacctcgtcgaattagccgatggcggcacgattgctggtatgagcctcgacgatatcgatcgcatgacaagccgcgaactgaaagcggccctgcgcgaagcgcgcgaaaccaacgcagcacaacagcgcgtactggccgacaaaaacgaaaaaatcgactcgctttccacaaaactggagaagaaatcccgtatccagccacccaagcctgacgaagaggtgaagaagttacgcgcggaagtgacggcgttagcggttgaggcggaatctgccatcgcggttcgactgtccagcgcctttgaaaccctgtgcgcatactgcgctgaaaacatgattgatacacccagagacttcatggcaggtctggtctgccagctggaaagcaccgcgcgtagcctgcgctccacatttgacctgccagacgagccgacaggcaacgccgccccttcatggctgactgacccgacgccacagattaacgggcaggaggtataa

SEQ ID NO: 144669 - DNA, 411 bp, Enterobacter cloacae
atgagtataaaagagagattgcgcgaggcgatggattctaaaggcttgacaataaaggcattgtcggacttgtcgaaaattccataccgctcacttcaaaactatctgcgtggagagagagaacctaatgcggaggctcttgttgcgttaagcacccatttgaacatatcaatagattggctacttactggtaaaggggaggctgttggggtagagaaagcgcagccagctaatcaggagcagcatttcaaccagtctgatctgaagttattggaactgctcaatcaactggagccagaggtgcgaaaagagttgctgcgaggcgctgaggaaaaacagcgaatgattgatatggaaaaacagcttaaggagctgtccgcagcgttcgatagattaaaaaatacgggttaa

SEQ ID NO: 144670 - DNA, 534 bp, Enterobacter cloacae
atgactatgcgcaaattttttttaccgttgatattggttttatctgggtgtggagataataccgatcctgctgatatgtccaccacagctaaggagcacacgatttttaccgttgaaacagataatccggttataaaacgcgaattaccgtttattcgccaacaacttcccggcttggataagtacgcggacagttttgaaaaaatcgaagtatccgaggatagcgtacgcccggtgacaactgtgcagtttcatattaaagacgaaaataatattccaggtgactacatagcctctggtcataattgttatttgttcatatcaaataatgcccacgaagtgaaaatatctaaatcagcatgtcaggctgtttttttcgataaaacggatgttccgggtggagacctgacagtgaaacttgataaggaaaaagttcctacgacagatgatggtaaggccccgcgagcaggttgtttgaaagcttattcaccagatccagataatgattattggacttgtccaaggcaggattaa

SEQ ID NO: 144671 - DNA, 498 bp, Enterobacter cloacae
atgaggcgctggccgaaggcgacgttatccgcatcctgcgcggggtgtgacatgtactgctctctggcggatttgctcgagcaggtgccggagcggacgcttatccagctcaccaacgaagagctggacttcgactcgcctgcgacggtgaaaaccgaagtggtggacagttgtatccgctatgccgatgagctgattgatgcccatctgcgcggacgctataccctgccgctggcggagataccgaccgttctgcgggacattgccatcacgctggtgcgttaccggctctatacccgtcgcccggaaggcgcagtcccggacacggtgaaggatgatcacaaagaggcccggcgtcagctggaggctattcgcgacgggaagctgacgctggggctgcagtccactcagaaggatgtgcctgagtccggtgaaatccgggcacgggcacgccgtcccacctttggcgggcgcgatggcttactggagaaatactga

SEQ ID NO: 144672 - DNA, 1170 bp, Enterobacter cloacae
atggctgaggtaagcagttcgcaagcatcgtctgccctgactggcgtcagtgacgtactttcaccggtcttcaccctgtggtatctgaaaaagaatatcaccagcgatatcaccccatacgtcacccgcattacgtacagcgataacatcaaaaatgagtctgacaccatcgaagtggatctggatgataccgatggtcgctggctggatgcgtggtatccgggcaaaggcgacacgctgaccctgaaggtgggctaccagggcgagaagctgctgtcctgcggtaccttctccatcgacgagatagaggtcagttcgcccgcgtccgtggtttctatccggggcgtggccacctcagtcaacagcgcgttacggacgaaatcaagtcggggtttcgagagcacaacgctggcggccatcgccgggcgtattgccaaaaagcatcagctgaagcttgtcggcagcatcgaggccatcaaaattgaccgtgtgacgcagtacgccgagaccgacgtggcctttctgcaccggctggccagcgagtacggttatgcggtgaagattgtcagcgaccagctgatattttcgcatctggccacgctccgcagccaggagccggtgcggcagctgaagccgcaggatgtggcccgctactcgcttcgcgataccatcaaccgggtctacaaatccgccagggtcaagcaccagaagagcagcacaaaaaagctgattgtgtatgaggctgacggcgggaccagcgagagcagcaagcaaacgaaaggcggcaaggtcaccagcgccgacagacttcaggtcaacagtcgtgtcagtgacccggacagcgcccgcatcaaggccgattccgcgctggcccgtcacaacgaataccagcagagcggctccctgacgctgatgggtgcatcccagctgacggcgggcaataaaattgagctgtcaggctttggccagctatccgggccgtggctgataaccacagcccgccatacacttgaccgcagcagcggctacgtgaccgagctggatgtggcgcgggggccggtgacgcgaggtaaggcgaagaaaggcaataagaccggcaagacccagacactcaccgtctacaagccggacggcaccacatccacggtaataaaggaaaagaaaaaatga

SEQ ID NO: 144673 - DNA, 597 bp, Enterobacter cloacae
atgacaggcgtaaccctgcagactggtacagtcagcgccgtcgatgctgatggcgtgaaagcccgcgttcgtttgcctgagtgcgataacatgcgcaccaactggctggacgtccttcagcgcaatacccagaacaacaaagactactggctcccggatgtgggggaacaggtcaaagtgctgctggatgaaaacggcgaagatggtgtgattcttggcgcagtctattccgacattgataaaccatcgttcagcgacaagaacgttcgcggcacaacattcagcgacggggcggagttcagctaccaccggggcacccatacgctcaccattaagggcgggatcgagcatcttgtgattgagtgtagtgctgacgtgttcgtgaaaacgcagaaagccacaattgatgcgccacagaccgaaatgaccggggacctgcttgtcaggggcaagctaacttacgagggtggcatggctggctctggcggtgaaggtgccaccgcaaccattcagggcaacattgagattgaggggaatgcccatgccaccggtaacatgctgtctgatggcgcaaactccaaccaccactcccactga

SEQ ID NO: 144674 - DNA, 1104 bp, Enterobacter cloacae
atggcgctgacagaacccgattttattgaacgcgatgccgacaaaataacggcagaaatgattgcgaagtatgaggcggatacaggcaaaacgctgtatccggcgcaggccgaacgtctgctgattgacctctgggcctatcgcgaaatgctggtcagggtggcggtacaggaggcggcgaagcagaatctggtcgcctttgcccgtgagccgatgattgactacctcggtgagctggttggcgtgtaccgccttgccgcgcagcctgcatcgatacctctccagttcgctgtcgacgtaccgatggcgatggatgtagtgataccggctggcacccgcgtcagcgcctccgacagcgttattttcgccaccgatgcggacgtggtgctgaaggcgggtctgatgctggtcaatgtcgcggcgacctgtaccgaacctggtgatgccggtaacggctggcaaccagctcaggtcagccagttgcttgatgagattgacaacgtcgacctgcaggtcaccaatctttccgccagttctggtggctcagagcaggaagataatgaccggctgcgtgagcgaatcaagcttgcccctgagtccttcaccaacgccggaagccgtggtgcataccgttttcatgccatgggagcacatcccagcattgtcgacgtcgccgttctctctcctgtgcccggcaccgtcgagctgtatccactgctcagcactggtctgccggacgacagtatcctcacgctggtcgagagcttctgttcggatgagaaagtccgcccgctaaccgataccgttcatgccagaacgcccgtgcaggtggactacgccatcgatgcccgcatcacggtttatcgtggtcaggacgtcagttcgataaaagatgccgccaataatgccattcagcgctgggtggcagcccgtcgggcaaagctggggctggatatcgttccggggcagattaacgccgtgctgtccattgagggggtgtatcaggttgaactgcccggactggcgctggttgtggtggcggaaaatgagtgggccaactgcacctccatcaacataaccatgacgggggttgccgatggctga

SEQ ID NO: 144675 - DNA, 969 bp, Enterobacter cloacae
atgtcaaacctacctgaaaccccgcagtgggaagacggcatctatcagatagaggtctctgaccccgttctgggcggccctgacgggatttctaaccgtcaggctaagcaactggccagccggacatcgtacctgaaacaacaggttgagaaaggcggtcagaatttggcagatcatattgccgccctgaacccgcacactcagtatgcgccgaaggaaagtccggccctgaccggttcaccgaccgcgccaacggtgagcaaaacggataacagcaccaaactggccaatacagctcatgtcaaaactgttgtcgccgaatatgctccactggccagtccgggcttaaccggtaaaccgacagcgccgaccgcagcgcaggcatccaatgatacacagctggccaccacggcattcgttaaagcggcgcttgcagcacttgttgcctcttctcctgcagcgcttgatacgcttaatgagctggcggcggctttgggtaacgatccgaactttgccaccactatgacaaacgcgctggcaggtaagcagcctctggacaatacgcttaccgaattgtctggaaagtccgtgtcagcgcttctcaattaccttggtttgaaagcagcggcgcagcgagatgtgggaacgggggcaaatcagataccggatatgaatagttttgcatccggaaataactgggctaaatttcctgaagggacaattatacagcgtgggatttcagttgccggggctattggaaccccaacgtttattacgtttcccgtcgcattcactaattacaatacgattcaggtgctggcgggctacgataacgcagcctctgcagttacgtccatcccatcatttgcagcaactcccgcgagcacaggacttgggtttagtttaatgggatctcaggctgcagggacaaacacgacgtatgcccgctggatagcgataggaaaataa

SEQ ID NO: 144676 - DNA, 429 bp, Enterobacter cloacae
atgagtaaatatttatattctgcaaaaacaaatgcattttatccgttctcgtcggaggattcctacagggctaccggggtatggccagattcaggcgttgacgttgatgaagaaacattcacagaattcacatctgagccgccagacggtaaaattcgcgggggaaattctgagggatatccatgctggatggatatccctccacctacgcgtgagcaattgatagctgaggctgagagtaaaaaagccgcgttattgtctaaagctcaggaaactattagtttctggcaaaccgagctgcaactgggcatcatcagcgacgaagacaaggcaagtctgatcgcgtggatgcagtacatcaaagctgttcaggcggtagatacgtctacgacccccaatattacctggcctaatcagccggatatgtag

SEQ ID NO: 144677 - DNA, 432 bp, Enterobacter cloacae
atgaacaataactatgtcttcagcgctaatactctcgctttctatccggtggaaatgaaagaggcttatgaaaacgctgggagctggccggacgatgccatagaggtatcagatgaaacttacgctgaattccttatccctcctgcggggaaaatgcgtagctctgaaaacggtcttccctgctggaaagatattcccccaccaactaatgaagaccaggtaaccgaagccgaaaacgaaaaactgagtctgataaatcaggcaaatgattatatgaataataagcaatggcccggtaaggccgcgatcggaagactcaaaggagatgagctgacacactataatctgtggctggattatcttgatgcactggagactgttgacacctccagtgcacctaatatcgaatggcctacatatccggctgattag

SEQ ID NO: 144678 - DNA, 582 bp, Enterobacter cloacae
atggccatgattggttatatccgcgtatcaacaattgaccagaacaacgatttgcagcgtaacgcactcataagcgcaagttgtgaccgtatttttgaagaccgtatgagtgggaaagtggctaaccggccaggtcttaaacgcgcattaaagtgcattaatagcggagatacgttggtggtgtggaaactggacaggcttggacgcagtgtaaagaacctgataactctgatatcagaactgcacgagcgtggcgctcactttcgctctttaacagatagtattgatacaagcagtgccatggggcgctttttcttccatgttatgtcagcactggccgagatggagcgcgagttaatagttgaaaggacaatggcaggtttagcggcagccagagcgcagggacgcataggaggcagacccagagtgttgcagccacatgaacgtgatcagatacagcgattgcttgctaagggacatacgcgacaagaactggcaattatttacagcataggtctgtcaacgttgtacaagtatttcccggtaaatgttcagagggagcaaagcgagggagtattgtaa

SEQ ID NO: 144679 - DNA, 186 bp, Enterobacter cloacae
atgcaggttgtcggttattacctcgactccgggctgtggagcatcggcatcagtcaggttgccgaagatacgccgctgccagcgtggcccgtcacttacgccatgcatgagcgtggttacagtgtccagctcaccatcactgtgccggacgacaccatcctggtcttgccagaggaagaagagtga

SEQ ID NO: 144680 - DNA, 336 bp, Enterobacter cloacae
atgaccaccagcgaacttaacaaagaacgccttcagacaatcgcatcatggcgcgccaaatacagcacggggcacaatgttgtgcttcctgctgaagaggctgaaatgatggcccgtgcgttactggctgtcatggagcaggaaccatttggttttgttactaaaagatgcgccgaacacatgcatgataacgatcacgatgaaaataactggatgtggtctatttcagcagtagtcattggatgtgatccaaagctcaagcacgaggtgccagtttacctctaccctgcgacatcaatccgtctgctggcagccaagtggaggggaagtagatga

SEQ ID NO: 144681 - DNA, 198 bp, Enterobacter cloacae
atgaagattcgctgccttttcaggcttcacaaatgggttttgttcaagaaagagcttcacccatatcaatcccttaacgggctgcagccaactattattttccactatgggtgtaatggctgcggcaagaccagaacagagacccgtgaagagggttactggcattcttttaaaccatcagatttggagcacatgtaa

SEQ ID NO: 144682 - DNA, 273 bp, Enterobacter cloacae
atgaatactcttttttttcttatggctgagttcaacaccccaaacattgaactttcagtggtatgtcagaagtatttcggcatgagcccggcgacagcagaggcaaaagccaatgcgtgtctgttgcctatcccaacctatcgcgtaggaacctctcagaaagcaaagcgctgtatcaatattcaggatcttgctgagtatatcgacaagagaagggaagaaggacgagttgagtgggagagagttagaacagataaaccgaaaaatagttaa

SEQ ID NO: 144683 - DNA, 528 bp, Enterobacter cloacae
atgctaactattagattcgattcagaaaaggctttagaggccattctgtacgtcgcctctaaagcaccaattcctgacatctaccatgttggtaagattttgtattatgcggaccggttccatctggaggcgtttggtcgtctcatcactggcgatcagtataacgccatgaaagatggcccggtcgccagtaatacatacgacatcattaagatcgccagaggtgacggccgctacattccaaacggatgtgatactgactcagtacgtaaggcattctgtatcgcaggtatgaatgtggttcctcgtcgtcaaccagatgtagattttctgagtgagtccgatttagagtgtatcgacaagtcaatcgagatgctcggtgaaatgtctttcgaagatatcaaaaacatgagccatgatgctgcatgggaatctgctgatagaaatggtgagatgccacttgaatccatcatcggccagcttcaaaatagcgaaatgattttggattatcttcataacggatattga

SEQ ID NO: 144684 - DNA, 183 bp, Enterobacter cloacae; identical to SEQ ID NO: 16564

SEQ ID NO: 144685 - DNA, 513 bp, Enterobacter cloacae
atgatgtccacacatcgtccacacatcgaaaaaagccctgccatgtgcggggctttactttttgactaccacaatgacacaatgattttcaaatatttgtttaatatggaaattattttgaaacttctgaaaactacgctcctgctttcccttgccctcatgtcctttacctctcaggcaaatgacgtctcgacactcaaaaaatcacttaaaccgtggcagccgatcgaggtttcgaaaagcagtgaaacgctgacggtgacgctcaacgagaaccaaatcactcctgacgtttacgatgcaattatcagcgcaggtgcctgcatggctatctggactaaggatgtaccggctaattaccttaagactgtcaaagagctgcacattctaaacaagcataaagcacagggttatgtgatggaaaacccgctcgatacctgtaatgaaatggggaaagaaacagaagtaaaagcaaaagggatcatgctttcacatacgcggctttttaagtag

SEQ ID NO: 144686 - DNA, 618 bp, Enterobacter cloacae
atgacaatgcaatcaggtgtatttaagaaatatgacccgttagaaaaatggggtaaatatactgctgcgaaagtggctaagctcccccccgaagaactcgaattatattacattgccaaatcaccggggatgaatattgtttttctgagagatgataacggcaatgactggtatctgtggcttaagacactttcgcaggaaacgctaaagatatcatttaaccctgacacgaaagaaattatccatttctcttatgatgcaagcgcgatttttccgattaatcagattgtcgttgaagtcgcgccggagaatgtaccggatgaatttaccgctgcgggagaaaaagcattaggtggcgcgtttatttttgttgatggcgaaattactgcctcgccggtggattatgaggcagaagctcagcgcaataaactggagctgctgactcaggcaaataacgtcatcgccacactgcaggatgcggttgaactggatatggcgacggaggaagaaacggcgaacttgcacgagtggaaaaaataccgagtccttctgagtcgggtcgatgttaaaaaaccggtctggccgccattgcctgagactgcgattttagtcagttag

SEQ ID NO: 144687 - DNA, 294 bp, Enterobacter cloacae
atgaatcttgctcagaaactaagagccatcaggaaagcagaaggtttaacacaatcaaaattctgtgaaatcagcgggatagcactaggcactgtcaaaaactatgagggtgggcatcaggagccaggcatacaggtggtcatgcaagtaacaaattcgaaagcgttcgaaaaatacacgctttggcttatgacagataaaaccgccccgcaagctggtcagatcgcaccggctttcgcacacaatgggcaagaaccaacaaaatcagaccgctccgagaagaagattggctaa

SEQ ID NO: 144688 - DNA, 390 bp, Enterobacter cloacae
atgggacgaaaagaacgcagtaacattgtcagaattcaaaaggcagtaagagcaacaaaacgtaaatacagccataagctaaaagattattccagagaatctattcctggtgagatggtaacaacgattatagaacaccctccaacggttccagccggatcagagtttgaattattgcaggatgttctatcgtcaacggacaacgtttattacaaaccacgccgccgccgtgaatacataattgacagtagccagcttaaaccctggcaaattctcggatttgaacattacgccgatttttgtggctattcccagactaacggcctgagtggtcacactgccgatttggattttttatttaatgacgataaggaaaattataatgactaa

SEQ ID NO: 144689 - DNA, 1218 bp, Enterobacter cloacae; identical to SEQ ID NO: 134431

SEQ ID NO: 144690 - DNA, 1095 bp, Enterobacter cloacae
atggcctattataacatagagaaacgacttaaagccgacggcactccccgctatcgttgcaccgtcctgatcaaagaaaaaggcgttgttacacacagagagagcaaaacatttccaaagcaggcgcacgcaaaaacctggggaaatcagcgcgtgcaggaactggatcttcatgggctcccatcatccgacgacgcaacaggaatcaccgttcgtgatctgctgcaaaaatacatcaacgatccaaacgctggtggtaaatccgggagaacaaaaagctacgtcctgaatatgctcgtcgactgtgatatagcagccatccccttgctttcactgaccgcaaatgatgtgatagagcattgccgactgcggaataatgcaggagcgggcccggcgaccgtgagtcatgatgtcagctaccttggaagcgtgctggattgtgcaaagcctgtgtatggcattaactataccagcaacccggcaaaagaggcccgccctcaccttctcaaacttgggctgattgggaaatcaaatcgccgtagccgccggccagcatctgaagaactggacatgctgatcgaaggattaaagcaacgttcaggacacagagtctcaaaaatcccgttcgtagacattctgatgttttcagttttatcgtgcatgcgtattggcgaagtttgccgcctgcggtgggatgatatcgacgaaaagcaaaaatctgtgcttgtgagggacaggaaggatccacggaagaaggaaggcaatcatatgaatgtcgctttgctcggagaggcgtgggatatcgttcagcggcagccgcgcaaatcagagctgatcttcccctacattagcggctcagtaactgctggttttcagagggtaaggagcgcgcttggaatcgaggatctgcgttatcacgatatgaggcgggaaggtgcgagccgactttttgaagccggattcagtattgaggaagttgcccaagtgacggggcatagatcattgaatgttctgtggcaggtttatacagagctattccctaaatcgctgcacgctagacttgaacaactacagaaatccagaagcagcgactaa

SEQ ID NO: 144691 - DNA, 771 bp, Enterobacter cloacae
atgaatatgaatttattacagctttgctatgaaggcgaaggtggtgaaagctacatacgcagtatcaatgagaaagggcagttttacgtatctttagctgatgttttgaaaacgctttctattgaaaacagaaagatggatggtaagtcgccaaaaagcttgcttccggtaattaaggcagtcatccaaacactggatcctgatgaaatcaagaacatccctatgatagaggatggtcaggctacgagtgaagcgttcttgacggaacctggtctctatcgagtcttagctcaagatacatcctccgctggcaagaaattccagcgatggttgttccataaagtactaccctctattcgtgaatttggacaatttcctcctccgccgaaaaaagaacagtctgagataagtgcttttgctacaagtcttcaacagacagtcaatgctttggtaatggaaattgcaaaacgcgaggaactggaaagcagagtcaatgacgttgagctcaaagttaactcattagagagcttgcgagatctgtctcaatttcggagtgttccacagcgtttaatggagttgagtcttgaggtaatgtccattgatgagctttggcattggtgtgaaaaattacgcagcgaaagaggggcggaaaagattaaatgcccatcagggatcggagtaaacactatgtatccattagcgctggtggatgaagccatcgcaatctaccagaaaaatgttgaagcaagatcgagaggctcaaacatataa

SEQ ID NO: 144692 - DNA, 303 bp, Enterobacter cloacae
atgccgcgtatacctttctgcctgacagtacttaccgctgcgtttgtgctgtcatcatgttcgctgaatgaaatcagcaaaatagacaaggaagccgttgggcaggccgatacggctcagcgagtgttgcagagtcgtcagtccatatcacaaccaactgttgtctggatggataagccctgggtaaacctgcagccagtcacgccggtggtctccactccggacgaaaagaatctgcctccctgtcagataacgattaatcgtcctgacggcatttcactgcctgagctgggacagcggtaa

SEQ ID NO: 144693 - DNA, 564 bp, Enterobacter cloacae
atgtcaaacacaagtgttatgttaactaaagaacaaaaagcaattattgcagaagcattagatgttatgcccgaagatctggaagaaataaaagttaaagcaagtgcctgtagaaagacatcctttcgtgacgatttttcgatggtctttaaagataatacagccacactcgccagaatggatctgacaccgacggcattcagaattgttatttatctcttctcagtcattgattatggaaatattatccctgacttttcacagtcacgtactgccagagagttaggaatgaataaatcaaatgtttcacgtgcattcagagaattatttgagaggaaaatactgatccataacgctgaagacggtcaggtttacctgaattctaatttatgtgtaaaaggcattcctcatcgtttcaatgaagatctgatggataaattcagtaaatccagacttgagactgaagattttgccacttcattcaacttttatcgcgcagggcgcaaaacaaagcctgtaaaaaaatccagaaacagatatccaactgacggcattcccttttaa

SEQ ID NO: 144694 - DNA, 309 bp, Enterobacter cloacae
atgaatatgagtgattttgaagcgtatgaaggttattgggatattattaatgatgatcttttcgaagacatctttaatatggagtgtattgagaagttagagccaacagaaaaagttcttaaggcaatcgaattgctgagctacttctttgcggaagatatgtgcgaagtactgggcgaaatacgtgagatgaatatgcttgcccaagcagatatctttgatttgtggtttgaaataataaagtcacgagatttccttgaatccctggcgaaaacaattatctattacagtatcggtatgcctgtgtga

SEQ ID NO: 144695 - DNA, 207 bp, Enterobacter cloacae
atgaatacaacaaatcaaagcttaattcgtttaccagaagtcttgaaacgaactggtttcggcaaggcttggatctatcgtctgatcagtgaaggtcgttttcccgcacctgtaaagattggcacacgcgcggtggcttttgtcgagagtgagattgatgaatggattgaaacagtcattagtagttcaagatctcatgcagcataa

SEQ ID NO: 144696 - DNA, 180 bp, Enterobacter cloacae; identical to SEQ ID NO: 144106

SEQ ID NO: 144697 - DNA, 2187 bp, Enterobacter cloacae; identical to SEQ ID NO: 144296

SEQ ID NO: 144698 - DNA, 717 bp, Enterobacter cloacae
atgattattacgctagataatgcttaccagtctgaactgctgcttctgcctgcccgtaatagcgcaggggagcttaaaggtttagaggttctggttaactttactggcgtcggcagcgatgtgcggatccccactgagcttgttatccctcggctttcagcagctgaagagttagtgctgtttaacgaaaaattgcaattgcttgatacctgtaaactgttttttattcagcatcagttaattgcatggatcaatattacacctgcaatagttgaatttttattaagtaatggaaacgctgtttcaatccttgagcgttacccgtttcttgagtttactgttaatgagaattatccaggtttaaataacggaaaggacgatctgcagctggcgagaatggcaatccatttcccgttggtcctggcaaactttggcgcaggcgctgcatcgctcaaagcggtctatgatggattatttaaacgggttattctcgacaaaggcttcattcagcagcgtgccccggagctctcttttgaaccttttatgcgcgccatcctctggcaaatcacaccgcactgccagtcagtgatcgtctcgggcattgacgaccacggcctgttgcaacgcgttttgtccttcaattttggcgccatgcagggcgcactctggccagccgtctctgcggagcacgttacatcgctggttcagcagcgataa

SEQ ID NO: 144699 - DNA, 432 bp, Enterobacter cloacae
atgaaaaatatcgtattagcatctttgctgggctttggtttaattacatcgtcctgggccactgaaaccgtgaatatccatgatcgcgtcaacaatgcacaggctcctgctcaccagatgcagtctgctgcggctcctgtcgggatccaggggactgctcctcgtatgaccggtatggaccagcatgaacaggccattattgctcatgaaaccatgacgaacggctcggcggatgcgcaccagaaaatggtggaaagtcatcagaagatgatgggaaataacacagtatccacgaccgtcccgtcaacatcttacacggcgatgaatgagcatgaaagagcagcggttgcccatgaattcatgaataacgggcaatccggcccacatcaggccatggccgaagcgcaccgccgcatgatcaatgcaggctga

SEQ ID NO: 144700 - DNA, 243 bp, Enterobacter cloacae
atgcgaaacgggatccgttttctcaccgtagcgctctttgcgctttgcacccaggctcaggcggacaccgcgttgggcgagattaacattcggctctacggcaatatcgtcgattttacctgcgttgccgagggcagcgacagcgacaaggccgtcccgctgggcacctggcccacgaaacagctcagcaccaccggaagccgcacgcagcctatgccgtttacgctgaagctgaccggctga

SEQ ID NO: 144701 - DNA, 642 bp, Enterobacter cloacae
atgaactgtttcagcctgagagaaggggagggccgttttgaaatagcctgtgaattcgatgatctgcccgattttatcatgatcgacgacagggtgcagaccacgctcgcctcagaacatctgctgaatgaagacggcaattttgaaatcgtcaaaacgtttaaagcaacgacctcaggaaaaccggagcagacctgcatccgctgcatccacccggatgaggagcccctgagaaatttactgggcatgaaaatttccgaactcaaggcggtgggaaaagaagttgaaaaaaatgtggcggataaacgcaccgcatcgttatggcgtcaggccatcagggaagccgccgctccctatacctgttcggaaatgttgctggatgtcgataaagagtttggaaccgacacaaaatcattatggggtaagatcctcgatttgctgcccacgtatgcgattttcaaagccgacagggaaagcagcgacggggattcagaagctaaaaaccccttacagcaggccgtaaaagacgctcaggcggcgctgcaggacaaaattacagcgctggaaaatgagatccaggacagcgtactggatgtcgcacagagaacgctggataaatgggtaagcggattaaatggttga

SEQ ID NO: 144702 - DNA, 408 bp, Enterobacter cloacae; identical to SEQ ID NO: 120048

SEQ ID NO: 144703 - DNA, 1026 bp, Enterobacter cloacae; identical to SEQ ID NO: 127372

SEQ ID NO: 144704 - DNA, 441 bp, Enterobacter cloacae
atgaaaaaagtggttctaatggcgctggctctcggcctttcactacccgcgatggcgagtgaaaaagtgattgatatgtacaaatctgaaaactgtggctgttgttccctgtggggcaaagcgatggaaaaagacgggttcgaagtacgaactcacgtcatgaatgatcaggcgctgtcagccctgaaagaaaagcatgctgttcctgcaggactacgaagttgtcataccgcggttgccggtaatttgatcattgaaggccatgtgcctgcgacaacgatacataaggcaatgcagtctggttcgggtatatacggtctcgccacccccggtatgccagcaggaagtcctggaatggagatgggagcccgaaaagaggcttacgatgttatcgcattctcaccggatggaagtaaaaaagtcttccagcgaatcgaatag

SEQ ID NO: 144705 - DNA, 1590 bp, Enterobacter cloacae
gtgctgatcaaagcgtatcatcctttgctgctgcgggtcctccactggccaaaaacaaccctgctggttgcggccttgtccattttcacggttatctggccactgagtcaggtgggcggtgaatttctgccgaagattaacgagggcgatctgctgtatatgccgtcgaccttgcctggcgtctctccggcagaagctgcagcgctcctgcagacaacagacaagttaatcaaaagcgttcctgaagtggcttctgtatttggcaagaccggtaaagcacagaccgcaacggattccgcgccgctcgaaatggtggaaaccacgatccagctcaaacctgaggatcagtggcgtcccggcatgacaattgacaagattattgatgaactcgacaggacagtccgtttaccgggtctggcaaacctctgggtgccgcctatccgtaaccgtattgatatgctctcaaccgggatcaaaagcccgataggtatcaaagtgtccgggactgttctgtccgatatcgacgcgacggcgcagagtatcgaggcggtagccaaaaccgtgcctggcgtggtgtctgtcctggctgagcgacttgagggcgggcgctacatcgatatcgatatcaaccgggagaaagcctcccgctacgggatgacggtaggtgatgtccagctgttcgtctcttcagcaatcggaggtgctatggtgggtgagacggttgaaggggtggcccggtaccctattaacattcgctacccgcaggattaccggaacagtccgcaggcgctgaaacagatgccgatcctgaccccgatgaagcagcagatcacgctgggcgatgtcgcggatattaacgtcgtttctggaccaaccatgctgaaaaccgaaaatgcccggccagccagctggatttatgttgatgcccgcggcagggacatggtgtcggtggttaacgacattaagacggccatcagcgagaaagtgaaactgagaccgggaaccagtgtggcattctccggacagtttgaactgcttgagcatgccaacaagaaactgaagctgatggtgccgatgacggtgatgatcattttcatcctgttgtatctggcattccgccgggttgacgaagccctgctgatcctgatgagcctgccgttcgccctggttggcggaatatggttcctgtactggcagggcttccatatgtcagtggcgaccggaaccgggtttatcgccctggccggggtggcagcagagtttggcgtggtcatgctgatgtatctgcgtcatgccattgaagcgcacccggaattgtcccgtaaagagacgttcacaccggaaggtcttgatgaagccctctatcatggtgccgtactgcgtgtccggccgaaagccatgaccgtggcggtgatcattgcgggtctgctgccaatactctggggaaccggcgcaggttcagaagtcatgagccgtattgcggcacccatgattggtgggatgatcacggctccgctgctgtccctgttcattattcctgccgcctacaaattaatctggctgcgcagacataaaaaaagcgtgtcctga

SEQ ID NO: 144706 - DNA, 750 bp, Enterobacter cloacae
atgaaaggcattatcctggctggcggttctggaacacgtttgcacccgataacacgtggagtctctaaacaactcttacccatttatgataaacctatggtttattatccaatgtcggtgcttatgcttgcgggaattcgagatattctcttaatcacaacacctgaagatatggataaatgtgcccttgtattaggcgataacattttcttcgggcaaagttttggcaggaaacttgaatcggttgtttccggcaatgccggagctactgtttttgggtatcaggtaatggatcctgaacgttttggagttgtcgagtttgatgaaaacttcaaggcattaagtatagaagaaaagccagctgcgcctaaatccaactgggctgtcactggcctatacttttacgatgaaaacgtggttgatatggctaaatgtgtcaagccatcagcacgcggtgaacttgaaattactacactgaatgaaatgtatctcgagcaggggaatcttcaggtagaattgctgggtcgtggttttgcatggctcgataccggtacccatgatagtttaatcgaagcatcacaatttattcatactattgagaaacgacaggggttcaaaatcgcctgcctggaagaaattgcttaccgtaacggctggctcactgaaagtgaggtcatgacctacggaaatgaaatgagcaagaccaattacggtcaatatttactcaatttaataaagaatagtaaatag

SEQ ID NO: 144707 - DNA, 768 bp, Enterobacter cloacae
atgccaagtcgtttcaaaaaaatagctgtaaaatcggactttgaatttcttagtacaaacggcaattattgcatctatcctgattcttacgcatttaccattccatgcttactattagctgactcactccaaatatctcacatcattactggtgatatttgggtggcattcaacggcgatgagacgatttttaataaaaatctaacaagtaaacattacggtatatttaacgctgttgggttaagcttagaacccgttatcaatggaatcggtgagcttgggagtttaattatttgcgatcattacaatttattagatatcgcaactacatgtcagtatggaagcttccaaaaaccatgtatgaaatgtattaagtgctttaggaagacattatattcctgggccctatttggcaagtcgctgtcacaatctgatatcgacaaatttaattcatccgtcccagtgcaatctttctcaaaaaacaatgatagaaaaggactatctcttggaccatcatataaatatgttttcgataaaataaaccacccattctcaggggcaatcaaagaaatacaaagccgtatgacaaatatacctatcgatacgacttttgtaaaaaaaatatatacacctgcatatttgatcaaccgaccagagtttaccaaaaatgcatttattaaaatatctcaactaatggaactcatgaatagtaaagatcttgatagtttttccggacttgattatagggtaatgactccaaattattga

SEQ ID NO: 144708 - DNA, 270 bp, Enterobacter cloacae
atgatggatatgagcggtcacgatcaggccgcaatgtcccatgaaatgatgcaaaacggcaattctgctgcccatcaggacatggctgaaatgcataaaaaaatgatgaaatccaagcctgagaacacccaagaaactgctaagccattttccgaaatgaacgagcatgagaaagccgctgttgtgcatgagaaggcgaataatggtcaatcttccgttattcatcagcagcaggctgaaaagcatcgcagccagatcacccagaattaa

SEQ ID NO: 144709 - DNA, 420 bp, Enterobacter cloacae; identical to SEQ ID NO: 144342

SEQ ID NO: 144710 - DNA, 318 bp, Enterobacter cloacae
atgctgatgtatctgcgtcatgccattgaagcgcatccggaactgtcaaacaaagaaacgttcacaccggaaggtcttgatgaagccctttatcatggtgccgtgctgcgtgtccggccgaaagccatgaccgtggcggtgatcatcgcgggtctgctgccgatactctggggtaccggcgcaggttcagaagtcatgagccgtatcgcggcccccatgattggcgggatgatcacagctccgctgctgtccctgttcattattcctgccgcctataaactcatctggctgcgcagacataaaaagagcgtgtcataa

SEQ ID NO: 144711 - DNA, 441 bp, Enterobacter cloacae; identical to SEQ ID NO: 144335

SEQ ID NO: 144712 - DNA, 1167 bp, Enterobacter cloacae
ttgaaacgccgtctgtttattgctgtttctttactcgcttcgagtgtctcatctgcttttgcggccgaaccactggatttttcgccgcagcctccggccattcaggctggctcctgggtgctgatggactacacgactggccagatcttaacggcgggcaacgaacatcaacaacgcaatccggcgagcctgaccaagctgatgacgggatatgtggtcgatcgggccattgatagccatcgcattacgccggacgacattgtcaccgtcgggcgtgacgcgtgggcaaaaggcaacccggtttttgacggctcgtcgctcatgttcctgaaagagggcgatcgcgtctccgtgcgtgacttaagccgcggtctgattgtcgattccggcaacgacgcctgcgtggcgctggccgatcacgtggcgggcggccagccgcagtttgtgaagatgatgaacgactacgtgcagaagctgaacctgcgcgatacgcactttgaaaccgtccacgggctggacgcaccgggccagcacagctcggcctatgacctggccgtactttcccgggccatcattcacggcgagcctgagttttaccatatgtacagcgaaaagagcctgacctggaacgggatcacccagcaaaaccgtaacggcctgctgtgggataaaaccatgaacgtggacgggcttaaaacggggcacacctcgggagcgggctttaacctgattgcgtccgccgttgacgggcagcgtcgtttaatcgcggtggtgatgggggcggacagcccgaaagggcgtgaggaccaggcccggaaactgctgcactgggggcagcagaacttcgatacggtgcaaattctgcacaacggtaaaaaagtggggacagagcgtatctggtacggcgataaggagcaggtgaaactgggcaccgaccaggacttctggctggccctgccgaaagcggaagtgccgaacatcaaagccaaatacgtgctggataaaaaagagctggaagcgccgattgctgcgcatcaacgggtcggggagatccagctctatgaccgcgacaaggtggtggcgcactggccgctggtgacgctggaagccgttgataaaggtggactgttctctcgcatgagcgattatctgcatcacacgctctag

SEQ ID NO: 144713 - DNA, 549 bp, Enterobacter cloacae
atgcgtcaacattgccccggccctaaccaattatttacctatagcggaggtaaaatcatggcgaaaatcattctatccgaatttcttgtttacgatccaacatctgatactggcttgaggtggaaaactaagcgaggaaagatgagggctggatctgtcgctggaagctatagctctactcgtggagactatgtcgtttggctgtttgggaaacggtatgctgcgcatcgcatagtttgggagctgaataatggctcaattcctgatggtcatgatattgatcatgcggacggtgatagaaagaacaacgagatacgcaaccttcgaatagctactacatcgcaaaacctctggaacatgagaaccccttcccataataccagcggagttaagggcttgtgtttcgtgaagtcatcagggctttggcttgggcaaattgtcgctaatggtgtcagccataagaaaaaatcaaagtccagacaagtggttgaggaatggcttttagaaacaagaaataaagtccatggcgattttgccagacatgaataa

SEQ ID NO: 144714 - DNA, 384 bp, Enterobacter cloacae
atgagcacagaaaccgaaattgaactgggcaaggttgtcgcgtttccgacgaagaataacgacctacagggcgggctggttgttcagcgcgaagggcagaaggttatgtgcctgcactccactgtttgggtgaatgaaaaagaccggactttacgctgccggaagtgcgaaacgttgatcgagccttttgacttccttatgacgctctgcgaccaggagtctcgctacatggagaacgtgaaatatctccgccgcgaggaaaagcagcgccgccagaacatcgaaaagctcattcagattgagaagaacgccaagtcccgcatacgccgcgccggggataagtcaccacttcctctctggcagaacgagagggtggacgaatga

SEQ ID NO: 144715 - DNA, 861 bp, Enterobacter cloacae
atggatttatggactaaagatgagtttgaggaaaggctgatagcatcattgcttatgattacctcgggtacttattgcggaatctctggcaggaaaggctcgtcaaaagaaaattcaaatggcatggagtcattcaagaaggcaatttccaacagggtttatatcccttacgatgaaggagagttcatcttaaatggcgtaagcttagctaagccagcgaaacggttctcatctactatttcatatgttcccgggtgcgatgcgcttggtttaacatcggttgagtttgtaaaccaactgccaaaaaatattattcgcacgggtggtggtgaagctctaaaaactacactgaatatccttcaggatggtgaggtaaggaatgagattttttatctaaccctaacaaaagatggcgtgcttcataactgccttaccagaatgaagaatggttacatttttcgcccaactgacaagcgcggtgatattgattgggattttcatgatgacgatatgttagacgtaaaccatcccgtcaatcgtcaaacccttattacagccatgcacttacagtcgatggacgagatttttgaagactggtgcgtaattgctaaagccgaagggaaagaaattggttttggcattactaaggagcatattaaatccctattttacgcgatgagtacgccactcacacggacgggaagacactcacccatattgcactgggtttcctcgcacaggcgcaggattcgcagcggaaccgatttggatgtgaaaaagcatttgcgtggggccacagcatttacttgggaaggaattagatttgaaattattgagccggtaaagcgcagccagcagtaa

SEQ ID NO: 144716 - DNA, 204 bp, Enterobacter cloacae; identical to SEQ ID NO: 132099

SEQ ID NO: 144717 - DNA, 888 bp, Enterobacter cloacae
atgtctgaattagatgtgccatctctaccggaatccccatttgcaaagcacaaaggagatttgcagcttgggggtgactctggcctcgagtgctatgttctggacgatgggaaacgagtaattagccttagaacagtagttaaagcaatagcctccaccgagagtggaaacctgggcagttacataggcgctaatggactaaaaccttttttaaacagcgagttaatcctgggcgaaactattgattttgcattacctggaactcaatttagatccaggggtattacagcggaagcatttctagatatctgcaacgcttacgtatctgccttgagagccggaacgcttgaaacccaaagacagagggagatagccattcaagcaagcattcttttaagtgcttgcgccaaagtcggcttgatagcgcttattgatgaagcgacaggctatcaatctgagcgagaaggtgacgcgcttcaattgaaattaagggctttcattgccgaggagttgcgaggatgggaaaaaacttttcctgatgaattgtgggaagagtttggcaggttaaccaactggagtggaagctttaactcccggcctaaatggtgggggaaattggttctggagttaatctatgatgctcttgaccctgatattgctcaacacctgaagaaaaacatgccccctccgaaaacagggcaaaattaccatcaatggttaactcaagatgttggtttaaaagctcttgtaagccatattcatcaggttattggtattgccaagacgtgccagaccatgcgcgagctcagagataaaattgcagcttactatggcaagaagccggaacaattgaccatgttcaatgacattccagactctattaaatga

SEQ ID NO: 144718 - DNA, 213 bp, Enterobacter cloacae
atgagaaaagttcgctgcgttaaagacagatatatatgggaaggatcagacaggaaaaaggtaaccgacacgttcgaaggtgttttccattgctggggttttgattatgaagagttcgaaaacgggccgggaaattactcggtcggaattgtagagcttggggatggcagtgttcagcgattcatacccgagaatatcaagttcatcgaatag

SEQ ID NO: 144719 - DNA, 177 bp, Enterobacter cloacae
atgacaatcaaccataagttactcattcaggcccaacagaaagcccgtgcagcccgtcagaacggcgacggcgctaagtggatggaagccaacgaagagatgaagaaagcggctggtatgccgtggtatcgcgggaatttgatgcagcatggaggtggaaatggacaagctttctga

SEQ ID NO: 144720 - DNA, 303 bp, Enterobacter cloacae
atggacaagctttctgaatggcttaccagtggtgaatacctcccgcacttcatgcgcgactttcacgaccagaaagacgtgttcaaggcaatgcataacaccattaaaaacgcagacgaaaatggcaatccacgcgatggtcatatctacgtgattgatacctttctttggtatatggcgcgctgcgggtacacgctccagaaatcacgaaaagacgtccaattcaaagatatggatgacgacattgctcgttataaatcggaagtgtcaaacgcgttttcatcgatgatttcaggcaaataa

SEQ ID NO: 144721 - DNA, 417 bp, Enterobacter cloacae
atgaacgcatacctcacttacgaccgaatcgaagatcggcgctgggttgagcagcagctcaccgacgaaaaggagaagtggatcgacgacagggcgaaagaactgattgccatgttccctgcgaaacctctggaaatgagcagcttgttcctgccccaggaagcccagtttgcgcttatcggagaaaaggccgaagaggcatacaacgaatacatttcggcctgcgcatatgcccgcgccgccgcgatgccgaagcgaagcacaaagcggagattgaagccgcagcgcgccgtgaagctgaagagaaagcacgtgcagagttggctgaacgccagcgcgtcgaagcggaacagcgtgcggcacgcgagaagcaggaagcggaagcccgggcggaacgcgaaaaagccgcggcagtag

SEQ ID NO: 144722 - DNA, 192 bp, Enterobacter cloacae
atgattgacaccagtctgatacccgaaaaagaagtgatgaacacactcggtgtttcatcacgtcaaaccatctggaactatacgcaccggcacgggttcccgaagccggtacggacgcatccaaaggcctatcttcgcactgcttttgaggagtggatccttaatggtggcgttaaccagaaatgttcctga

SEQ ID NO: 144723 - DNA, 441 bp, Enterobacter cloacae
atgaaactgaaactcaatcaaaaaactgaaaagaatatctatcgtctaattgcagtaggcatagctgtgctttgttgtatcagtgctgttaaatcatggaacgaatacaacgatcctgttaatgtatcagcgcgccacacggagaatttcgaacgcagaacaaacgctcttgtttctttcgaaagcagcgttgattacaattgcacctctaataacggtgttcgttatcgtctctttgattataacgatagctttatgtacgttcgttctgatattactcctactcgtgattattataaattctcggagactctacgaggtatcgaatcagaaacaatgtataacgcccgtatttctgaatcaggtaattcaggtgcaggtcatatgtctaatcagatgtataagcacaacggcattaacttcttatgcaaacgtgcataa

SEQ ID NO: 144724 - DNA, 222 bp, Enterobacter cloacae
atgatcggggaagacccgtatttatacagttaccgtatctggaatgccatattcatttttaaaaatggaagcgtgcttcagaaaagcgagatcagcagcgcaacgggaaagctcattggccaggttgaccccaccagaaaagcgctgagcaggcggatacgtttgcggtctttagagaggaaccaggtaattaatgcgcagatggaagccataactgcgtaa

SEQ ID NO: 144725 - DNA, 495 bp, Enterobacter cloacae; identical to SEQ ID NO: 39180

SEQ ID NO: 144726 - DNA, 519 bp, Enterobacter cloacae
atgtcagtcagggcacaaagagcagggaaacgtaatcagtctgaaagaagaatcgaactgataaatacattatgggaaggggaggaaattgaaacatgggatcgtaatgaccgacctcgaaacgatggcttcataacagtacctcgttatcttccattactaggtgttcttatggatgagttatcaaagggaagcccactttcaagtacctacctagcgttgtggttcagggtttcagacgaaggcctgattgagataagggataagactgtgctggctttagaatcaggctttgccagtggaaggggggtaacaacatggacggggagaatgcggaaattaaaagagctgggattcatatcatgccgggaaggtagctccggtgagttccacaacgtgttgattgttcatccgctggttgcggtaaagaaactactggatgaagggaaaataacgaaagggaaaacctataacacttttgctgaacgggtaatcgaggtgaagtcctcatgggagtaa

SEQ ID NO: 144727 - DNA, 198 bp, Enterobacter cloacae; identical to SEQ ID NO: 39182

SEQ ID NO: 144728 - DNA, 420 bp, Enterobacter cloacae
atgagtgaagaacagcgccggcgtggcttcatgaaggctgaggcaagcctcagactggaaggtatagatcccagtggaagcccccactacgagtcggttaaagcgagaattatttcgggtgagataacctatgatcagggacgagctgaaattctggctttccataccgggaagcgtgcggagccgacaactgcgggggaaatgctcgcagaggaatttttaaaacctctgaacatgtctcagggggaactggcgcaggctacaggaattcctgagcatcatatcgatgatattatcagtaaccgccgtcgcctcagtgctgaggagtcttacaagctggccgaacagttccagaccgataaagatttctggctcaacctgcaggctttgcatgacgcatggctgacacaccagaaatag

SEQ ID NO: 144729 - DNA, 549 bp, Enterobacter cloacae; identical to SEQ ID NO: 97064

SEQ ID NO: 144730 - DNA, 279 bp, Enterobacter cloacae
atgacaacaacagcagagcaggacatggaagtattgctccagtccctgaacgagacacagggcgagataagcgaggagtccgcaccgctcagtcctacactggccgcgttggagccgtcccgccgcccagcgcaaggggtcgcctgcgcaacctgtccgaactcgatatggttcgcttcggagaacgaagtgagatgttattgccgggcaatgtatctcgtgacgtggagcaccagagaaccgacagaaatcagcctctgcgacgggaaaacactgtaa

SEQ ID NO: 144731 - DNA, 321 bp, Enterobacter cloacae; identical to SEQ ID NO: 97066

SEQ ID NO: 144732 - DNA, 303 bp, Enterobacter cloacae; identical to SEQ ID NO: 39176

SEQ ID NO: 144733 - DNA, 2484 bp, Enterobacter cloacae
gtgaaaaaaaatatactggccgggattttcttcgtcgcaatgctattgccagtatggcacgcagcggccgaaacattcacccgctgccatccaaatgagacagtctgggcaatgatccaagatgagcagctaaaaaacatcgccagactacaggaaacaaagcggtgtcaggccgttaatgacacttatgaccagtggcgccaaaatttccaggcgatgggagatgcagaaaacgctatccgcagcgcccgcgatcatcagaactggaacgccgtaaaatccacgttcgataacattgctccccagattaatagcctgcatgcactggccgaaaaaaattcatcgttactgggcgcgggtaacatcctggcgcttttcggcggtgatctgaattacctgtaccagaatgcagggctcgttgctccggccagcgctgacggactgactgataacgtcagtcaaatgctgactgaaccggataaacaggtcaaagctgcaggtatcgcgcaacagctggtttatcagactcgggttcgggcacagagctttatccaaggcgtggcacagaacgccggtaacgaagcccagaaagagtatcgtgcgcaatcagataagattgtcgaagataaagcccataatttcaaaggtgacagcgtggaaggatatttcggcggcttccttgcccggataagccaggtatatgctccagttctgctgttccttatcatcgttggtattattggtgcacttaccgcacggcgggtaaggctggatgctttcacggcatcagtgaaagcagtcatggccgcagcggtacccgcagtggcactggcgctgatgctgatattcatgcctttcctaccatcatgggtattgtacgcggcagcgctggccgtaacattcgccatttattcccgcagcaaaaaaattcttggagggctggcctctcgctgtgggcgtttccccgcactggcctccgggcttcgctggatgggcggttttgtgtctggcctcgatgctgacagaaagcaggaaaccggcgcggcatccatcaacccggcatcacatcacactcacggctcatcacgctggggaaccgctgcagaaatgcgggaaaataaccacctgttaccaacggaaaagcaagccggattcaccctggcacgagaactgtccccaccgcccggagtggatggaaaattctgtttcaccgggcacgttgtgactgttgcccctacgggcagcggaaaagggattggcgcagtaattcccaatcttctgacttatcagggttcagcacttgtctttgatccaaaaggggaaaacgccgaggtgacaggtcgtcgccgtcgtgaaatgggtcagagcgtccatgtaatagacccattcggtataaccagcggcataaaagaatcagtgaacattctggatcgtctcgatgtgaccagcccggattgcgtcgctgaatctgcagttctggccgaaagccttgtggtatcagagaaaggcggtgacggtaatcattttgatgaatcagcccgaaccctgttacagggcctgatgctgcatgtttccggattaccggatgagtcccgacgtaatctcgcggaactacgtcgactgatcacaagtgatgaagaaaacctgttagccctgctggccgatatggccgcaagtgaagacgttgctttcggcatccccgcccgagcggccaacacgctcatggggatggcagaccgggaacgtggctcagtattgtctacagcccgtaaaaacacagcatttctggacgacccgcgtatagcagctgcgctgtcacactcagacttcaacctgtcagccatcaaagctgaaccgatgacagtttatcttgtgctaccagctaatcgcattgcagcaaatacccgatttgtaaggctgtttatcggttctgtgatctccgctgtaacagaatcgaaggcgaagccagctcataatgtcgcattcatcctcgatgagttcaacgtgctgggctatatgaaatcaatcgaggatgccgtaagcctgttacgtggctacgggctgtctttctgggtcttcctgcaggatctgtcacagctgaaaagtgcctaccctaaatggcagacgtttctggccaactcagcgaagacgttctacggcacagacgactatgacactgcaaaatacgtcagcgacaccttgggtaaatcgacggttgaatttgaaacccagaattcaggccgcaactctggcggcggagtttccgggggtggcggctcaatgaatcgtggccgttcatctggctcaagtcagcagtttgctgggagggaattactgacacctgacgaagtaatgaggcttggaccaacccgaccaattgtgattctgaaaggggaatacccttatcagctcacacgtattaactatctgacagacccagaatacacgggtatggcagaccctaacccctactacagcgcatga

SEQ ID NO: 144734 - DNA, 264 bp, Enterobacter cloacae; identical to SEQ ID NO: 39178

SEQ ID NO: 144735 - DNA, 363 bp, Enterobacter cloacae
atggcatggcacagtgtgtcacaagcacaaaacatgacggggaaaagtcgcaggaccctttatcgtgatatggcgtctggccgcttgtcatggcgaactaatactagcggccatcgcgaacttgagacctcagaactgatccgtgtttatggcgagattaaaaacgatggcacagctgaacggcacaccgtgtcacagcctgatgtcacagtatccggtagtgacatcagggatgaattgcgtgccttacggcaggaagttgcagaccttaaatctatgcttttgaggctggaacataaacaggaagagcagcctgaaactgcggctccgtggtggcgtttctggcagaaaaaatctacttaa

SEQ ID NO: 144736 - DNA, 354 bp, Enterobacter cloacae
atgcgtaattcacttaaagccgttttatttggtgccttctctgtcatgttttctgccggtcttcatgctgaaacacatcagcatggcgatatgaatgctgccagtgatgcttcggtacagcaggttatcaagggcaccggtatcgttaaagacattgatatgaatagtaaaaagattaccatttcgcacgaagcaatcccggcggtgggctggcctgcaatgaccatgcgcttcacttttgttaatgcagacgacgctatcaatgccctgaaaaccggcaaccatgtcgatttctcgtttattcagcagggcaatatctccttactcaaaagcattaacgttacgcaatcctga

SEQ ID NO: 144737 - DNA, 303 bp, Enterobacter cloacae; identical to SEQ ID NO: 96991

SEQ ID NO: 144738 - DNA, 228 bp, Enterobacter cloacae
atgagtgaccgttacgaatttttacccaaatgcttcctaaaagtctctatctcctcgggttactttactgccatccttgatggttcgcttccccctgatgcccctggttctgttcatgctgataatgccatgcaaatcataagtgtactcgattcctatttccaattgactgactcacagcatcaaggaattgctaattatctttgctctcaagggatggaactttga

SEQ ID NO: 144739 - DNA, 1176 bp, Enterobacter cloacae
atgcttagcgctgacttgctcttacattctccaaatgactattttattcttgtaggtaaaaatgggagcggcaaaagcatactgctgcatgacctggcagagagtttgcacaatgaaggttacagcacagttgctgtgtcaaatacactattcgataaatttgaagttcatcccaacagttttaactatgactatattggaagtaaattaggtaggaatttccctgctcaagcaataaagagaactctttcaactaaaagccaaaataaagtaagtcgtattttttcagttttgaatcacatcggctatgaacaatctattggtattaaagtaaaatttcgtaaaaaattcaaagatgccattcgatattcaagaaacacatcaggtgatatttatcctgttttcttcgacagtagtgatcaagaaatacctgacgaacttaaaatggctatcgataaagctattcaccaagtcaattatggatatagtactttaatttggctaaccaatgatgataacgttttttatgaaggaaatttcgattcgtatttgcttttattaagctatgaacgtcttttgaaaaaagcgaatataatatctggcatagaagtcctcttaactaaagatgatgtttcattcccgttgaaacatgcaagctctggagagttatcttttatagctttacttgtccacctcgcattttgtgttaacgatagttcatttatacttattgatgaacctgaaaatagtttgcaccccaaatggcaaaatgagtatttcgaacttcttaaaggagcgataggttataatagatgtaaagttattgtagcaactcactcacctcttataattgcttcagcctcagaagataatcaagtatcaatttacaaacgtggaattaatggttttagtcaaataaattcttacgatgataatgctgaagatctatacatagactatttcgatacgctaacacctaaaaatagagctttatctaatagatgtgtggatattatagaccagttctcaagtggccaaatatctttacaaacagcacgcgagcgtttgcaagaatttaaaaaaatggcaaatgatttagcccaaatgaaattcctctctggggttgatgtattgcttgataaagtttctaatggaaaagggaaaactcatgggtaa

SEQ ID NO: 144740 - DNA, 1713 bp, Enterobacter cloacae
gtgaatcgtatacttattgtaggacacccaagctcgggttataaggaagtggaagagattttacagcagcgaggaatgacctctgcgctaccctctcgacgtgatgcgctactgccacaagatattactgccaccctatgtaaagtacacaaggtgcccgatattgataatgtgacagcagaagaagaaattaagcctctccaggtcgcacccgtatggcatggtatggcattagatttgatgctaggtaatcttgagcagaatttatggggatgggctgaccctcaatcaatctattcgctggattattggtgccaactggatgataacttaacttttgttctcgtttatgataccccacagcaagcactcatggaagcttctacaaagcataaggacctctcaggtaaaacgatcgaacataatattaataactggatggcatataacggtgcgcttctggcattttacctgcgaaaccgtaacagatgccttatggtcagtactcagcaagttaaacgaaattcagaggcctatttacagcagcttcagccattattgaatacaccactgttgtctacgtctgaaggcgcatcacaggaaatagcttatgttgttacatctgatgaaagtccatattcagcgcagaccagatatcccgtattgccggaaaataagttgaaagaaatcgctaaccttgcgggtctggatgtgaaagaaacgcaagactttcttcaagagaatatcgttgaaagttttttacttgaacaattactttcagaatatccagcatgtcaacgtctctatgctgaattacagtctgcagctaatctcccattgcaaaccgatcatcgagaaaaaaacgatccggccaaaatatggaaaaaaatggttcagcagcggattcggagcgcagaattagctacgggattataccaagcttatttaagtatgaatgaatctctggcaagcgatattttaatacaaaatcaagaatgtgaggtattgttatctcaattacatcaagttcaagaagaacttgaacgccagtacctgataaaagaagatttagaaaatctcaaaacacaacagagtacgaaacttcagtaccagatttcgttgactagaaaaaaagaagaagaattatcgctcttaataaagaaagtggctgaaatacaaaaacaactagatatatctctaaacgatgccaaaaagcaacttactacactcaaagcaactgaacagaaaaaaattgaaaaaacccaaggggagaatgaacttttattgtcacagctgcatgctgtgcaagaagaactggaacgctattatttagaaaataacaaacttaaagcacagcaatctccagtactttatggtgcagcagagcgtattaagcaggaactcggctatcgcctgggtgcaactatgataaagaactctaattctcttaccggttggctaggaatgcctaaggcgcttgccgctgagcgtcgcgcatggcatcaatataatagcagtcagcctcagaaaaacctcccaccagtgactgtttaccgtgatgctcatgaggcggaacgcgttaaacgccacctttcatatcagcttggtgaggttttaatacgcagcgagggttcgctcttaaggtgggtaaaattgccctttgctttacatcgttcggtgcggcaattccgtcatcagcgcaaggggacataa

SEQ ID NO: 144741 - DNA, 444 bp, Enterobacter cloacae
atggaaattgaattaaataagagtgttaaagagagagttttccatgctgtcatttttgaagtgacggccaacgttatcatcgcgctgtcactcgcctggctgatgaacgtgtcggtactccagtcaggctcgttgtccgtgatatccgcccttaccgcaacggtctggaattttatttttaataagctctttgactccctgcagaaaaaacatcagtttcagcgcacatttctcgttcgagcaatccatgcggttggttttgaaacgggacttatcatctccttaatccctgtggcaatggttatgctgaacctgaccgtggctgaagcattttttattgagattggtctggtgctgtttttcctgccctatacgatgctgtttaactggctttacgactacctgcgttggacgttcgttggacggaaacgtacggcgttatag

SEQ ID NO: 144742 - DNA, 213 bp, Enterobacter cloacae
gtggatgtggactggctgatcgccgagcgtcccggcaaggtaaaaaccttgaagcagcatccgcgcaagaacaaaacggccatcaacatcgaatacatgaaagccagatacaaggggctgctgaaaaacgataaccaactggcgatgttattcaccctggccaacctgtttcgggtggaccaaatgatacgtcagtgggagagatctcagtaa

SEQ ID NO: 144743 - DNA, 717 bp, Enterobacter cloacae
gtgccgatcctcgatatcatcagcgatatgcccagttacggctatcgccgtgtgtggggcatcctgcgtacgcaacgtcgtacagagggactgccccccgtgaacgccaaacggctttaccggcttatgagcgagcataatctgctgttactgcatgacaaaccagagcggtcgaagcgtgaacataagggcaaaatcgcggtggcagaaagcgatatgcgctggtgttcagatggcttcgagttcggctgcgacaacggtgagaagctgcgggtcacgttcgcgctggactgctgcgacagagaagccatagactgggcagcgagcacaggaggctacgacagttcgacggtgcaggatgtgatgctgaggtcggtggaaaagcgcttcggcgacgggctgccgaccacaccggttcaatggctgacggataacggttcagcatataccgcgcatgaaacgcggaggttcgccagagagctgaatctggagccgtgtacaacagcggtgagcagcccgcagagcaatggcatggccgaacggttcgtgaagacgatgaaggaagactatatcgcgttcatggcaaaaccagatgtgagaacagccctgcgaaaccttgcagcagcgttcacacattacaatgaaaaccacccgcacagcgcgctgggatatcactccccgagggaatatcgacggcagcggacatcgttaacttaa

SEQ ID NO: 144744 - DNA, 969 bp, Enterobacter cloacae
ttgaaggatcagatcacgcatcctcccgacaacacagaccattccgtggcaaagcaaaagttcagaatcaccaactggtccacctacaacaaagctctcatcaaccgtggctccctcactttctggctggatgatgaggcgattcaggcctggtatgagtcggcaacgccttcatcacgaggaaggccccagcgctattctgatctcgccatcaccaccgttctggtgattaaacgcgtattccggctgaccctgcgggctgcgcagggttttattgattccatttttgccctgatgaacgttccgttgcgctgcccggattacaccagtgtcagtaagcgggcaaagtcggttaatgtcagtttcaaaacgtccacccggggtgaaatcgcacacctggtgattgattccaccgggctgaaggtctttggtgaaggcgaatggaaagtcagaaagcacggcaaagagcgccgtcgtatctggcgaaagttgcatcttgctgttgacagcaacacacatgaagttgtctgtgcagacctgtcgctgaataacgtcacggactcagaagccttcccgggccttatccggcagactcacagaaaaatcagggcagccgcggcagacggggcttacgatacccggctctgtcacgatgaactgcgccgcaaaaaaatcagcgcgcttattcctccccgaaaaggagcaggttactggcccggtgagtacgcagaccgcaaccgtgccgttgctaatcagcggctgagcggaagcaatgcacggtggaaatggacaacggaatataaccgtcgctcgatagcggaaacggcaatgtacagaatgaagcagttgttgggagattcactgacgctgcgtgactacgatggtcaggtagcggaagctatggccatggtgcgtgcgttgaacaggatgacaaaggctgggatgccagaaagcgtgcgtattgcctga

SEQ ID NO: 144745 - DNA, 432 bp, Enterobacter cloacae
atgaaaaatatcgtattagcatccttgctgggctttggtttaatttcatcggcctgggccactgaaaccgtgaatatccatgatcgcgtcaacaatgcacaggctcctgctcaccagatgcagtctgctgcggctcctgtcgggatccaggggactgctcctcgtatgaccggtatggaccagcatgaacaggccattattgctcatgaaaccatgacgaacggctcggcggatgcgcaccagaaaatggtggaaagtcatcagaagatgatgggaaataacacggtatccacgaccgtcccgtcaacgtcttacgcggcgatgaatgagcatgaaagagcagcggttgcccatgaattcatgaataacgggcaatccggcccacatcaggccatggccgaagcgcaccgccgcatgatcaatgcaggctga

SEQ ID NO: 144746 - DNA, 234 bp, Enterobacter cloacae
atggctggcatgaaaaatatgcatgaaaaaatgatggccgccgttaatgaatccaatcccgataaggcctttgcaaaaggtatgatcgcacaccatgaaggggcaatcgcaatggctgagaccgagctcaaatacggaaaagatcccgaaatgagaaagcttgcgcaggacatcattaaagctcagaaaggtgaaatcgagcagatgaataaatggcttggcagtcaaaaataa

SEQ ID NO: 144747 - DNA, 213 bp, Enterobacter cloacae
atgaccggtgtagccgtcacgtttacggacacctgtgatgctaaaaaaataattggccgggcggtgggaatgaaacccgataatgtgcttgataaattctggccccggatgacagcggaaagaatcatctcaagatcaacctatcatgacggaatgcaggaaaggattgagctggttgagatcctgagcgatattgttgccatgacgagataa

SEQ ID NO: 144748 - DNA, 441 bp, Enterobacter cloacae; identical to SEQ ID NO: 144335

SEQ ID NO: 144749 - DNA, 249 bp, Enterobacter cloacae
atggtgaggctgttttatctggtctgggctgacttcgtggtgatcgtggtggtggtgggaatgttcactggcatcttcggtaagataacggtcgggatgggctgtaaatttactctcacagctggcagagcagaaataaagctgatggtcctggtatcgaatgctgctgtgcgccttgtcgggcaggaatgccatcccgcacacgggatctctcaccttatgcaatacgtggctctcgtccggggataa

SEQ ID NO: 144750 - DNA, 369 bp, Enterobacter cloacae
atggacgaacagtggggctacgtcggggctaaatcgcgccagcgctggctgttttacgcgtatgacaggctccggaagacggttgttgcgcacgtattcggtgaacgcactatggcgacgctggggcgtcttatgagcctgctgtcaccctttgacgtggtgatatggatgacggatggctggccgctgtatgaatcccgcctgaagggaaagctgcacgtaatcagcaagcgatatacgcagcgaattgagcggcataacctgaatctgaggcagcggctgggacggaagtcgctgtcgttctcaaaatcggtggagctgcatgataaagtcatcgggcattatctgaacataaaacactatcaataa

SEQ ID NO: 144751 - DNA, 270 bp, Enterobacter cloacae
atgaccagcaaactcaaacagcggcgcctgcgccgccttaaagccgacgtagcctggtggatggcagaagcgcaggactggaaggatatagcgctggagcacgcagccgaaatagacagactcaaaaagctggttatccgtgtgccgatgcctgttctcatgccgaaggagatggtccaccagctttattacaccgaaacaaaaagatgtcgtacctgcaatgatgggctccgtggtggttgctcatcatgcattttctataagagataa

SEQ ID NO: 144752 - DNA, 1209 bp, Enterobacter cloacae
atgatcactattaccagagaaccagttacgcacaacctcaagatttggcctgaatacttctcagcggttcgcgacgggcttaagcgcgctgagctgcgttggaatgaccgtgagtatcaggcgggcgacattctcgacctttgtgagtgggatccgaatgaagaggccttcacgggtgatttcatcagcgtcaccgttacgcacgttgctgagcttggtcagtggatgcctggttacgtgctgctgagtgtcgcaccgccagcgccagaaaatgccgagccagtagcctggctgtggtcacacagaaaacacccgagcgaagtcacgctcgtacggcctgaagatgatgagaaagcagaacctggtctgtggtctgggtggagttgtcaggcgctatatgcagcacagccagcgccggtagttcctgcagagcttcatgctgacacgcagaaattggtgaccgacttctgcacagcactggctgagaaactgtataaagctcagctgaagtatggctacgacgcagagtggaaacaggatggatggccttcacaatgtcaggcacactttcatcaacatatcgccaaaggagatccgagagacgttgctgcttactgtgcgtttatgtggtatcacggatggaaaactgagccagctccggtaataccggaaacagcagatcgagaaattctgaaacgtctttcagtgattctctctggcagcgatgctcctggtgaaattcgctccctgacagtcactgctcgtagctttgttgatcgttgtaagaccctggcaaaggaacgcgatgaatgccgcgccgccatccttcagggtgccgaacctgtaacgaccgctaacaagttgccggaagaaacaggctcatcactgcagttacgcaatctcatccgtcagcgccatgctgagtggtcacaggcgacgttcgccgatgttggtccagttgggccgcttaaacacctcagtaaagaagcgttggaagcagcggcggaacctgaagacctcagcgagtgggctgatatgcagttcctgctgtgggatgcccagcgccgcgccggtattagtgatggtgaaatcacagcagcgatggaagaaaagctgaaggtgaatatggcgcgccagtggcctgagccgaaagatggcgagccgcgactgcatatcaaagcatcaccgcagcaggaggttaagtcgtga

SEQ ID NO: 144753 - DNA, 201 bp, Enterobacter cloacae
atggctgatacaaccgcagagtggagtttgtcactcgacacccagtgtccgcaatgtaaacacgtttttgatttacggcctcagctgtctgaaggctgctcgtctattcagatttgcgaaacggacaccgtggcaactcttgactatgaaacggcatgcccggaatgcggacatgaatttacgtgcgacttcgtgtactga

SEQ ID NO: 144754 - DNA, 327 bp, Enterobacter cloacae
atgagcaacatcgacaaacaggcgctgcgtgatattgcctcagctgcgaaatcaacccctttatggcatgcagttggtgtgttcggggaagttgtcgacccggcaaatccagaatggaaaccagtacatgacttttgcaatacattcacggctgagagagttctggcgctgctggatgagctggaagctgcagagaagcgcaggcgtgaaatggctgagttgctaatcaacttaaagaaagccagacccggaggcgtctatttcaataaatgggatacgcaaatcgacagcgttcttcacgccgccgcagccggtaaaggagagtga

SEQ ID NO: 144755 - DNA, 219 bp, Enterobacter cloacae
atgagcaaagcaaaagcgttacagccaaaattcaacgtcggtgaaaccgtcaattacacagaccgtcagggcagaaagcaaagcgggaaagtgcgtcatatcgagggaaaatggaccacatttggcagtgcttacctgatctacaccgttcagcatccgagctaccgcaatgggcagattcactgtggggaagatgttatcgaaggagccgcccaatga

SEQ ID NO: 144756 - DNA, 453 bp, Enterobacter cloacae
atgatcgaattaacgcctcgtcagagtgaagtgtatgaagctatcaaggttcacatcgagaaggttggcttcccgccaaccctgatagagcttgccggtcttattggttgctcatcgcaaaatgctgccgctgagcatgtgaaagcgctgaagaaaaaaggctatctaacaacagccagcggcgccgcgcgaggtatatcactgatagatcaaaagccaaagcggttgcctatcggcttaaatgaccaggtaaaaatcaaactgtttgagccaggcattgaacatctcaaacgtcattatcaggaattaaatatcccctatgaggctcccaaggtagacgcggatggttatgccaccatgacgctctggtatgtaatgagtacgtttggcgacattttgtataacggtgcgcctcatgctttcgaacttgcgattgatctggaggccaaatga

SEQ ID NO: 144757 - DNA, 786 bp, Enterobacter cloacae
atgtgtattttcgaattagttcttcctggcacgcatataaacttcattgatagggaactatcttggaaatttgagcatcttttataccaccttgaatctgcgttttatgaagccaatatttctttaaatttatttgaagcggaagtaagcaagcagccaagaggtggaggtttctccagggagaaatggaatgatgattttcaaaaacgccaagcgatggaagaggaagtccgaagagaatttgggcttcaaccttatgaaagacatgaagaagtaatgtttgaagcggatgcaaggatcaaaagagaaaaatggcgctcaggtgaaatacctacaagtcatcgaaatcaattgattagcatatatgcaaaatcatttatttatgccattgatactattgataaattcttaggagtcatttcaaaggaggaaggcgctccagctggagttgcagatgctcaagctctgatgggtaaatatttccctgatttaagaaaagtcaggaactccgcccagcatttagaagatagagctagaggtcttggggctggtaaacaaccaaaacctttagatcttaagccagtcgacaatggttttgtatcagccccccaaggggcgttaatgttgaataacatattaggtacaaaatacggatgcaccatggctgatggtaattatggtgaagtggacgtgtccgttgaatcgttaaaaaacttacaaattatagttcagcgtgcatttaattcttttgattggcttggaataagacagcaccttccaagataa

SEQ ID NO: 144758 - DNA, 1443 bp, Enterobacter cloacae
atggcgatttctaaagaaatgcggaagctcataaataaatggaaaaccggaacatcgtggcctaaacgccttgaatggcttgaaataaagggtattagaggttggtcgggacagagggttgattttcaattccctatagtagctctcgttggagagaatgggtctggtaaaagtactgttttgcaatgtgctgcatctgtctataaagataagaaaaagagatttgcgtcattctttttcccggacacccccttcgaaaaaatacaaagtgcctacattcgctattcttatagagaaggtcataactctttagttaaatccattaggaaaccaacaaatcgctggataggaaacccagacaggccagctagaagggttgaatatgtggacttaagtaggctgcagccagtcaatgctaggttgggatatttaaagttacttaaaggtggctctactgagcaatctcatgaagcatttgaccaagagaggcttgataggcttaaaaatatcatcggtaagagttatacggcagccggattatcaacaaccacaattgatgccaagagaccagtaacggtaatttcaaacgaaggtactaggtattctggatttcaccaaggcgctggagaaattaccgcaactgaacttattgctgtggattatccaaagtatggtcttatcttgattgatgagatagaaacatcgttacatccacgcgctcagcgacgtttaatgcgtgacctagccaatctagctagggaaagagagcttcagattcttattacgacgcactctccttatattctttctgagctgcctccagaagctagaatatatctcatgaatggtgttgaggggaaaacagctgtaagtggtgtaagcccggaattcgccatgacaaaaatggatgaggaaaaccacccagagtgcgacgtttatgttgaagatgtcgtagctaaaaccctagtgtcggaagtcatcgccagctccagggagagagaattattatctagagttatgattattccttttggaaccgcaagtgttggcatggcattgggccaaatggcgcataataatagattccctagaacaactgttgtctatctcgatggggatcaatccccggcgcaaggatgtacaattttgccaggggatgatgcccctgaggttgtggttttcaatgctctgcaagagcaaggttggccaaacatttcagagaagataggaagagagccggcagaaactatagatgcattgaatgcctctatgagcagtgcagatcatcatggatggccaagggcagctgccaattcgttaaatattggttctgaaattctctggcatgcgatgtgttcatcttgggctaaaaattgcatgagcagcgcagaccttgacgctgtactacaaccaattgttgacgcattagaatctgagcgctaa

SEQ ID NO: 144759 - DNA, 123 bp, Enterobacter cloacae
atgcacatcaaaatgatgtatgtctgcatcagtgctcagcgggtatacatcaaaatgatgtacataagcgtaattgcatacatcaaaatgatgtacagatcggcaaactacacatcaaattga

SEQ ID NO: 144760 - DNA, 276 bp, Enterobacter cloacae; identical to SEQ ID NO: 144257

SEQ ID NO: 144761 - DNA, 369 bp, Enterobacter cloacae; identical to SEQ ID NO: 144750

SEQ ID NO: 144762 - DNA, 261 bp, Enterobacter cloacae
atgctgaggatccattgctttcacggcgttgcccactatgtagaagcggattttacggatgagaacggcaaagggtttatcaacgtttatgacaggcactggaacttacaacccttccggatggaatatccgaatacttcagcaacgcctggcgaaccgcttttgttccgccaggcactgttggcctcccaggaactggcgcatggaattgactactgccgcgttgaccttatgctaaggaaggtgcgaacaagttcctga

SEQ ID NO: 144763 - DNA, 291 bp, Enterobacter cloacae
atgtcatttgagtctttcgactgctgttttcgccctgtggcagggcttgcagaggctttcaagattggacaggtcatcggtacccccatttgctttggcggtgatgtggtccactgtctcagcgggtgtatacctcccatttcgcaggcattcctgacagaggtgtttatccctgtcgagaacgattgggcgcagcctgtcccacttggtgccataacctcgctgatgcctgctctgtcctcgctgatgctgctgccagccttcgttaaggtgcttgggacaatagcctga

SEQ ID NO: 144764 - DNA, 681 bp, Enterobacter cloacae
atgcctgtacttttcagggtgaaagttattccgctggttttacttctggcaatgatctttgcgtttttacttaactggccaatattgctgcatttttacgagattttgtcgcatttagagcatgtcaaaattggttttgtcatttctattccctttgttctggttgcggcgcttaacgttgtttttatgcctttctcagttcgttttctgctgaaacctttctttgctttactgtttatcactggctcactggtcagttattcgacactaaaatataaagtaatgtttgatcaaacgatgattcaaaacattattgaaactaacccccaggaagcgcattcctatcttaatggctcaattattatatggttcgtctttaccggtatccttcctgccatcctccttttttcaataaaaattcaatatcctgaaaaatggtataaaggcattgcttaccgtttgctctccgtgctggcatcgttgagtttgattgcaggtgttgccgcactttattatcaggattatgcctctgtcggccgcaataactcgacattgaataaagagatcatcccggcgaactacgcttacagcactttccagtatgttaaggatacgtactttacgactaaagtgcctttccagacgctggggaatgatgctaaacgcgtcgtcgctcactaa

SEQ ID NO: 144765 - DNA, 681 bp, Enterobacter cloacae; identical to SEQ ID NO: 139460

SEQ ID NO: 144766 - DNA, 243 bp, Enterobacter cloacae; identical to SEQ ID NO: 144700

SEQ ID NO: 144767 - DNA, 2124 bp, Enterobacter cloacae
atggatattattagaaattcagtctggctctctcaaggcactgatttgcttgcagaggggctttatcgtgttttggattttgacaaaaaggttgatttgttaattttgtttaaaataaaatcagaaagaacgggtaagccaattcctttctcattttcattgtttaaatattatattgaatcaaatagcataacttgtaaagattatatatacccttcatatatgttagtagatgagaaagaaataacagatgaagacaggggaaggcgagatgaaaattacaatatcattaaagatcttgtagatgacagaatgtttctgttcgactatgcattacataaaaagtctcaccttttaatggactactccagaaataaaaaaatatcacaatatactatcagaacgcttctggcgttgtactggcgacatgggcaggatgtttatgcattactacccgcattctcgaactgtggtgccgctgggaaaagtagaatcaaacatgaaattaaacttgggaattccaagaaaaacagagcattacctaatgaacgttcacgtgttttcattcttaatgaaagagatataaataatattagaaaatctctcattatgtatcataataaagttaacggagatacgataaagaaaacattagagagacatattgatttgtattttagggatgaaattaaaacagcgaacctagaaaatagagctccatatgttccttctttaaaacaattttcatactggaataaaaaactcttcactaaagatttctcgataaataagaagaacacgaaaaaagaaatagacctcaaaatgcgggcgcttttaggtagtgtggctaatacaactgttttgccgggtgatgttttcgaaatagactcaactgtcgctgatgtacatcttatttcgagtttaaacagacgaaaagtcattgggcgtcctactatttatacagtggtggatcgtgcaacaagaatgattgttggccttcatgtttctttataccatgcttcatggcgagccgcccgacaagcgttagcaaattgctttatgccaaaaaaagaatattgtagattatttggaatctctattactgatgatgattggccttgttctcacattccattaacattgatgtgtgacaacggggagatgattggtcttaaacctcaggaagagatgacccccctgacaaaacttgagtttgcgccagtcggtagaggcgacagaaaaagcattgttgaacgctgtttcggcattctgaatgatgaggttattcataggcttattggaacaacacgaaggggaaagattgttaaaggagagccaacaccgcaatccagggcttgtttaacgattcaggaggtcacgtctttactgattcgggagatacttgcacataatcagagaacgtatgaggaactggcttatatcaatcccttactgattgaaaatgatctcgtaatatcaccaaaaaatagttggatgataagcttaaagcacgggagattcagcgcaagagccgttggggccgacgaagtgatcgcacgattgttaatccctgtgaacgctaacattaccgccggtgggattcagtacaataatcttttttatgaatgtgatcctgaaattgcatcaggtgtcagagtatttggaagaaccacttgtgaagcaagaatagatgacaattgcgtagattatatatatgtaagatttgacaaaaatagcattttcaaaaaacattacctacttaagaaaagagatgtatttaaagggaaagctcatcttgatacagatgtaatggctgattgggtagatactcaaaaagaaattaatttatttactctggattcgctcagcaatatcaataataaagatgaatttaacaggaaaggtaacgaaagattaaatgaaatatacgaatctcgccgggtacatggtaaagatattaaaaagaacaggaaaaatgaacttgattcattagggcgaactcatgttgctaatggaagatctgaacccctacttccttcatccagtaatgttctgcttttgcctggccgggaggagaaacaaagatggttaaaaggtaagaagaagactgaggacgcagaataa

SEQ ID NO: 144768 - DNA, 633 bp, Enterobacter cloacae
atgggtaatatttcatttgttatcgaagagcaacgtttaatggatcatgctgtcgcgcagggccatcagttctggagtgatagctctctcgaagctatcaaaagaaaaattaaagattatttgcgtgagaaccaaaaacactgctgttgttattgctctagaaatatagatgatgaatttaatatggttcttgatatagaacatattattccgaaatcaaaaatagtgtcggaaatgtttcaaatgaataatctggctgtgtcttgcaaaagatgtaatatgagaattaaaggagaggatatatcatttattgatgctgattttcaaagtttcaaagaggcaggtgattactatcaatcaaacagctataaatttatccaccctaaccttgatacttgggatggaaatcttaattacattgtagctcaagttaataggcgaaaagttgtttattatcaagtcgttgacgatagtcctaaaggtacgtatgcaaagaaatactttgaattggataaaatacaggcaaatacttttgatgaagcgcaggaagcgactgctagaaaagaaccaaatgatcctgaaatagcgaaagaattttcaaaattagtaactacaatgctaggtcaagaataa

SEQ ID NO: 144769 - DNA, 210 bp, Enterobacter cloacae
atgacggatggctggccgctttatgaatcacgcctgaagggagaactgcacgttatcagcaagcgatatacgcagcgcattgagctgcataacctgaatctgaggcagcatctgacaaggctgggcaggaagtcactgtcgttctcaaaatcggtggcgctgcatgacaaagtcatcgggcattatctgaacataaaacactatcagtaa

SEQ ID NO: 144770 - DNA, 663 bp, Enterobacter cloacae
atgggaatcggcccaccttgccgggcgccggtgccgtgtgggaatccgcccaccttgccgcgcgccggtgccgtgtgggaatccgcccaccttgccgggcgccggtgctgtgtggaaatccgcccaccttaccgggcgccggtgctgtgtgggaatccgcccaccttgccgggcgccggtgccgtgtgggaatccgcccaccttaccgggcgccggtgccgtgtgggaatccgcccaccttaccgggcgccggtgccgtgtgggaatccgcccaccttaccgggcgccggtgctgtgtggaaatccgcccaccttaccgggcgccggtgctgtgtggaaatccgcccatcttgccgggcgccggtgccgtgtgggaatccgcccaccttaccgggcgccggtgctgtgtggaaatccgcccatcttcatgacaaaaatttgtcaaatgacaggctcatgtgtgctgatttatgtcagacgggattttgcttatcaattattgagaacagaaattttcctgaatcatcaatactatacttagcaagtaaaggtgttttctcatttatctgcttgagtgcaggatcaaggaaagatcgtttcaactctgccaagttcttctgctgggattccggtaagacgaaacggtcatttaaccaagcatga

SEQ ID NO: 144771 - DNA, 963 bp, Enterobacter cloacae
atgctgaattattctcagacaatcccggctaatgtcagttacaacgaatatcagtttgtcattgtgcaggcgcgttctgacggtttcgtcgaaaaagtgtatcccctgacgattggcgatcatgtgaagaaaggcactccgcttatcgatatcaccattcctgaatgggttgaggcacaaagtgagttcctgctgttatccggtacaggcggtacgtcaacccagataaaaggggttctggagcgacttcgtctggctggtatgccggaagaggatattcaaaggctgcgttcaacccgcacaatccagacccgttttaccattaaagcacctattgatggtgtcattactgcatttgacctgcgcaccggcatgaatatttcgaaagataaagtagtggctcagattcaggggatggacccggtctggatcagcgctgcagtgccagaatctatcgcctatctgctgaaagatacgtcgcagtttgaaatttcggtaccggcttatccggataaaacattccatgtcgaaaaatggaacattcttcccagcgtggatcagacaacccgtacgcttcaggtccgtctccaggtttctaataaggatgagtttctcaagccgggcatgaatgcctatctcaaactgaatacccaaagtcaggagatgctgctgataccaagccaggccgttatcgataccggcaaagaacagcgcgtgattactgttgatgatgaaggcaagtttgtgccgaaacagatccacgttctgcatgaatcacagcaacagtccggcattggctccggtcttaatgaaggcgataccgtggtggtcagtggcctgttcctcattgactccgaagccaatattacgggcgcgctggaacgtatgcgccaccctgaaaaaacagaaaacagtatgccagcaatgtctgagcagcctgtaaatatgcattcagggcactga

SEQ ID NO: 144772 - DNA, 213 bp, Enterobacter cloacae
gtggatgtggactggctgatcgccgagcgtcccggcagggtaaaaaccttgaagcagcatccgcgcaagaacaaaacggccatcaacatcgaatacatgaaagccagatacaaggggctgctgaaaaacgataaccaactggcgatgttattcaccctggccaacctgtttcgggtggaccaaatgatacgtcagtgggagagatctcagtaa

SEQ ID NO: 144773 - DNA, 318 bp, Enterobacter cloacae; identical to SEQ ID NO: 144710

SEQ ID NO: 144774 - DNA, 441 bp, Enterobacter cloacae; identical to SEQ ID NO: 144335

SEQ ID NO: 144775 - DNA, 924 bp, Enterobacter cloacae
gtggcaaagcaaaagttcagaatcaccaactggtccacctacaacaaagctctcatcaaccgtggctccctcactttctggctggatgatgaggcgattcaggcctggtatgagtcggcaacgccttcatcacgaggaaggccccagcgctattctgatctcgccatcaccaccgttctggtgattaaacgcgtattccggctgaccctgcgggctgcgcagggttttattgattccatttttgccctgatgaacgttccgttgcgctgcccggattacaccagtgtcagtaagcgggcaaagtcggttaatgtcagtttcaaaacgtccacccggggtgaaatcgcacacctggtgattgattccaccgggctgaaggtctttggtgaaggcgaatggaaagtcagaaagcacggcaaagagcgccgtcgtatctggcgaaagttgcatcttgctgttgacagcaacacacatgaagttgtctgtgcagacctgtcgctgaataacgtcacggactcagaagccttcccgggccttatccggcagactcacagaaaaatcagggcagccgcggcagacggggcttacgatacccggctctgtcacgatgaactgcgccgcaaaaaaatcagcgcgcttattcctccccgaaaaggagcaggttactggcccggtgagtacgcagaccgcaaccgtgccgttgctaatcagcggctgagcggaagcaatgcacggtggaaatggacaacggaatataaccgtcgctcgatagcggaaacggcaatgtacagaatgaagcagttgttgggagattcactgacgctgcgtgactacgatggtcaggtagcggaagctatggccatggtgcgtgcgttgaacaggatgacaaaggctgggatgccagaaagcgtgcgtattgcctga

SEQ ID NO: 144776 - DNA, 177 bp, Enterobacter cloacae; identical to SEQ ID NO: 139692

SEQ ID NO: 144777 - DNA, 198 bp, Enterobacter cloacae; identical to SEQ ID NO: 19856

SEQ ID NO: 144778 - DNA, 201 bp, Enterobacter cloacae
atggaattatcagcttggttatacatggccattggcgtcattgtggtttatctgtccggttgttacgaacgacaatacttccgtgggaaaaatgacatatccggcactgcaaatcttattcttgtaatattctggcctcttgtcctggcaatcatcatcgtcactatcacttaccagtttatcaaatccctattcaagtaa

SEQ ID NO: 144779 - DNA, 951 bp, Enterobacter cloacae
atgtcgacaatcaatgatgtatcacgtcttgccggggtatctaaagccacggtatcgcgagtgttgagcgggtcgcgtggcgtaaaggaagccagccgtcaggccgtactgaaagcggtggatgagctgaactaccggcctaacgtgattgcccagtcgctgctgagccagtcgacgggctgtattggggtgatttgcgcgcaggaaaacattaaccagaccaccggttatctctacgcgctggaaaaacagctcagccagcatcaaaaacacctcctgctgcgcttcgcgcacagcaaagcggaagtgatgcacgcccttgaagaactctcctgcggcctgtgtgacgacatcctggtgattggcgcccgtttcccgctggacgtggatatggacaacgtcattctggtggactgcatggagtctgataactccaacagcatccagttcgatcacgcctttgccgccgaaaccgcctgtaactacctcaccagccaggggcgtcgccagattgcgctgatccacccccacggcagcggttttgccgaccaggtgctgctcggctacaagcacgcgctggagaaaaatttcctgccctttaatcgcagcctggtctttatggacgcgacttcttcgtccgttgcgctgcaggagctgcttaacaacgccagcaccctgaacttcaacgcgctgctggtggcggacgagcaggaagcccagcgggtgatcccgcagctgcaggcgtttaataaatcggtgccggacgacattatggtcttcagcctggccggatcgctgcacctgccgggtattccggtgatcccggcgattgaatattccatggacgcgatggcggcgcgcattgtgagctggctgacagagaaaacgcagatgctggggtcctatgttctgcgcggggatttgattattccggatatgcggaagcgttaa

SEQ ID NO: 144780 - DNA, 654 bp, Enterobacter cloacae
gtgaagacggccgacaacaaatgggatctttacactcaggacggcagcgttgccggttctacagcggcaaaagcggcgcagatgaactttgatgcgaacggtaacctggcgggtgtttataactacgacgctgcgggtgtactgagcgcaacgccaaacgccacgccggccattaacatcaccacgggttctgtcagcggtgcgacggcggcgaccttctccctgagtttccagaactccatgcagcagaacaccggtgcaaacagcgttgtggcaaccaatcagaacggctacaagcctggcgacctggtgagctaccagatcaacgacgatggcaccgtggtgggaagctactctaacgaacagtctcaggttctgggtcagatcgtgctggcaaacttcgccaacaacgaaggcctgaaatcggaaggtgacaacgtctggtctgcctcccagtcctccggcgtggcgctgctgggtaccgcaggcaccggtaacttcggcaagctgaccaacggcgcgctggaagcctccaacgtggatatgagtaaagaactggtgaacatgatcgtcgcgcagcgtaactatcagtcgaacgcgcagaccatcaaaacccaggaccagatcctcaacacgctggttaacctgcgttaa

SEQ ID NO: 144781 - DNA, 204 bp, Enterobacter cloacae
atgaatagtgaagatcagtttttcgcggagcttcatccgcaggtggtggagattcttggcaccgcagtcatgcaggttctggttgagcagcgagagccaaccagggaagcgctgatagaaatgattcaggtgctatggcaggaagatgatgtggacttggctgtagagctggctattgatgtactgagactgccgaaagagtag

SEQ ID NO: 144782 - DNA, 435 bp, Enterobacter cloacae
atgagtagtgccacagaaaccagttcaatgactgaagcaattcaagcatatatacctctgatcgctattgcgtggacgattatttcattttgggtaggccacttggttggacacaaaacagcattatccagagacaaaaggaaggaatttaacgccattgtatcccccattcgcgtggagttactaaagcagattaataccatcaaatcgggcgattatgaagcggcacacatttcgatggattcgatagttatgattgctgatctaagtagtaatcctaatagtatcatggacgcatacaaaaacttcaaatacgccaatagtcatgacgggctagaagtgcagattgatgagtatggagacaggaaaagcataaacacatcaaaagcattatcagcagcagaaaacttaattcgcctcattccgctacgataa

SEQ ID NO: 144783 - DNA, 336 bp, Enterobacter cloacae
atgaacgattacactaagcgagttcaacgccttgaggcggagcgcggtaagaccatcaccaccgaggtggagcttgtctcttacttcaaagaactcagcactggaaactctgaggctcgttactacgttaagcatagcaaccagaagacggttcttgagcaggcaatggtgataaacagagatggttttggtaatcaccaagcaagcatcatgatcactgatttcccagggcaaaaaactccggaagaagcggcgctaaaactggctgattggttaaagcgcctaggagagtccattgaggctaatttcaaaaagccagaggtggatgatgcctaa

SEQ ID NO: 144784 - DNA, 489 bp, Enterobacter cloacae
atgaggtgtcttgtgaaagaactttctgattaccttgaaataaataatagatcgccaagtggtcttgtatggaagaaatcgcctggcgcgaagattaatgccggagacccagcatttacgacagttacacgttcaggttattacgctggtaagttctgcggtgcgcgattgtcagcccacgtggtggttttcttcttacataatgggtttctaccaaaaggtgaggttgaccatattgatggggataggaccaacaatgatccgaaaaacctaagagatgtcagccgctctgtcaacgcgcaaaacaggaagaaagcaaagggctacagctttcataagcgtatcaataagtatattgccaccataaatgaacctggaactggtaagcgtttgcatctcggttactttgaaaatgagattgatgcaaggaacgcctaccttactgccaaaaggtcattacacattggttacgtaggagagcattcgtga

SEQ ID NO: 144785 - DNA, 369 bp, Enterobacter cloacae
atgggtggaaaggtgcggggcattcggcaggcgcaagccaacctgaaccggattatcgacgacatccatggacgtaaagtggttcgtgccattcagtcagcgttgattatcggtagcggtcaggctgcgctctatacgcctatcgacacttcaacgttgctgaatagtcagtttcgggagatcaacgcaaacggaactcgtgtgacgggcagggttggttacacggccaactacgcagtttacgttcacgatccaaatcacccgcaaaaattccgacgctcaaccgcccgtaaagagttcctcaccaaaggttttgaggatactcgctctgagatagatgatgttgtgcgtaaggagctttcgctatga

SEQ ID NO: 144786 - DNA, 381 bp, Enterobacter cloacae
atgaaaaaggttctattggttgcagcaataacagttgtgcttgccggttgcgcctctggcggcaataagtcgattgaacaagaaacgcagattggcgttcagagtaaaataatcaaaggaaagacgacgaagcaagaggttaaggctgcatatggagatccaactggggtatcaatctccagtgacggaaaagagcagtggcattatgttttcacaaatacacaggtcagcgggaaagcttttattcccatctacggactatttgataacggcgctactactaacatgaagcagcttataatcgtgtttaatggtgatgttgtagataattacttatttaataattcaaatacagaagttaaatcaggcctcctaaactaa

SEQ ID NO: 144787 - DNA, 486 bp, Enterobacter cloacae
atggacgcactttccaccggtcgcaggatcaagtgtcttacctgcgtcgatgatttcacaaaggaatgcctgacggtcactgttgcctttgggatttcaggcgttcaggtcacgcgtattctggacagcattgcactgtttcgaggctatccggcgacgataagaactgaccaggggccggagttcacttgccgtgcactggatcaatgggcctttgagcatggtgttgagttgcgcttaatccagccgggcaagccaacgcagaacggatttattgagagctttaacggacgatttcgcgatgaatgtttgaatgagcactggttcagcgatatcgttcatgccaggaaaattattaatgactggcggcaggattataacgaatgccgcccgcactccacgctgaattatcagacaccgtctgaatttgcagcgggctggagaaagggtcattctgagaatgaagattccgacgttactaactga

SEQ ID NO: 144788 - DNA, 654 bp, Enterobacter cloacae
gtgtggactaacctgctaaaaaatctgccgtggcgcagtttgcttctggcagtggtcataaatgcttttctgattggactttattacctgggctacgaaagcgggcatgaaaacgctacgcgcgacggcgataaggcggtcagtgagttgcagtcagcattcgacacatacaaaacggagcaggcaacgcgtgagaacgctgcgctacgggcctgggcaaaacggtatcaggaacaggttgccgccgggcatcaggccgaggccagttaccttgagcagattgctcagcttgagagccagaacaaacaactacaggggcaaattaacgatgtcacacagcgctggattgatgaaaaaggcaagagccatcccattgagtgcgtgtttactcgcggtttcgtgcgccagtacaacgccgcgctcggatatgacaacgcatccgtcgacgccggtcattcagacgcaactgccgccgctggcaccggcactcgcgcagcgtccgggcaacctgcagccgctgacgcctggctacgcgactcaggcgtctcccagcgtgacgtcctcgccaacatcatcgacaacgcgaagcagtgccgcatctggcgcagccagataaacgggttgctggacgaacgggaaggattacagaaatga

SEQ ID NO: 144789 - DNA, 276 bp, Enterobacter cloacae
atgagttcagcaatcaataagcccaaagcctcatacttaatggggataacctgcgatgagtatgaaactgcagcaaaaatctacacacttagcgtcaatgcagacaatctggcagaggcgataagagagatgcaggccgcgcttgagcaggtggagaaaacgccacgaatgctccctgaaaataagctaaaaggaatactcattggtcagataaaattaaccatttcccccaatcccaatagccatgcgaacttgctatcaggctcctgttgttga

SEQ ID NO: 144790 - DNA, 573 bp, Enterobacter cloacae
atggcgggtattcaggttattgcaggaaattttcccaagggatgggcaagttttggctttggcactattgtcttcggtaaaaaacctaaacaaggcttccctgatgctattgtgctgaacccgaaggaagagctgctatcaattgaaattgcagacagtgaggtggaaagccgcataggtaaggccacaggcacaggtatccttggtgggctaatatttggtggcgcgggtttggtcattggaggcttgcttggcgcagcagataagacaaagaagaccataacatttaaagcggcattcacggggaataggcagcttctagctaaaacggatgcaaaaacctttttaaagctgcagtcaatcgctttcgataacgcaaataatttgcctgtaaccgataaggtccaggttgaaaatttggatgctccagctgaaaatccatcgactaaagagctggatttatccccttctgttgctgtagccaagatgacatctaaagataagcttgagcttgcggttggcttggtcgtcatcaccttagttatctgggcagtgattcacttctttttttag

SEQ ID NO: 144791 - DNA, 189 bp, Enterobacter cloacae
atgactgcagaccaagtcaaaacgcacttccgccagcggggaattacattcacccagtgggcagaagaaaacggctacagccgttacgaggtctaccgcgttctcaacggtcagaccaaggctcgttacggtaaatcccatgaaatcgctgtgaagcttggacttaaatcagcagcccaagccgcctga

SEQ ID NO: 144792 - DNA, 930 bp, Enterobacter cloacae
atggctcgcacaaaatcacaacatgctgaacttgcacctgacgtggagctaaatcccgaactgaaagcgactcaaaatctgatggcgacagttaccagccaactcagtgatgaacgtgatctgctgaatcagcttcttggtcaggcacagatggctgatgcatttgagcaattttcccgaacggttcggacttctaaactggcatttgttaaagaaaacaagctatatcgcaatctaaagggcaagaaaacaccgaacggttcggagttttcgggcacatgggatgagttttgtaatgttctcggaatctccgttgataaagcagatttggatattgccaaccttaccgccttcggtgaagaagccttagattccatgtcccgcatggggattggttatcgcgaactgcgccagttccgccgcctgccggacgaccagaaaagcgccctcattgaagtagccaaagaaggcgacaaaacggccctgctggagctggccgaggaaatgatcgccaagcacaccaaagagaaagaagacctcaaaaccgacctcgaaatcagccgccagacgctggccgaaaagaaagatgagatcaacgttctcaaagatcaggctgacgaactcaaggcgaaactgacgcgccgtgcaactacagagacgcctgatgaagaaggtcaggcgcttgaaacggaagccactggctttaaaagcggcgtactcagcgctcttatcaacctcaaatgcggctttgaggcactggccgaacacgcagaacgtaccggcatcagccacacccatatcatggcaggactgcttgatgatatcgaagcccgtgtagtcgacatgcgtcaacagtttgacctgcctgacttccgcgagattgacagcatgccggactgggtgaaagaagcacaggaagaggatgaataa

SEQ ID NO: 144793 - DNA, 285 bp, Enterobacter cloacae
atggatagcccggaagttcttggacacgcgctatgcactcttgtaccagacatgatggagggattctgcatcctgaccagtactggagaaatcaggatttcagcacccgatgcgcctgcatttgccaccgcaatggaaacgttacttctggaaaaaattcactatatccaaaacgaacgctgtcgccgttctgccaacaaacgggctgttgagattgcggagaaacttcacgagaacagtgagaaatggaagcaatggcaacaaaaagcgaaggctgaatcatga

SEQ ID NO: 144794 - DNA, 1794 bp, Enterobacter cloacae
atgaatccagcgctgacgcaacggcttgtcagcatagccgccgccgctgacgcagccggacacggtgaaaaagaggcggtataccgggcggcgtgtgaagaactgcagatgtcacgcgccaccctgctgaaaaagcttaagggggtacggatgagccgaccacgcaaacagcgctcagatgccggtaaaactacgctgacccacgatgagatgctgacgatttccggggcgtggctggcgtctccccgtcccggaaacggtaagaaaggctacagtctggaggatattgtggacggattacgcgataacaacctgattattgctggtcgtaccgatactgataccggagaatttttcccgctgtcaattgacgccatcagccgtgctctccgccagcatcgtatgcaccccgaccagttgcgggcaccatctcctgctctggagctggcgagtctgcatccaaaccacgtctggcagctggatgcgtccatctgcgtgctgtattacctcaaaaatccggccaaaagggcaaaaggggacaccgggctgcgcgtcatgagcgcggcagagttcaacaaaaacaaaccccgcaaccttgaccgtatcgtcaatgaccgggtgtggtcatttgaaatcaccgaccacacaacaggctggatttacgtcgagtaccgctttggtggggagagtgccgtcaactttctggaggtgatgattaacgccatgcaggaacgtggcagtgctgacgtgctgcacggtgtgccgaagattctgtttactgaccccggctctgcgcttgtctcggcctcccttctcaacatgtgccgggcgatgggcattcgcaccattcagcataaggctcacaacgcccgcgccaccggttctgtggaaaaggcccgtgacattattgaacgcaagttcgagggcggtctgcgctttctccgggtggatgatattgatgaactgaaccggctggcgcgtctctggcgtatgaagtttaaccgcaccgcaatccacagccgccacagcatgtcgcgtaccgatgcctggctgagaattaccgaagagcaactggtaaaggctcctgcacctgaaatctgcagagaactggccatctccgcacctgaagaacgcacggtgactggcaagctgcgcgtaccgttcagaggcaaggaatacgatgtgtctgacgttcctggtgtgttcgtcggtgacaaggtactggttgcacgcaatccgtggtcagacgaggaagcgcgggtcgttatcgtcaatgatgaaggatttgaaaccttccacgttattcacgcgatacagaaagatgaactctggcagtacagcaccagcgcaccggtgattggtgaagaatatcgacagttgccggaaaccgttacccaggcaaaccgcgatcaagtggaacagcatacctacggcaccgccagccaggaagaaaccgaggcagcgaagaaagacaaagccctgccgttcggtgggcgcttcaacccttatctggatattgagcgcgatgaccacccgacctacctgccgaagcgcggtcaggcttcagatgtgcgcgggccgcgtattgagcagcgtccgctgacccatgtggaggcggcgaaagccctgcgcgagaagttcagcgctaacggccatacctggacgccggaacattaccgccagttaacggcgcagtacccggatggcgtaccggaagccgcgctggatgaggtgatggtcaccctgaccactccggcccgcagcagcgttatcagcatcgttaacggcaactga

SEQ ID NO: 144795 - DNA, 330 bp, Enterobacter cloacae; identical to SEQ ID NO: 15599

SEQ ID NO: 144796 - DNA, 198 bp, Enterobacter cloacae; identical to SEQ ID NO: 99876

SEQ ID NO: 144797 - DNA, 624 bp, Enterobacter cloacae; identical to SEQ ID NO: 99875

SEQ ID NO: 144798 - DNA, 207 bp, Enterobacter cloacae; identical to SEQ ID NO: 99874

SEQ ID NO: 144799 - DNA, 459 bp, Enterobacter cloacae; identical to SEQ ID NO: 99873

SEQ ID NO: 144800 - DNA, 492 bp, Enterobacter cloacae; identical to SEQ ID NO: 99872

SEQ ID NO: 144801 - DNA, 465 bp, Enterobacter cloacae; identical to SEQ ID NO: 99871

SEQ ID NO: 144802 - DNA, 3960 bp, Enterobacter cloacae
atggcagaagctaaagcgaaaaaaccatttcatgagattgtggctgaaaacctgatagcccagctcaaagagggtacggcgccatggcagaagccatggaatccgggcgcacctggtgccgctcttcccatgaaccctaccaccggtaaacgctataagggcattaacgcgattcaccttatggcgcagggttacagcgatcagcgctggatgacctataagcaggcgacagctgcaggtgcgcaggtgaggaaaggcgaaaaaagtacgcatgtccaatactggaaattcactgaggaacgtatcaagcgcaacgatgatggtagcattgtgctcgataaagatgataagccggtaaaggaaaccgtccagctggagcgtccgaaagtatttattgcctcagtgtttaatgcggagcagattgacggtcttccaccaatggccgttcgccaggataagagctggaacagcattgaacgtgccgaatccattcttgaagcctctggcgcgaaaatctcacatgaccaggtagaccgcgctttttaccgcatgtctacagacagtattcacttaccgcagcaggccgcttttccaagtgccgaccgttactatgccactgcacttcatgagctgggccactggaccggtcacgcctcacgccttgatcgtgatctggcccatccttttggtagtgaaggttacgccaaagaggaacttcgcgcagaaattgccagcatgatcatgggcgatgagctgggaataggtcatgacccttctcagcatgtcgcttatgttaaatcctggattaaagccttgcaggatgatccgctggaaattttccgtgctgcagctgacgctgaaaaaatccagggcttcgtgctgggccttgaacagcagaggacacaggaacaaccggtaacgctggaaacagagctgcgcgtaaaagagcataatgaggtcttggccgaggtacagcggctgactaatccgcagattttcgatgctgaaacagtgcaactttaccatttcactttcatgactctggagcagacagcggaggaagctggttacgttacctattacagtcgtggcactggtgagctgggcgaagaaaccattcgtgttaactacgaagacagtaacggcaatactattcctgttcatactgatgtggttgggcgcggaaaagcgttgacgtatatcggtgatgaacgtgtacccggaacgggattctcttctgataatgaatggcaaagtaatgcccttaaaaccgcttttgccagcatagataacaacctgactttagcggctaaaaaggttcagagtcagattgaaaatatcagtggcgacccgcgagaattaccgcaggacgctaagtttcctaaaaactggtggcctaattccagttttctggcgtcaaaacctaatggagaatcttccgcagcgcctgcgtcagaagaggaatcccttgaggtttatcgtgaaaggaagagggcagaattatttaacaagccagcgcttcccaaggaactacaagaacagctgaaggaaaacattaagcggcatgctgacgccatcgaaacggggcgcatcaatatgagcactaaacctgaaacgtctgttacacccgaacagcagcggcagtatcgtgctgagaaattcattctttctaatctcgatagtggcctttctaagcacgtccagaatatgaaccgtcgccagcttacactatcgcgtaacgtcctctttgatgcacagaacagcaatcaggatagtgatttctggaagcgtaacagcgaatttcattcttcattcagtcagaactggaatgaggctcaggacaaaattaagagcgcatatcgtgagcttgatttagcattaaccctcctgcctgagccgaaatataccattgtggaaaatcccggccagaatgagcatgtgaatatcatcatgcagaccaacagcgcggttaaggcgctggccgccgttaacgaaggggataaccgttcaatttatgactcacgtcttatcgataacggtcaggtcgatctgaatgacctgcagaacaatttttaccaaacgcttgaggcagaaaaagcagccttaacgcaaggtgttatcaagcctgatgatgagattagcgtactcccgccaggagaagcgcaggaatggtatcaggaccgtgttgaaagcctgatggagggtgctgacagcccggatgaaatgaaacgcgctctggatgcgctggggccggaaccgggcgataatgaggctgttttccttggtgaagacggcgggcgagttctcccggaattcagcctgaatgttgcgcaggaaaataccccaatcaatgtaccctacaaagaacgcaatgaagccaaagcgcttggggctaaatgggatcgaaccgaacagacctggtttgtaccaaaaggcgtatctcttgataaatttgcaaaatggagcggtgagccagctgctgctgcagaaaaaaatacgccggttgcatctgtgaaagacgtaacgccagaagtgggtgagcgtcaggatctggccgtcccttacaaagatcgtgcagaagctaaagcagctggcgctaaatgggacaaagagaaaaaaacctggtacgccgaagccggggcagatatggaaaaactggcgaagtggaaacctgaaaatgtggtgatcgagcagtcaccggcaatgacactgcaggaggaagtagaaaccgcgctgaaagatattgggtgcatcctcgatgccgatactgaccggggccagaaacatccaattatggatggtgagaagcatcggatcacggtagagggtgacaagaaaggggagaagtcaggtttttatatcatccacactgacggtcatcctgcaggctttatgcagaacaaccgcaccaaagaagagttacgctggtcttccaaggggtatgtgcagtccgacgaagaaaaagcgctcctgcgggcgcaggcagctcagaaacaggccgaaaaagcggcacagcaacaaaaagaccatgagtcctctgcaaagcgtgttgaaaagcagctcgccaaactcaatgaacctcagcagcaaactgcttacttggagaaaaaagggctgcaggtgcataaaggcgtgttcacagacaaggaagggcagaaaacctttatccctgcttatgatgtccagggtaagcaatggacgatgcagtacatcaacgaggacggcacaaaacgttttgccaagaacgcccgtaaagagggatgtttccatgtcgttggcgggctggacgcgcttaaagaatccccggtgctgatcgtggccgaaggttacgcaacggcagggagtatcacagaggctactaatatgcctacggtcgccgccttcgattcaggtaatctggaacctgtcgctaaagcacttaaagaagcctaccccgataagccaatcatcattgccggtgatgatgatatttctcagtcatgcaaaatgaaggtgaaggataaggccagtgtaaacgttggcagggaaaaggcgctggagacagcgaaagctgtcggcggtgtggcggtgttcccggtatttgctaaaggtgaagtacctgggaaagacgaactcagccagattaaaccggcggcgtatcttgctcaccagaccgcctcgcgcaaactggaggctcatacgagcggtgataagccactcccggatgccgaagtgaaggtactgcaggcagcgcaactatcggaaaagcagcttgatattattcgccgcgctgatcgttacactgactttaacgatctggccgtaaatagttctcttggccgggaaggtgtggcgatgcagttgaaagccgtcattgctgaccagctgaataaaaaacagcagcagtcacaggtccagaccgaagagaaaaaactcgttcaggaaaaagagaaaaagcggaccattcgccacgctatgtaa

SEQ ID NO: 144803 - DNA, 186 bp, Enterobacter cloacae
atgactgacactaacgcagtaattcgccctgatgttaacgacgcaatacaggacaaatatcgcgatctgatgacaccgggatatgtagccgagttttccccggatgaagctgatcttgcgggagcgttcgaagatgatgcactgaatgcgcgtgacgcatatgaaagtgcttttgatgcggagtaa

SEQ ID NO: 144804 - DNA, 2028 bp, Enterobacter cloacae
atgagagtattcattgcagaaaaaccaagtgttgcgaaagctatcgctgaaatattaggcgcaacaaataaaaaagacggttacattgagtgcggtagtgactatgtgacctggtgttttggtcacatgtatgagcaggccgaaccggatgtgtatacaccagataatgtaccgcgcaatgagagcggcaaaaaaatctggcgagaagatgatctgccaattatcccggaaaagtggattattaaccctcgtgaagatgcagagaaacagctgaaaaccatccggcatttggtagaacgggctgacactattgttaatgctggcgacccggatcgcgaggggcagttactggttgatgaaattcttgatgacatgggatgcactaaaccggtcctgcgttactggtgtaatgcgaacgatacggtaagtgttaccagggcgctgaaaggtctggagagcaacgataaatatgtgaattttggtcgtgcagctcttgcgcgtggccgggctgactggttggttggcatgaacctttcaagaggattcacactgtcggcagcgcgtggtggctcgcgtgttctgttgacggtcgggcgagttcagacaccaacgctggcgcttgttgttgcccgcgatcttgaaattgaaaacttcaaaccaattccgtatcacaatatcaaagctgtctttaaacatgataaaggggcgtttgttgcgggatggcaggccagagaagatcagcctggtcttgattctgagggaaggctgattgacacaaaagaagccgacaagttagtcgcggctttaaccgggaaaaccggtaaggttgtggaatataagcaagagcctaagaaaaaatatcaccctaaagcctattctcttggcggtataacaagtgttgcttcaagcaagtttggttattccggtgagcaagtgctggctatatgtcagtctctttatgaaacgcataaacttaccagttatccacgttctgatagctcttatttgcctgaatctcaacacgcagatgcgcctcaaattctggattctcttcgggctacttatccgggaataactgccctaatcgataaggctgatccaaaagtcaaatcaaaaacttttgatgactctaaggttacagcgcatcacggcattattccaacgatgcacaaaggtaacgttgagaggcttacgccagaagaacgtaatatttacgatctcattgtaagaacatacctggctcagttttatccagtgcatgaatataaagcgacgacaattattattgatgtaaatggtgaaacgtttggggccggtggccgcgtaaccactaaaaacgggtggaaagacgtttattcagatggagaggatgaagacgaagaaaatgagtctgaacagtctcttccatcaatgaaaaatggtgacgaaattgtttgtgctcaggcacagcgtcaggatgccaaaactaaagcaccacgtcgctttaatgacggtacgctcaacaccgcaatggaaaatattcataaatacgttgaagacccggcgcagaaaaaattactgcgagaaggtgatggtatcggtacatcagctacccgcgccacaatcgttgccgagttaaagaaacgtggctttatcgaaaacaaaggcaaagacattatcagtaccaggctgggaagggggctgatagccattctgccagaactggttaaaagcccggtcatgacagcaatcaacgaacgtatgttgctggaaattgaacagggcaaacgtgatgttgattcctttgtgaagatgcaggaaaaatttgtacgagatcagattaaggttattaacgctggtgctatcaaagttgccggtggtgtgcaaatttctgacaagtacaaatgcaaggtatgcggtaaagggcttattcgccgtccgtccaaaaaagccggtcacttctggtcctgcagcggttatcccacctgtaaggagtcttacccggatattaaaggtagtccgaactataaccccgtaaaacgcgcttaa

SEQ ID NO: 144805 - DNA, 330 bp, Enterobacter cloacae
atggggttatttcataagagtgcggagaaggaaaagttagaggcactggaaaaagttatttcaaaaaccaatcggggcatttttaaacgaattgatgaaaatcgcgaactactcgaattgttatatgaaaaagcaccagaccttatggataaatgtttctggattcgatgctggattgaatctcaggatgaatttttaagtaagttggcagaggtttctggcgtggaaaatcgtacctataaccttactcctgataaaccttatccacgcccttttccgaaaaaaccagattgccttacggattcttcgaatgaggataataccgtatga

SEQ ID NO: 144806 - DNA, 534 bp, Enterobacter cloacae
atgaaaaaagtgacccggtacgctgccattggcgttatttcagcttcattgattggtgcagttgtgtgtggccttggatatgccgccgggttacgcatcaataccacgaaaagtatccctgttgggttgtacaaaatcagccagaaagcgccagagaagggcgactatgtaattttctgcccgcctgaaaaggctattttctccctggcacagaagcgcggttacatcggcagcggcttttgtcctggggggtatggcgagatgatgaagcggattttagcggctaaaggcgatgaagtcgcttttcgtgatgatggtgtttacgtcaatggacagttattgccttacagcaagccgttaagtgctgatccgggcgggcgtaaactgcccgccattcgtgaagtgtacacgttgggtaaatctgaactgttgctgatgactgaccgcagcgcatcatcatttgacgggagatacttcggcgcggtcacaaaatcacagattatttctacggtattacctgtaatgacctggtaa

SEQ ID NO: 144807 - DNA, 1947 bp, Enterobacter cloacae
atgagaaagcctaataacgctgtagggccgcaggttcgtaataaaaagaaaactgcgagagggaaactgatcccggcgatggccatcacttcactggcggctggcatccaggctgccacacagtattttgcttacagctttaattatcaggaactgctggggccaaacttcaatcacatctacgcgccgtggtcctatttcaaatggtattcagcatggcatgaccgtttacctgatgcgttttttgcagctggcagtgtcggagctacggtcgctgccggtggtctggtcctgactgcactgacaagtatgatgaaagcaaactcatccaaggcgaatgaatatcttcatggttctgcaagatgggctgacgaacaggatattaaagctgctggcctgctggggaatgatgaaggggtttacgttggcgcatgggaagacaaaaacggccagctgcagtatctgcgtcacaacggcccggagcacgttctgacatatgcacctacccgttcgggtaaaggtgttggcctggttgttcccaccttgctttcctggaaacattcaacggtagtggctgaccttaaaggtgaactgtgggcgatgacggcgggctggcgtaaagaatacgccaagaatctgtgtctgaaattcgaacctgcagctgccaatggttccgtcgcctggaatcctctcgatgaaatccgtgtgggtactgaaaacgaagttggcgacgttcagaaccttgccacgctgatagttgacccggacggtaaagggctgaacgaccactggcagaaaacatcacaggcgcttttagttggtgtgatcctccatgtactttacaagcacaaaaatgatggtacgccagcaacgcttccgtatgttgattccatcatggccgacccggaaagaggggctggggaactgtggatggaaatgacgcaatacggccacgtaaacggcgagaatcatccggttgtgggtgcagctggccgagacatgatggaccgcccggaagaggaagccggttccgtgctgtctactgcaaaatcttacctcgcccttttccgtgatccggttgtggcccgcaacgtcagcgagtcacattttaaaattaaagacctgatgaaccatgacgatccggtttccctgtacatcgtcactcagccaaatgataaagctcgtctgcgcccgctggtacgaatcatgctgaacatgattgttcgcttgctggccgataagatggagtttgagcgcgtcaataacaaccttacgctgtggcagcgctttaaacaggcgtttggtttttctgtccagggaaccaaaagggtacagacgaagaaaacctacaaacatcgtcttctggctatgatcgatgagttcccaagcctgggtaaactcgaaatcattcaggaatcgctggccttccttgcgggttacggcatcaagttctacctcatctgtcaggatattaaccagctgcgtagccgtgagacaggttacgggccggatgaaacaatcacctcgaactgccatgtgcagaacgcatacccacctaaccgtaccgagacagccgagcacctttctaagctgaccgggcagacaacggttatcaaagagcagatcacaaccagcgggaaacgtgccagcgcgatactgggtggcgtgtccaaaaccatgcaggaagtacagcgcccgctgctgactgtggacgaatgcctgcgtatgcctggacctacaaagaatgcagaaggtctgatcaccgagcgcggcgacatggtggtttacgtggcagggttcccggccatttatggaaaacagccgttgttcttccaggatgaaattttctcgcttcgtgcctcagtacctgagccaaaaactaccgaccgtattcgcgccgcagttgctgcgaatgatgacgccagtaatgaggctatcgcaatatga

SEQ ID NO: 144808 - DNA, 156 bp, Enterobacter cloacae
atgaaagaaaaagaatcaacaccggtgttgtgtgaatcccctaaaggagtggggatagtgatcccacttgtaacatcttggccggattcagtcgtagtaatggatgtcacccatgatgactggaagataaaagaggaagccaatgagaaagcctaa

SEQ ID NO: 144809 - DNA, 477 bp, Enterobacter cloacae
atgagcaaagacgacaaagatatgccggaacagaacgaaccgatgcaggacgagaacgaagcggcaatggcaatgctactggagcaaatgagccaggagtcacaggacgaagcacctccgctgatgccggaaacggatatggaaccagcagcagcagaagacgaactggcacaggcgatgctgttactacagcaggaagccagccaggaaggagtgatgacacccgtacagggagaagtcgagcagccgaaccaaatggcgaacgaggacatagtaagcccaacgttgcgcgacctggacgccagccgccgcccacagcaaaaaaccgtctgcgagcaatgtccgaactcggtatggttcgcatcgccggaggaagtgaagtgttactgcagggtaatgtttctgaccagctggagcacaaaacagccgaacgtgctgatcaactgcgacgggatatggctggggcaggaggaataa

SEQ ID NO: 144810 - DNA, 207 bp, Enterobacter cloacae
atgaagaccgtcatctccggcatcgcgggatacatccagacgtttaccaccgtcacggatagcactctctcccacgcggtaaataatcgtcccttccttcgttacgctgtccggtttgagtccaggaatacggccatcttttttgactttatcgccatgcagaatgttggcctctttacgggcctgctgtgcattccgctggcgtaa

SEQ ID NO: 144811 - DNA, 357 bp, Enterobacter cloacae
atgacagagaaacagacacggaaaaattgcacgccgatcaaggtgtactgtctgccagaagaaaaattgcaaatagaagcaaatgccgctgcgacaggtttaagcgttgcggcctttttgcgaaaaattgggatgggttatgaagtaggcggcattgttgatcttgaacaagcgcgtgaaatggtacgcatcaacggcgaccttgggcgtcttggcgggttattaaaaatgtggttatccgatgatcctcggactgcaaatttctctcccgctgttttgaaaacattgctgaccaaaatcgaaaagactcaggatgagttacggactgttatcggtactgttttaaacgataactaa

SEQ ID NO: 144812 - DNA, 549 bp, Enterobacter cloacae
atgccgcatacaccggaaaaccaacgttttccgggcggtttacaactgttatcctgctcaaatacacacggaaatacacagaaatacctcataaatacacacgcaggttgtcggatgggaaaagactatttaactgacctacaggagtgggttaagcagaaaaaggggctgaacggcaagagtgcaaacagcgcgagggtagtcttcctggcaatccgggaagacgtcaaaaacgcgattgaagccggttactctcttacaacgatatgggaacacatgcacgaaactggtcgtgttaataccacatacgaaacttttcgtcggcatgtccggcgatacatagatgagcgaaaacgtgcagctgctgttggcgaaagtacacctgctggagctgcggtaaagaaagaaagccaacaagccggaccgtcaccaaagaaagaaaacgtgatcccggagagaacgccggtcaaaagagagccgcctacgaatcccggcagtcagctgccaacttttaattttaatcctggaaaaaagaaggggactaactaa

SEQ ID NO: 144813 - DNA, 786 bp, Enterobacter cloacae
atgcctactgcagacaaaaatcaaaaacaaagtgaagctgaatcagtgccggtacgccatgctgttcacagcgcccagcaaggaaaaggtggttgtggtaaatccgttagtaccgctttgctgggaatgtacaagattagcaaaggtgaactaccgctgtgcatcgataccgatccgctcaatccgacattctctaattatgaaaaactgaacgtccgacagctgaacatcatggaaggtgatgaaattaatcagcgcaaactggataccctcatccagtggattgatgaagccggtgacagggacgttattatcgataacggcgctccgtcatttattccgttatcaagttatatgattagccagcaaatccccgccctgctttacgaaatgggtaaacagcttgtcattcatatctcgattgtgggggggcaggcacatgattacaccgtcgaggggttcaaggcgatggtggagcagtatccgtcagaaacccgttttgttgtctggcttaacccgtattggggcgcggtggaatccgatcagggagtgccattcgaagaatcagaagcgtacctgatgaataaagacaaggttgatgcgcttatccgtttgcctacgctcaaaaaagagttacacggccaggactttgccgacatgctggaaaactacaagaccttcgatgaggccattgaagataaatcattatctattatggttcgccagcgtctgaaacaggttcgcgcccttgttttcgaacagcttgatttagcaacggtgatctga

SEQ ID NO: 144814 - DNA, 441 bp, Enterobacter cloacae
atggatgataagacggaagaactcattgcgctcattgctaaaaagcatggtatagcactggatgaaaccgatccgattatggtcgttcctaccctgcttcggtatttgctggatgaaagccaggagaaacagggagaaattctggatgagtttaaatccgagctacaaagcgccctgatgcaatgggattacagcgcgaaggataaggctgaccgtatccttaacgccgcgctaaaggccaatacggaagtaatggagcgtgttttgacatctgcagctacagaaaccgctgccataatcagaaaagaagttcaggacgagatcagaaaatcacggtcgcacataggaggggcaagaaaacttgccatgatgaatatggcagcagcggtgatcaccttaatggctgcagccgtcgcattcattgcaacattttacaagtga

SEQ ID NO: 144815 - DNA, 234 bp, Enterobacter cloacae
atgcaaaacgtgacaatgatggaagaaacactgcgtaaaatgagaaaacatggtagccagactatcgaagtaacacagtctttggaagcctttggccgctataaatcccgccctgctttccaggactggatctaccgtttgaagaaaggcgaacgcttaccacggggccgttactttgtaggcaaaaaaccaggtcgcccatttcaaatcatcgacgaggttctttaccgttag

SEQ ID NO: 144816 - DNA, 681 bp, Enterobacter cloacae
atgaagccaactaccccatttaaaaatcccggcgcggtccgggatacctccccccctcgtcagcagcctgatattaaacctgatcttatcgcagagtcggaagctgtgaatatccaggaacaggtacagcagttgcatgacgagcagcagcagttgatcaatgacccatcccatttacaggattcgcaaactgacgccggtaacatcgagcaggaatataaggatgcggtagaggcggcagtagcggataaagaaacgcaggcagaaaaccttgaaaaccggctggaatcgctgatagacaagcaggaggcggttctgcagcagatgatgagtcgtcagcctgggtttttggctctgcccggccagaaggcaaaatggcagtcacaggtacaacaacaacagtcattgctgagtcgcctgcagaatcggctggaaactgtcaaagagattcatgacgggatggggttacatggcccgcgtttacacgaactggcgacggccaaagtgcggcatgataaaccagagcttgccgaagaatgggatgaaatgcgggccgcacagcgagcgcatgagaatctcatgcggaagcaggcgaaagaacagaaagaaaagctacaaagagagcaggctccatcactaagtaaagggaatggtctgagccttacaagaacaataacttga

SEQ ID NO: 144817 - DNA, 1014 bp, Enterobacter cloacae
atgagcgacaaaaaagacccgtatctgtatccgggtactgatacccttatcaacaacgctgggatcagggataaaaaacagcttgaagagtttgagcgcgacacagtagcgcttaacttatcgcagctggaagaaagccctatcattggtcctttcgacaagcagcgcctaaaagaaactcacaaacgtatttttaacggcatttatccgtgggccggtgaattccgggaaaataccgggatgatggtaaaggagcgtttaggtaatcaggtgatgtacgctgattcagcctacattgaacctgagctgagtaaactttttctctccatggagaaagagcaattctttcatggaatggaccccgaaaaattttcagagcgtctagggcattattacggcgagttggatgctttgcatccattcagggaaggaaatagccggacgctgagacagttcacgtcagacctggcattaaatgccggtatgaacctggactggtctatggtggcagcagatgatgatgcaaggagaaaactgtatcttgcgcgtgacgtggccgttatcaacgcagattcatccatgcttgctgacattataaaaatagcagtcagccctatcccgacacagacggttgacgataacaccaggagtaacaccgacatgagcaaacagcgtgttcttgtcatgaacggccagcgcgtgctgcaaagcgaagaagcaggcaaatggaaaaatgacaacgttgataaagcgggctgcataaagccaggcatttacccgctttatctgtccaaggggccggataaagccagctcttataatgggccgattttacacgcagataaacaatcagtatatcagcaggtaggtaagcagattttcaagcatgatcgccaaaatttcgataaactgccagaagtaggtacggaaaagagtatttcgtatgaccagacttccggtaaagctcaggtagcagcagccacagagaagcagggccggaagttctccagatag

SEQ ID NO: 144818 - DNA, 198 bp, Enterobacter cloacae; identical to SEQ ID NO: 27304

SEQ ID NO: 144819 - DNA, 1014 bp, Enterobacter cloacae
atgactaaaaaaaattcttccggccttggccttgataccgttggtgatctctccgactttcttgatgcgtctgcaggtgctgagggtaaaccactgatgctggacgttgacgcgattgatcccgatcctgaacagccgcgtaagcaggacaacccaggattctcagaggaatccattaaggagctggctgataccattaaagcgcgtggcgtgaaaatgcctgtctccgttcgtgagaacccggagcaagcggggcgctatatcattaaccatggagaacgtcgctggcgagccagtaaagtggccgggaataaacaaattcccgcttttatcgataatgactatagcgacgatgatcaggtcattgagaacatccagcgtaatgacctgacggcgcgtgaaattgccgtacacattggccgcaaactggctgagggagtatcaaaatctcagattgctaaaaggcttggcaagtcgccagcgttcgtaacccaacacgccgcgttgctggacctgccggattgtatagcagatgcttttaataaaggctcaatccgtgatgttaccgtagttaatgagctggtaacggcttacaagcaagacccggaagaagttcaaaaactgcttgaagagaacgagggtgaagacattacccgtagtgcggtgaaagttttccgtgagttcctggacgaaaaagaatccagcaagcgtgatccagacaccattgacgccttcaatggccgtaccgattcggaagccgccgaggatgatacggacggccacgatgataacgatgtgaccgataaggtccgtaagacgccagaaaaggaaaccgatcctgataaattcaaaaaggctattgttatcgttgagtacctgggggagcagggccgccttatcctgaccaagcggccaagtgaagaagggcttgcctggattaagtttgattcaactggtgtagaagaagagctaaatctcgaaaacgtgaaaataatttgccttattgaaggataa

SEQ ID NO: 144820 - DNA, 765 bp, Enterobacter cloacae
atggctatgaaagtattggttacagcaaatcaaaaaggtggtgttggcaagacttccaccctggttcatctggcatttgatttttcagaacgaggcaagcgggttgctgtaatcgatatggatacccagggcaacgcctcttttaccctgaaacagttctcgtccggcattaaagcgaatgaaatgtggggcgagatcgagccaactcgctttacccaaatgcctgagagcggaatttctctcattgagtcagatattcagctggcaaacgtagaaaaattaaatctgcccgaaatggtgaagcagttccgccataacctgcagcagctggccgacagtggctttgacgtctgcctgattgatactgcgcctacggttaacaatgcgcttatcgttgcgctggcgagcgctgattttgtggtatgccctattgagcttgaggtgtactccattcagggtattaaaaaaatgctgaccaccttcacccaggtgaaacgcaaaatgaacagcaagctggaatttattggtatggttccaagtaaggtagatggccgcaatcctcgccatgtaaaccacctgcaggagctgcagacggcctaccctacgttaatggttcctgtgtctgtcgggttgcgaagcagcattgctgatgcactggcttcacatgtccctgtctggaaaatcaagaagacagcagcacgtaaagccagccaggaaatgagagcactggccgatcatgtttttactaagatggagattgcataa

SEQ ID NO: 144821 - DNA, 354 bp, Enterobacter cloacae
atgacgactgttaatagtaatgacccgcacgttgccaaaactggcgatgaaaaaagtgaaaaaaaacgcctgactaatgaggtatttgcaagagttacccgaagcctgaatgttggtaagcaaacgcttgatatcgcttacggcgtactggttgaagggaggccgcagaaatattttgttgaaacgctgggtatttctcgcggggctgtttctcaggcagttaacagagtgtgggatgcctataaacaagaagtacctgacggctttgtgcgtattgaagtggtgttaccggagcggcaggctttcattgttaaaaagtgggctgacgaggcaaaacgtaaacaggaagaatag

SEQ ID NO: 144822 - DNA, 891 bp, Enterobacter cloacae
atggttaagaatgacagtatcgggcaggaggtatctgcccttgataaacgtacccgcactatcagcagaagcggtatcgttttacttatctcagggctggtaacactggtcgttgcgggagtaggctatgccatttcgcgtttgttaagtccgggtattaatgattttatgatagatgtaccggggctattgttaccttctgccggtcatggagaagcaagtgatgtgttctcatctgcaatgccattcacatcagcgttctcaggctatctttcatcgccactgttcaccgctatcccggtggcgattgttcttgtgtacgttgcttttaaggtgtttgacggggaaggtgtaacgtccgttcttcctctattgggaatccttcccgtcatcttcggagccaagatgatattgagtacgttaactgaaacgccagaagatgattcctcttcgccgacagaagtagtcaggcagcttatcaaggatgataagccagcagagcttgttacctatcttgaaaaaatcagcggccagactccagaaaccgccaagttacttgattacgtcaaagcgcaggccagtatccgggaaaacaaacccgatatcgatctggtcaggaaggttgtagccgactatcaacgtaatccagctgagcctgtccctgctgatgtcagatacgggcttgaaatgactgcttttaaggaaacaatcacgccaccggctacccgttatgcgcagggaaaactgaaaaaggcacgtttctttacctctgtttcatctgcaggattttcgattagtgggattcttgttctcctcggaggcatgttattcctgtggggggcgcagatgaaaaaacgagtagctttcatcaaagatgttgcactgaaataa

SEQ ID NO: 144823 - DNA, 1113 bp, Enterobacter cloacae
atgaatactcaaactgccaccaatacagcaattacgccgtatgtcattaatgcaaccgaactggaaaagtttggtttacgccaggaagatgaatctgagattcaggctgttgccgagcgtattgatgccagcaacccggacacggtgtatcagtttggccgtgatgttgcggaaaatactgcagcttatgcagatagccttttggaacagatcagaaataaagatctggatgacgctggctctaagctgacggaagtcgtcaacctggcccgcagcgtgaatgtttctaacctgacggaaagccgttctaacctgccggtcatcggtccgattatcaataaaattcgcacacggggtaaaaatttcgcggcacagtttgattctacccgcgagcagatagatgcgctggtatctgaggtgtctattacgcagcgtagcctggctgctaataacggtgcattgcagcagatgtttgaagaggtggtaaaagaacatcaccttcttggcgtccacattgccgcaggcaaggtccgtctttcgcagctgcagctgcaggctgagaagctaagagcgagtgtcggaaataaccctgcctctttccaggaagtagccgatctcgatacgctgatttctaatctggataagcgaatcggagatttgatcgtgtctcagcagtcagccatgcaggttctgccgatgattcgtatcatccaggcgaataatcagaaccttgttgataaatttcatagcgttaaagaaacaacggtcccaaactttaagagacaattcctgttggctatttccctgaatggtcagcgtaatgctgttaacctggcgaatgatattgataacgccaataacgaactccttcgcagtaacgcaaaactgctgcaccggaatgcggttgaaacgatgcgcgctaatcagcggcttgtaatcgacgtcagtacgcttaaagaggtacaggatacgctgatccagactgtcggtgacgttattaagattcaacgtgagggggcgacaaaactccgtgagactgaaaagcaggtgttaaccatgcgtgaaaatctcagggccagactgactcagaaagggatcactcaggaggtttaa

SEQ ID NO: 144824 - DNA, 786 bp, Enterobacter cloacae
atgacaggtgcaggaaatatcgaggttccaaccaaggaacgactgaaagaggtcattttaccgaccttattcagcgatgcaaatgcgataagcagatatggcgaatcggaaatttcttctaatgctatggaccgctactcgtcgcttatggaaaagtcagctgtctccgcattatccggctcaataagccaaatagttaatgcgctggctgaggccgatccccggaccattgctagaaaaccatcatggttttcccgtttctcaggtacacatcttgaaaaaaaggttcgttatcaaaaagctcgcatgaatgttgagtctttaattggtgaagggaaaagtttcatggagcacgtatacgaaatgcttcatgcgcttgaagatctcatggtgattcatcatcaggaaattgaaaggctcaaagtttacattgacgccggaagggaatatttacgcgaagtaccagaagaaccgaaagccgacgacctgaatattgtctttgataagccgcgtgaacgatttgccaggaaaatcgcaaaccttgctacgttgcttgcttcgcatgaaatgagcgtcacgcaaatgaaaattacccgcgctcagtgcattgatattctggaccgtttcaacgaaaccgtgaatgtcctggttcctgtctggcgacaacataccctgtcgctaatcacgacaacaaacatggacccggatatggtcagtaaagctacccaggcacaccaggcgcttatgaaaagtctgcataagagtttagaggggattgataaatga

SEQ ID NO: 144825 - DNA, 474 bp, Enterobacter cloacae
atgacaaagattttaactaccgcagaacacaatcaagcgacagctgatctcgccacattaaccgctatcgttgagaactacgcagttacccaccccaagaaacatggctggagtaccctgggcgcattttgtatgcctgcagttttcgtccttgttgttggataccacaccatgacggatattgatccactgactggcgcagtattctcattgattggatgtgtcatgttgtatggcgctgtaggggctgcaggttatctccagggaaaatggcataacgatgaacttgatatgtcagatcttcataaaattcgtgctttttctccatttgtgaaacagctgatcactaacggcatggcaaagaataacggtctgctgacttataccctgcttgaaagcctgctctgtgaaatcgagttcgcgctgaaagaagatgacctgcgtttcaatataaataagcaacttaatgtgtag

SEQ ID NO: 144826 - DNA, 378 bp, Enterobacter cloacae
atgatttatgcaggtgttttgaagccgtttgtgggagctatcagcgtcggctttttgatttcgcttatcattgtaatttggttaatgtggcgttatcgcaagtggggtaaggatcggtttcttactgagagtctggtgatattggttgtatttattgctagtttaatcacggtgtttctgttaccaacttacaacgatgaagacgtgaaatatggcgagaagctatccagctgcaggatgattgaagaaaatgcctacaatggttcttttaatgaaaatgtcaataaaatcaattgcgatggcgtgatcacaaatattcctgtcagtacgtaccaaaaaatgatttacgcatatcaggaaaagaataaaggaggttag

SEQ ID NO: 144827 - DNA, 324 bp, Enterobacter cloacae
atgaccaatgtcgttaaatttcctcgtcaagaggacagtaaaccgcagcagggccagccggtcgagaaggctgccggtcaaacatcagggagtgccatgcgtaatatcatgcatggagtcattggtgcggtgtacatggtgctggtcattctatggattcctgttcgcttcctgctgatcgcgaacgttgtcattcagtttttcaaaatgatgtttaaatggagtgatggcccgtttgctgcagcctggccgtttgtgatcagtttctttgtactggcagccctgacttacattatggctacatggaagcccaaagcgccgtaa

SEQ ID NO: 144828 - DNA, 123 bp, Enterobacter cloacae; identical to SEQ ID NO: 110248

SEQ ID NO: 144829 - DNA, 261 bp, Enterobacter cloacae
atgcaaactaaaccctaccctgtctcaatcaggtcagaatgttttttaccctttggtgcgggatgggtttgtccgacgccagaagaaattcgtactttgatgcagatagcagagctaacaggaagcaaagcagccacactgaccggactgaaagacagtcgaaccgtcaggcgctggattgggggagatacccccattcctttttcggcctgggctatcctggttgaatatgccggattgggtaaaatctggaaggtgtga

SEQ ID NO: 144830 - DNA, 1119 bp, Enterobacter cloacae
atgtccaaacattatcctggcgatgactctcgcgatcagcaaatggaagctattgcgcagcagctgccggacgaccatcgcattctggacgcggcgtactcagcgctaattgatttgaataaagcctgtatgaccggtgatccgcaacagcgtcatgatgctgtgtaccggtttgaagcctgtatctggaaaatgaacggtaaaaccttctttggttgtaatgccggtgaacatgaagcggctcatgttatcagtgaatattgccgtgctgatgacggtagcgttcctatgtggggccagcacggtgattttatcatcgaaagtttcagtggtatgcgagcaagggttaaggtcgaagccggatgtatgatggggtatctttccacctcgtttcatgccgttgatttaggcgctccctttgtatccgaaacagggtatcgttcgcattttgttaggctttcagaagtcagacctggagaaaccgttgatgcacatgtatcccgcgtatttcaaagcctgattgacgccagaaagaaacctgcttttatcgctgctgattcccgtgacaggctggcatctgagcctttgcctgattggttaaaatccctttcgcctccccctgacagaacgcctctaacgctccctgacggctttgtttgggttgaggcgttattacccgcctctaaagcatttatcgcccgtaaatgggctatagcagcccaggaacgcattacagctgttatgcagagagaacgggaggctgaaagagaagctatgagggccgaaagcgaacggcgcaagcagctggcaaaggaacgtcccaaagaatacaaagataggatgattaccgttgagcgctacaaggaattttacgttggtgctcgatgtgaaatcgtgagtgtgcatcatccggtgtttgctaaaaatattggcactattgtaaaaatcgttacgatatacgattcaggatgcgtggaggcgcatgaagataagcctatacgttatcgaatcaaccgtcgcggaactcaggtagtggattttgaccctacttgcgttcgtactttttacaatgttgatcaactgaaattactggaagacaacaaaacaggtgaatcgtga

SEQ ID NO: 144831 - DNA, 468 bp, Enterobacter cloacae
atgaataatgaagttatcgttactgctcgtaaacttacagattgtgaagaacgcctgatgtttatgccgaaatttttcggtcaatactggcattttgtggaaaaccacacttataactggatgcgtaaattaagtcctgaaaataaaagccaatatttaagtagtgcgctggataaaattgaagcccattacgatggtggtgagtgggatttttatgaactttcaaatggtggttattttatggcaccaaacagccgtgaacattaccgtatttctgtccagggtaattactttgacggtttgttaagcgcagaagctgcaggtatggtggcaaccagttttgtgctggcccagcttgctaattctaatctgccattttcagaaagatgcagtgcttattatcatcagctgtttgattacgccagcgggcatcaagaatatgcgctgttccgtgcggccatcgattaa

SEQ ID NO: 144832 - DNA, 198 bp, Enterobacter cloacae
atgaaagatgtacttaagaacctccctccccttgtcgatactgtaactgttaaggttgctaacgttactaagtacgacgatcaccaggtagaaattcgcgaggctgataccaatcttcttatctggcgcgcatgggattttgaaccggactttgaatataatttcaagcagcagctgcagcgcttcattaaaaactga

SEQ ID NO: 144833 - DNA, 585 bp, Enterobacter cloacae
atgaatgataatgcgcattttgaaacggtattttctacatttccgctattttattttgcaatggttgttgctggtttgtcgtatataacttttgcagtaatgatgaatttaatcaagcgttatcagtttttaaagaaagttttagatggtaagtatgatctacctgaaaatggtgataatgaagaagaggtctggaagaaggaaccatttttaagttttataaaatgggacagaaaacgctgcattatccagtcaatagcatctgctgttttctttgttttgattattgcatcatttatttattatctgcttgaggtggggacaaaaaaggatttatatttgtttgtgttttctttttcattacttgcatgttttcacaatttaataaagtctattcatttaatgattgacgccaagaaaatgaataaagatctcaaagagaatataagtgctgatttgtttaattcacacttcacaaaatttattaaagcagaaggtatttatttatactgttctctattttttgatattgcatgtatcattgttattgggtggtttctatattcagaattggtcgggaaatag

SEQ ID NO: 144834 - DNA, 249 bp, Enterobacter cloacae
atgataaattacgtagaaatagcccggagctggcgattacagaacccggaacatgccgatagcggcatagtgctgatctggaatgatgcggtttacggctggaaaaactgtctgcgtgaccctcaacatgaaaggcctggtgcaatagctattgattccagtgggcatatttttattgccgaaggcggtaacgagtatgatggcgcgaagtgttgggtagttttggaaaatcagaaggaacttatatga

SEQ ID NO: 144835 - DNA, 309 bp, Enterobacter cloacae
atggatacgatcaccgcagaaccaaccactgtaggcgaaatgctgtcagaagagtttttaaagccgctgaacatcacccaggcagagctggcgctggtaatgggtgtgtcccgcaaagttatcggccagataatcaataatagccgccgtatcagcgtagcagaagcctcacagctggccgtattgttccagactgatgaagacttctggattaacttgcaggccgctcatgaccgttgggagagccggaatattatagcgaataaccatttccgccctattcaggatctgctagcggaggcaggctga

SEQ ID NO: 144836 - DNA, 300 bp, Enterobacter cloacae
atgattggtagctttaaggacggccagaacggtgagcttgcagcgttctacgtgcatgggacacggagcgcacagataccggccatcattgaaaagccgcttcgccgtaagctgtctcttctggccgctgccagcagtgagaagtcattgttctcgccgcccggtaataattatgaacgcttgcagggtaatctcgctggatggtcaagcattcgggtgagcattcagtggcgtctaatctttcgctggcgcgatggccatgcttacgacatttatctcgatccacataagtaccgctag

SEQ ID NO: 144837 - DNA, 879 bp, Enterobacter cloacae
atgacagataacaaaacacattcagaactcgataagctgaaagaggctgcactggcccagcgtaaaaaaactatcgacgaaaagaatacacaaaagcagctgacgcttttcgatattgctccatggcctgattccatgcgagcactacctaacgactatgcgcgatctgcgctctttactgttaaaaataagcgtcagccccgcgaagctctgcaaaaaaaagaaatttatcatatcaataaggacgtgcgtatcacgtataccggacttgagctaagggccgatgatgacgagttggtatggcagcaggttctagagtacgccaaaaggaaacccatgggagaacccattactttcactttttatgaactctgtcaggatttaggatggtcttacaacgggcgttacatcagtaaagctgaggagtgtcttacccggctccaggcaacggccatgcagttcatttctgatcgcgtcgggcaattggagtcggtttctctaatagggcgatttcgcgttattgagcgcggtacgcggttatcgcgctgtgaagtgatgattgataaggaaatggttttactctttgccggggaccattattcgaaatttgtttgggaaaaatatcgcaagctctcccccaccgctcgccgcttgtttgactactttggttcccaccgcgaaccctaccctatgaaactggataccttcaagctgatgtgcggttctgattcagatcgcattaaaaagtggcgcgaacaggtgaataaagcctgcgttgaacttaaagaaagcggcctcattcacagtgcctgggtagataaagatcgtatctactgtaagcgaagcactgacgagcctaaatcagatggcgacacttga

SEQ ID NO: 144838 - DNA, 372 bp, Enterobacter cloacae
atgaaaaatcttaatcgttttcagtttatcggaaatctgacaaaagacacagagttacggtatacagcaaaaagcacaccgatcgcaattttcgatatagcggttaacgggagctataaagaacaggaaagcggtgaagtcaaggaatataccgactttttccgtatcaaggtatggggtaaggctgcagaaaacgctgcaaagttcctggggaaaggctcacaggtctttgttgaaggttctttgcgtaacactcagtatgaatcgaacggccaaaaagtgtatggcattgattacattgctgagaatattcagtatttaaatacaaaatccccggcaagcagtcctgcagctgctggtaatgaaaactga

SEQ ID NO: 144839 - DNA, 195 bp, Enterobacter cloacae
atggattccatcacccttaaagatgggttcgcttttccatttgttaggtccgacaaaaaagagattgaaaccccagctttttgggaaagctcctgctttgtcatgcctctttcttcaagcagtctgaggatgttagtaaaaaaaattaggttgtacacgatacgcttacgcctcgatgtaaattttagcggctaa

SEQ ID NO: 144840 - DNA, 957 bp, Enterobacter cloacae
atggacgctgtagattccgtcgattcaagagcgatagaaaagctcaaaagggacatggggccaagtctgatggaagcgttggaagatcctgaaacgctggaaatcatgctgaacccggatggcaagctgtggcgtgagaaattcggtcagcctatgttctgcatgggaacggtgcctgtacaacgttcaaaaaccattcttcaaactatcgcgggctttcacaaaaagattatcgatcacaaatcgccatttcttgaatgtgaactccctattgatggttcccgttttgcgggtcagctgccgccactggttgcaggtccaacctttgctattcgtaagaaagcctcacgcattttccttctggatgaatatgtagataaaggcgtaatgaccagggcgcaggctgattttatttgtcgcgcaattgccgcgcataaaaatattctggttattggtggtactggttcagggaaaacaacgctgttaaacgccatcattgctgaaatcgttcgtcagtttccagacgagcgtatctgcattatcgaagatacgggcgaactgcagtgcgccgcgcaaaattttgttcagtatcacaccaccgttgacgtcaccatgacagacattcttcgtctgatcctgcgtatgcgacctgaccgtattttcgtaggtgaaacacgcggcccggaagccctcgatatgcttgacgcctggaacaccgggcatgagggaggcgcagcctcacttcacgccaacaacacgctttctgctctcacgcgtctgcgttcactgatctcacgtaacccgtttgctccgcgagaaattgagccggtaattggcgaagcggtcaacgtgatcgtccagatttctaaaacttctgagggtcgccggattaaagaaatccgcgaaattcagggttatgaaaacggggaatacatttcccagctcattgcagcttaa

SEQ ID NO: 144841 - DNA, 384 bp, Enterobacter cloacae
atgaaaacaggtctttccaacttcaatctcagcaaacatgcctttattgcatttttgggtgccttgctgtttttcatggcagctgaacctgctctggcgtcaaacacatcaggcggtggcctgccgttcgatgactggatgaccaacatccgtacttctgttacaggaccatttgcatataccgcttccattatcggcctggtaggtgcaggcgcgatgttgatcttcggcggtgatatgaacgggttccttcgtactctgattttcatcgttcttgttcttagcttcctggttgcggctcaaaacacgttgtctgcaatcaccgggcagggtgcagaactggcagcaatgctgaccagctctaaaacagggggagtggcataa

SEQ ID NO: 144842 - DNA, 327 bp, Enterobacter cloacae
atggcattacgcacgatccccattcgtagggcggcttcaagaacgaacctcttcatgggcggggaccgtgaattggttatgttttcaatcctgctggcagcggtccttatctttacatcacaagactggatcgctgccggtgtaggcatcgggatttgggggggagcacttttcctgttaaggaaaatggctaaatcagatccgatgttgcgccatgtttatctgcgtagcctcaaatacagccagccgtattatgcaccccgtgctacgccgttccgcaaaaatacaggaacccaaggcaaacgttatgaaagggtgaaaaaatga

SEQ ID NO: 144843 - DNA, 2544 bp, Enterobacter cloacae
atgaataccgtaattcctgtcttagttgcgctgataggtctgatcttgcttggcatgatgctggctttctatttgcgtatggtgaaggaatatcaccttaaaaaaaatcgctcggaggatgaagctgtagccgacatgcttatgtacgccgctgttgttgatgatggcgtgatcgtatgtaagaacggttcctttatggcgtcattcttttttaaaggtgctgacaacgcgagttcgaccgatcaggaaagagagcttgtctcatttcgcattaataaagcgattggcagactcggcaacggctggatgatgcacgttgatgcaattcgtagtccggctccgtcatacagtgaccgaaacgcttcgcactttcccgaccgtgtttccgctgccatcgatgaagaacgtcgccgtctgtttgaaaagatggggcaactgtatgaagggtgctttatcgttaccttcacctggttcccgcctgcgctggcagaaagtaaattcactgaattgatgtttgatgatgatcgcgaagcctctactgataaagacgctacgcttaatctcatcgaaaaatttaagcatgaaatcagcataattcaggcaaatctttcagaggctgtttcgattgaacggctgaacggcgtgaaagtcgtgcaggaagacggctccgttgcaacgatggatcagcagctggagtacctgcagtattgcattacgggcctgcaacatcctatacgcctgccaaataatcctatttacctggatagcctcattggaggtcaggagcttattcctggcattacgccgcgtatcgggaaaaactttattcaggttgtggcgattgaaggctacccgtctgaatcttatccgggcattctcagtaagctggccgaacagccatgtgaataccgctggtcaacgcgctttattttcctcgatgctcacgaagccatttcaaagctgacggcattccgcaggaagtggaaacagaaagtacgcggttttatgtctcagctgttcaataccaataacggctacgttgatgaagacgcactgtctatggtcaacgatgcgtcttctgctattgcagagactaactccggtttggtcagccagggttacatcaccagtgttattgtcctgatgaatgaggaccgtcagaaggtcgaagcagcagcagagtttatgcgcaaggctgttaacaaaaccggcttcgccgcacgaattgaaaccgttaacacgatggatgcctactttggttccttaccgggccacggtgttgaaaatgtgcggcgcccgctggtaaatacccttaaccttgccgatctgatgccgaccagcactatctggccgggcgaaaacaaagccccaagtccgatgttcgaagtaggcgcaccgccgttaacacactgtgttacgtcagggaatacgccattccgacttaatctgcatgttcgtgacctcggccacgctttcatgttcggaccaagccgtgccggtaaatctacccatctggcgttaatcgctatgcagtggcgacgttatgctgactcgcgaattttcactttcgacaaaggcctgtcgatgcttgccacctgcaagggcgtaggcgggaaacatttcacgattgccggtgatgataaccagctggcatttgctcccttatcacgactggatactcctacccgccgtacatgggcgatggaatggattgaagccattctgatcctgaacggggttaaggttgattcaccgatgcgaaacgcgattgctgacgccattaagagtatgtctgagactcattcgaaaaccctgtctgaatttacggtcacggtacagaacaatgtcgttcgtgaggcgctcaagcaatacaccattgatggcaacatggggcatctgctcgatgcagaagaagatggccttgatattgctgacttcatgacctttgagattgaacacctcatgaacatggatcagaaatacgcgctgccggtgctgctctatctcttccgtcgcattgaagaatctctggatggtcgccctacactcatcatccttgatgaggcctggcttatgctgggtcatccagaattcaggggcaaaatccgcgactggcttaaatccatggcgaagaaaaactgctctgttcttatggcaactcaacagcttagtgatgcggccaactctggcattctcgatgtcattattgagtctactgcctgccgaatcttcctaccaaacagccacgccctgcaggaagaatccatgcctctgtatatcaatatggggcttaatcgccgtcagattgaaatcatcgcgtctgccgtaccaaaacgcgattactactacgtatccgacgaaggccgccgcctgtatcagctcgcgctggggccgcttgcgctggcatttgtgggagctactgatcccgattcaatcgatgcagttaaacaactgtccgaaacatacggtgatggctgggtagatgaatggctacgcactaagggtctggacttgaatgattatgagtatgaggtcgctgcatga

SEQ ID NO: 144844 - DNA, 708 bp, Enterobacter cloacae
atgaaactttttaacggtaaaaaaacccctcagcccgatagccctaatccgtatctcaatgcacgtcgttcatggaatatccacatgggccatgtgcagcagttcggggcgctgggtattttcattggtgttgcgggtctgcttatcggtctggccgctgtgggggggattacttacatcgggagccagtcgaaaactgtcccgatggtttatgaacaggacaaggcaggtaactacgtcagcctgacaagagcagaccgcttgcctccagccaagatcgacgactatcgcaccgctgtatggaactttatcgatcacatcagaacggttacgccagatggtgaactacagcgtaagtctgtattgcgcacctacgcgtttttgttcccggatgatcccgccacaacaaaagcgaatgaatatctgaatggttcgaaagaacgtaatcctttcacccgtgcaaaaacggaaatggtcagcaatgagctgatttccgtactgcagcaaacgccagatacctggcaggttgactggattgagacaacacgtaaccgcgacggtacgttaaaaaacccaccggtccgtatgcgagcactggtcaacgtttatcagaacactaatctgaacgcaaaaattaacgaaaacaatgatgtgatgaacccacatcgtattttcattaaagattttaactggtcaaaacaactgtaa

SEQ ID NO: 144845 - DNA, 891 bp, Enterobacter cloacae
atgaaaaagtcaattatctcagcgttaattttgagcttaccgcttctggctaatgcggctcccggtagtgatccgctggccgaccaatatttctctaacaatgagccatcactcacaccgcaggaacgagcagctattggtatcggccagaaatggcagaccggtgctggcagcgtaaccagtaaaccatttgcagggccggacggtgcaatcagttacgtgtatacaacgggccagacgcagattgtctgtgccgtactgcagctgtgcgatgtggctttgcagcccggagaaaacgtcaacaatatcgacgttggtgatccacgcgtaacggtatctccttcaatcaccggttctggtgccgcgcagcagctgcatctgatcatcaaaccgcttgatgtgggccttgatacctctttggtagtgacgactgaccgccgcacttatcgtatgcgagttaaaaccagccgcaccaaatttatgccgtatgtgtcatttacctacccggaagacgcgcaggctaaatgggatgccattcggacgcgtgaagccaagcatctgcgtgacaacacaattcctcaaacaggtgaatacctggggaatctggacttcaactacgaaatcaacggttctgccagctggaaaccggtacgtgtatataacgatggcgtcaaaaccattatccagttccctaaaacgatttcttctggcgaaaccccaatccttctggttgtgcgtaaagaaggtgggctgttctctaaagacgaaacacagcaggtaaacctgcgtactcagggagacagaacgattgtcgatggcctgtttgacaaggcatatctggtaattggcgtcggttcgagccaggaaaaagtgactatcacaaggggctaa

SEQ ID NO: 144846 - DNA, 453 bp, Enterobacter cloacae
atgaaagcagcaatgaaattaacctctgctatggtgctggccgcgagcctgttaatgactggctgtgtctcttccggttatggcaactattcaaatgccaatatgttcgcctctacgagcatggcagataacaccgttgcgcatctggcagcgctgtatcctccgggacgtactacgttcacgatgaaacagcctgccaaagatcagttcggttcggcacttgttcaacgtcttcggtcgcggggttatgccgttatcgagttcacgaaagacggtaagccacagagcgccctggcaaattcagggaccactcttggttatgtcgtgaacaccgtcgcgcctaacctctaccaggtcacaacgtatgttggtggcgtcacgttaagccgtggtttcgctctggcaacagatggcaaagcatacccggcaggcccatggactcgcgaggaataa

SEQ ID NO: 144847 - DNA, 1395 bp, Enterobacter cloacae
atggctgaccaagataaaatgtcccccgacgcttctccgggcgttgctaacaaaaccggtgtacgccgcgttaacaaaagaccgatgtacattgctataggctgtgtggctgcattctgccttgtcgttgcatacgtcgcgaataaacgtgccaaccagggcgcgtctgatacggcagaaacgactgttcaacgcggcagcagccgtgatacctctgcaatggcaatggatgttatgggaggcggtagttccgggcttattgaagcaccggcaacaccgccagagattccgaaacaggatgataaaaccaaaccgagcacagattatacaggggttcccgttgcgccagtggctgatccagatcagccacccgttccgcaacggtcggaatcgccacggcagaatgatccagaagcagaccagattcgtcgcaataaaatgcgtgattttgttgaggccgtaaaagctaaaacggaagtgagcctgcctaaccagctggggcgttcaaccactgcaggcaatacaccgcaaacccgcgatgaaatgctgcaggaaatcgctaacgttcgccgtcagatggaacagaacaatgctggcgatgctactgcaagttatgacgctcaggttcagagaatccgggcctctatgaatggcggcgcagatagcggcagcgatactggtatgcagctggcatcagtgggtggtgcttccgtttcccgaaatgacatcaaccagttcggtaagaaagggcagggtgacagatggttactggatgaaaaagtttcggcaccacacagccagtatgaacttcgtgcgggctgggtcattcctggcgtcatgattagcggtattaactctgatcttccagggcagattgttggtcaggttgctcaggacgtttatgactcggcaacaggcaaataccttcttatccctcacggaactcgcgtgataggtacatattcaagcgatgttgcctatggtcaggaaggggtcatgattgcctggcagcgtctggtattcccggacggaaaagctcttgatttaggctccatgccgggcgcagacatggcgggttattctggtttccgtgatcaggttaataaccattacttccgtatctttggtaacgctctgctgctgtcaggtatcaccgcgacaattgcttactctcaggatcgcgaccagaacaataacaactcgaatcaggctccgaacatgagcagtgaaatgagtgcagcgctgggtcaggtattcggtcaggccattgcgcaggttgtacagaaaaacctgaatatcgcgcctacgctcgaaattcgtccgggttatcgcttcaatatcatggtcactaaagacctggcattcacaaagccttatcaggcatttgattactaa

SEQ ID NO: 144848 - DNA, 174 bp, Enterobacter cloacae; identical to SEQ ID NO: 110246

SEQ ID NO: 144849 - DNA, 1554 bp, Enterobacter cloacae
atgaaattcaggcatctaatttatccttgcttatctgtgttgctgatattaatcagcacacaggcacaggctgcaccattagatagtgctgggttgcttgatgatatccttaaccgctttgcaaatgttgccagcacttgggctggcaccatacaaaattacgcgacctggatattttggtcattagcggtaatttcgatggtatggacattcgcaatgatggcaatgcagggcgaaggattatcggctgctcttgcagaagtagttcgtttttttgctgtgttaggttttttcttctatctgctaaaaaacggcccggcaatatcggttgatattcaggattcattacgacaactcgcggctaatgcttctggtttatcaaaatcattctcgccttcgggcatagtagatatagggtttgatatcgtatcgagagtcgtagaccaatcatctatttggtccccagctgactcaactgtcggcttgattttagccggagttattctatgcgtattagcacttgtcggtgtaaatatgcttctcctactgattactggttggattttaagttacggcggtattttcttactcggttttggcggtgctcgttggacttccgatattgccattacattcttcaaaacagttttaggaattgccctgcagctgttcacaatggttctaatcgttggtattggaaaatccttcatagaccagtattaccaagcgatgggcgctgacgcagtacaaatgaaatctatgtttgtaatgcttgtagcctcaattgttcttttggttcttgttaataaagttcctcctatggttggcagtattgtaggaggcgcgtcaatgcaaggcattggtggctttggtgccggtgcaattattggggctgcagctgctgcaggagccgcaatagcaacagctggcgctgcagcggcagcgggtgccgcaaatgcagctgggggcgcatcagcactcaaagcggcgtttgaatcagcacaagcagcaatggccgaagaatcaggttccggtggttccggtggttccggtggaggatttggcggtggggaagataccggttctgtagatccttctggaggccaaccatctggcggttccggtggttcgtctgcagggagcagttcaggtagcgccagcggaggaagccaggggtttgcttcttcattctcacgagctggccgtatggcttctcacatggcgagtagcttggcagagggcatggctgcgcgcaatacggccaagcatgactcaaaaatcagcgcggcaaaagacaccattgcacagactgcaggtggtcagcttgcttcccaaatccgtgcgcaaacagctgcgcgtcagtctggcccgatggtttcagatgacacggctatgcagggtgctttcgccagtaacgataacgccagcacaaatcagtttagtggtgacgggctgagtggaagccagccagatacaaacaatggttctggagagtcacagactccacaaggcagtgatgaatatgaacagttcaaaaacaaacaaaacttctaa

SEQ ID NO: 144850 - DNA, 306 bp, Enterobacter cloacae
atgaaagcaattctttccgttctggttttagctgcaagttctgttgctatgacagccccggctaaagccgcagatccatgcgaacaggtattatgcctgtatggtgtgatgacaaccggaaatatcgcaagcggatgttcagggccggttggtgactatttcaatatcatcgagaaaaaacacggttctttcctgccggatcatacttcgcgcaagcgtaaaaaacagctggataagtgctcatcagctggaagtgatgtggttgaaaaaattaataacaagtttggccgcctgcgcgggctgtga

SEQ ID NO: 144851 - DNA, 771 bp, Enterobacter cloacae
atgccgtatttagatatgccaccggctcagattgaacgtgtagtttgctcaattactgcagcgataaaatatcaggttccggctaatatcatgttagccgtagctgaaaaagagggtggtagtaccgggcttgagaataaaaatcgtaactcaaatggcacatatgatgtgggccgtatgcagtttaatacggtttatttaaaggatctggaaaaatacggcattacagcggaggatgtagcacagcctggctgttattcatatgatttggctgcgtggcgtatacgcggccatatcaaaaatgataaaggcgacatctggacaaaagctgcaaattatcattcaaaaacgcctcaatttaacgaggtctatcgtgctgacctgataagaaaagcagctaaatggcagacatggattgaagcacgctttaatacgtttgatgcgacaaagcctgccggaacgactccacagccgcaactggcggctgcaggggttacgccagaagaaagggcggggaaaagcattgagcaggttactgaccttgcacaaagcgacgcacacgctacagaaccgccaaaaaatgacgggacagcagctacaccgtctacgccggatcaacttattggttttgccgcgtctgtaaaacaaataccggttaaaagcgtcgcaaaggctgactaccagcagtccgcacagcaactacctggtcgttataacaaggctgcagcggatgcactggctgcagtatatggaaatatcaagctacgttga

SEQ ID NO: 144852 - DNA, 687 bp, Enterobacter cloacae
atgcctttcaaaaatgtagaactcattaagtgggtcgctttaatcttaatgattggcgaccatattaataaatatttattaaatgacacaatccccattctttataatgccggacgtgttgtaatgcctcttttttgctttgttctggcgtataaccttgctagaccagattcatatacctatagcgtatattcaaaagtctgtcagcgcctgatgatatttggccttctggcgacacctgcgtacataatgctgggtggtgtaattgatggttggtggccgcttaatatcctttttaccttgcaggccgtaaccatcatttgttacttcattgaattaggcgaacgtagacatcttctctttgctttattagtttttgctggatatggagcaatagttgaattttggtggcctgcggtggctatgggtgtatgtatctggctatattataagaagggaaggggagtatttattctctttgcatttgtcagctgcgtactacttactgttattaaccataatttttatgcactactggcaataccgttaattgcaattgtcggagatatccgtattaaactcccccggctaaaatggtttttttacgtcttttatcccacacacctttatctgattctggctttacagctttaccttgctacaaagggctatctgtttttcacatga

SEQ ID NO: 144853 - DNA, 531 bp, Enterobacter cloacae
atgcgaaataaggttaatttattattcatcgcggctttagctataccgttttattccttttcatcaactacaaccatcacgaacgaagcagcgccagctattacggtaacacgaatactggatggtgatacccttgaggtcaaagatgacggtgagttgataagaattcggcttgtagatattgatgccccggagaaaagccagccgttcggacagagagccaaacagaaattgtctgagctggtaaaagatgctgatggcgtagctgtatcttcaaccggtaaagatcgttatggacgtaccttagcgaaggtctatgtaaaaaaatgccagccagcatgtctggcttattacgtaaatgctgaaatggtaaaaagtggcctggcttgggcctatcgctaccatggaaaggcaaccagcccgactatggaagaactggagagcagggcgaagcaagccaaaactgggctttggtcattaccagacgctgttgaaccatggcgttaccggtatgaacataaatctcagtaa

SEQ ID NO: 144854 - DNA, 636 bp, Enterobacter cloacae
atgaaaatagcgcgggtgtatttgcgggttagtacagatgaacaggatttgacccggcaaaatgaaattattgaaaatgccaggagtaatggattctatgttgccggtgtctataaagaaaaggcgtccggtgcaagagctgatcgcccggaactgcagcgaatgataaatgatctgcagccagacgaagtagttattgcagaacatatagatcgtatcagtcgtttacctctcgatagtgcgctggcgctaataaattctattaaagagcggggcgcgaaacttgctattcccggtattgttgatcttaccgaactggctaacgctcaatccggtgttgcgaaggtcgttcttgaatctgttcaggatatgttactcaaagttgccctgcagctggcgagggatgattatgaaaaccgtcgcaaacgccagaaagagggcattgagctggctaaacggcaaggccggtatcaggggcgaactgcagatctacggctccataaacgcatcattgagtatcgttcaaggaagacgagtattgcggaaacagcgaaactttgtgaatgtagcgtcagccttgtaaaatctgtatgggctaaatttaaaaaagaaggaataaatcacaatgcgaaataa

SEQ ID NO: 144855 - DNA, 345 bp, Enterobacter cloacae
atgacatatagcaaatatctaaataatcccctcgatgaacgctatttgatagaaccgggggaatacgtagaagaaggggctattccacatgaagagttggaagttagaaaacaattggctgcattaaaattatgtgaagatcgtctgcgtaaatgtggtttcttttggcgtttatttaattcggaagaatataaaggctatcttcatatagctaaaacagttaatgacaatctaatgagacttgtgaacagaacaccccagcataaggctgccatcaggcgtattgtgaattcgatgcctgaaaacaatggcgggcgtgaatctttaaaggactttctcaaatga

SEQ ID NO: 144856 - DNA, 657 bp, Enterobacter cloacae
atggatgcgctacttggtcaggacgaggaccgcgctatagctgatcgcttatacagagaatacccggcaatgcggtggatcagcaccaaattggtccaggagaggcgcaaagcattggggatagaaggctgtggtcgaaatagatcaaaacccaccggcagcaaaccgaggaaacctactgtagttacacccccatggacgccggaagaggatgcaatcttgggaaccggctcgctggaaaaagtatccgttcggctcagtcgcccaacaagccagattcaaaagcgaatgaaagagcttggcattgcccattttgctcaacgcggtacacctcgtagttctgtaaagttacaagctgaagaggcccaaaaggaacgaaataaagtcagactcattcagcgaatgcgtaaaggtgcggttatcgcggaaggggtagcaagtggttatacctataccgctttagcaaaagagttagggatcagtcccacagcggctaggaatcagtttttaatgtttttgagagtagcaatgcttccttcgatgctaggcgaggaaataccacgggatttcaaaaacataccatctcatgttctaaaaaaagctgtgtgctgtgtagagaattattgtattaatcttgaaaaggcagaggaggaataa

SEQ ID NO: 144857 - DNA, 330 bp, Enterobacter cloacae
atgtcacacaatccttacattgttcagttcccagatggttcccgactatatggcgtgagcaacggtagcggcgttcttctgcgacccttgtttctctcgccagaagaggctatgagttttccaagagaagctctttacgatgcaacggagccgtgtgaggcgtctcatacagacgttaaagtcatcatcgaaccaggagaggcctgggagagtgagaatcgagcctcattgaaattaatgtggcttactggccctcagaccagtaacgagcgattggcagaagagtcaaatagtgaacatgaactctatggcggtattcaatgggagtaa

SEQ ID NO: 144858 - DNA, 885 bp, Enterobacter cloacae
atggatctaacacagatttcattgcgaacgtcgagagatcaagtcgagcgtatcaaaacctatgctaaagcaagtaacctgtcagttaacgctttcctggttaacctgatagagaactcactaaacaacattgctaatgatggaacacagagcgaacttacacggcttgtagctgaaccggtcaaaacactttcaaggcttcatcacaaaatttgcgatccctggaatacaaatgaacctgctgatctgactcccgctgaaatagcttttttgacagatgcggccaggaagcaactggatagcaaacatttggctggccctgattactttgcaatacgtgaccgcatcgataataccctaatagaaagcagtcttaactattatcaggatctgttcggctttgcacatcgcttctatattcgtgatgaagaatccagaaggacgtttgcaaccgaacacgcgccggtaggcatccaatccgtcgattattcgtttacggttgggaacaagacctttacgattattgtccggggaaatgacagtaattccttcgatacaccggaggataaccgccctcctgttctggcgtttacctgtgaaaccgcgcaatttgatacccgccatgattgggatactttcattgcactggtgaggctcatgaacgcagtacataatggtgaagaatctaaatgccacgccggtacgcatacccgccttggccgccgtatggatagcgaaaaaccatggtcacttttcttagggagactgcagctgctgctgaaagatagcgagctaaaggatatggctgtagaatttcataaactagttaatggtgatgcggctaacgttatcaaacaaatacgtttactttacggtgagggttaa

SEQ ID NO: 144859 - DNA, 249 bp, Enterobacter cloacae
atgaaaatatttgctcttattttttatattttccctttggcttcttttgcttcaaacgaaaatgtagatcacgtttttataaaggcatttcaggctgcagtggcttcatcattatgtacagatgtagctaatgtaagtaaagatacccagcctgaaaaagagcttgagcctcttataaaaatgtgcgcagagaaaggcgaacagagtcgcgctattcttaacgcttataccaatgcagcacacacttga

SEQ ID NO: 144860 - DNA, 324 bp, Enterobacter cloacae
atgggcgtaaaagactcgaattatcagatagtttacagaggtgaagtgctggatcatcttatccctagtcaatgggtattcttccagcgcctgaaatcttatggtggtggttactggcttggtcgtacatatccagatttttatcagtttggcccggagctacctgtatcgttatctcagggattacagtacattatggcctctgataaggttgaggcagaaagccatgtcttcgatgacgattttgaactttacggaggatgctttaatgaacaaagtgatgaaagctgtgggttgggcggggataaccactatagttcttga

SEQ ID NO: 144861 - DNA, 192 bp, Enterobacter cloacae; identical to SEQ ID NO: 99877

SEQ ID NO: 144862 - DNA, 4593 bp, Enterobacter cloacae
  misc_feature (4551)..(4560): n is a, c, g, or t
atgatgagcatcggatcggtaaaatccgccggcagcgcgggcaattattacaccgacaaggacaactactacgttatcggtagtatgggcgagcgctgggccggaaaaggggctgaagcgctggggctcagcggcggggtggaccagaaggtctttacgaaggttctggagggacgcctgccggacggcagcgacctcagccggactcaggacggggcgaacaaacaccgtccgggctacgacttcaccttctctgcgcccaaaagtgtctccgtgatggccatgctgggaggcgacaagcgtcttattgaggcacacaaccgcgcggtggagaccgccattaagcagatagaggcaatggcctccacgcgggttatgacggagggcaggagcgagacgcagctgaccggcaacctggtgatggcgctgtttaaccacgataccagccgcgaccaggagccgcagctgcacacccacgcggtggtggccaatgccactcagcatggcgatgagtggcgaacgctcagcagcgacaaagtgggtaaaaccgggtttattgagaatatctacgccaaccagattgcctttggccgcctgtatcgtgccgcgctgaaggatgacgtcgcggcgatgggctatgagactgagacggtcggcaaacacggcatgtgggagctgaagggcgtaccgacggagccgtattccagccgcagcaggaccatcagcgaggcggtcggggatgacgcgtccctgaagtcccgcgacgtggcggcgctcgatacccgccagtcgaagcagaaggttgaccccgaacagcgcatggccgagtggatgcataccctgaaagagacggggtttgacattaaagcctaccgtgaggcggcagacctgcgggttgtgcaggggaatattcccgcaacgacgcctgaagccattgatattaacagcagcgtcgggcaggccatcgcgatgctgagcgaccggcgggcgcggttcacgtattccgaactgctggccaccaccctcgggcagctgcccgcgcggtcgggcatggtggagatggcgcgtgacggcatcgatgcggcgataaaaaatgagcagctcatcccgctggataaagagaaggggctgtttacctcgaacatccacgtgctggatgagctgtcggtgtcggcgatgacccgcgatttacagcggacggggcaggccgacatttttccggataaaagcgtgccccgcagccggtcatacagcgatgccgtgagtgtcctggcccaggaccgtccgccggtggcgatcatttcgggtcagggcggggcggccggccagcgtgagcgcgtggcggagctgacgatgatggcgcgcgaacaggggcgtgacgtgcagattatcgccgccgacaggcgttcgcgcagcgcccttatgcaggatgagcgcctcagcggcgagcatatcaccgacaggcgggggctgacggagggcatggcctttacgcccggcagcacgctgattgtggaccagggggagaagctgaccctgaaagaaacgctcacgctgctcgacggtgcgctgcgccataacgtccagctgctgattgccgacagcggccagcgcaccgggaccggcagcgccctcaccgtcatgaaggaagcgggagtgagcacgctcgcgtggcagggcggtgagaagacgcaggtctcggttatcagcgagcctgaccggcggcagcggtatgaccgcctggccgctgactttgcccgaagcgtccgcgcaggtgaacacagcgtggcgcaggtcaccggtccgcgcgagcaggcggtgctcgcaggcgtagtccgcgaggcgcttaaggcggaaaaggtgctgggcgagcgggaggtcagtatcaccacgctggagccggtctggctcgacagccgccatcagcaggtgcgcgaccactaccgggaggggatggtcatggagcgctggaatgccgaagagcgcagccgggaacgctttgtcattgaccgcgtgacgggccgcaacaacagcctgacgctgcgcaacgcccagggtgagacgcgggtgacccgcctgtctgaactcaacagcagctggtcgctgtaccgcaccggcacgctgcaggtggccgaaggcgaccgtctggcagtgctgggtcaggcgcaggggacgcggctcaggggaggcgatacggtgaccgttaaggcgctcggggaggcggggctcgtcgtcagcctgccggggcgtaaggcggacgtggtcctgcccgccggcgacagcccgtttaccgccgcgaaggtggttcaaggctgggtggagtcgccgggccgctcggtgagcgacagcgccacggtttttgcctcgctgtcgcagcgcgagctggataacaccacgctgaacaaactggcgctcagcggccgggcggtgcggctctattccgcgcagacggcgcagaaaacgacggagaagctgtcgcgtcagtctgcctggagcgtcgtgtccgaacagattaaggatgcggcggggcatgacaggctcgatgatgccctggcgcaccagaaggccggtctgcacacgccggagcagcaggctatccatctggccattccggtgctggaggggaacggcctggcgttcacgaagccgcaactgatggccgccgcgaaagaatttgagcaggacagcctcagcctgcaggccatcgaaaaggaagcggaccgtcaggtgcgcagcggcgacctgctgtcggtgccggtatcgccgggaaacggcctgcagctgctggtctcacgccagtcgtacaacgctgaaaaaagcattatccgccacgtccttgagggaaaggaggccgtcaccccgctgatggataaggttccggacgcgcagctggcgggcctgaccgacgggcagcggaacgccacgcgcatgatacttgaatcccccgaccgctttaccctggtgcagggctacgccggggtgggtaaaaccacccagttccgggcagtcatgtcggccatcggcacgctgccggaacgggagcagccgcgcgttatcggcgtggcccccacccaccgggcggtgagcgagatgcgcgatgcgggcgtgcctgaaacgcagacgctggcggcctttattcacgacacgcagcagcagctgcgcggcggcgaacgaacggacttcagcaacgtgctgtttctcgtggatgaaagctcaatggtcggtaacgccgacatggcgaaggcgtacagcctgattgccgggggcggggggcgcgcggtctccagcggggataccgaccagctgcagtccattgccccgggccagcccttccgcctgctgcagaagcgcagcgccattgacgtggcggtgatgcaggagatcgtccgccagacgccggaactaaaacctgccgtctacagcctgattagccgcgatatcggcagcgccctgacgaccattgagagcgtggcgccggcacaggtgccgcgcagggcggatgcctggcagccggacagctccgtcatggagttcagccgcgaacgggaggaggccattgcgaaagccgtggcggccggcgacctgatgcccggcgggcagcccgcgacgctgctggaggccatcgtgaaggactacacggggcgcacgtcagaggcgcaggcgcagaccatcgttatcaccgccctgaacgccgaccgccgccaggtgaacgccatgattcatgacgcccgtcagggtgccggcgaggtgggcgaaaaagaggtcacgctgccggttctcacgcctgccaatatccgcgacggggagctgcggcgcatggcaacgtgggaggcatcccgcgacagcctggttctgctggacagcacctattacagcattgaggcgctggacggggaggcgcacctggtgatgctgaaggatgcgcagggcaacacccgcagcctgtcgcccgcgcaggcggcgacagagggcgtcacgctctaccgtcaggacaccattaccgtgtcggaaggcgaccggatgcgcttttcgaaaagcgacaacgagcggggcttcgtggccaacagcgtctggtcggtcagtgagataaaaggtgacagcgtcacgctgtcggacgggaaacagacccgtacgctcacgccgtcagccgagcaggcagagcagcacatcgacctggcctatgccgtcaccgttgaaggctcacagggtgcgagcgagcccttctccatctccctgcagggtacggacggcggacgtaagcggatggtgagcttcgagtcagcctacgtggcgctgagccgcatgaagcagcacgcgcaggtctataccgacaaccgggataagtgggtggccgcgatggaaaaatcgcaggcgaaaagtacggcgcatgacattctggagccgcgcggcgaccgcgccgtcgcgaatgccgcccgcctgacggcgacggcaaaagcgctgggtgaggtgcctgccggtcgcgccgcgctgcgccaggccgggctgcagcccgagggctcgatggcgaaatatatctcgccggggcgtaannnnnnnnnngacagaaggggctcgctggtgaaggccgggtga

SEQ ID NO: 144863 - DNA, 162 bp, Enterobacter cloacae
atggaaggtcatcagttcaggtgtacaggtagctggaatggggaaaccttcgatcgggtgatcgaggctgaagatgaaggagatgcccgtgaccactggatgtattgggcatgggcagcaggagcaaccctgcaaaatttggaagtaaccgaagccgcctaa

SEQ ID NO: 144864 - DNA, 360 bp, Enterobacter cloacae
atgaccaacatcgacaaattgaaagcagccgcggctaaagcggtcgataacttcgacccgaatatgttcgtggaaactcgcgacgtgctggcgctgctggatgagctggaagccaaagacaagaggattgctgagctggaggcacgggaagtgaaattgcctaatcctcatgctcacctcatctggattcaggcaggccatgcccctgatgactattgggatgatgttgccgtttctcatagcgaaaaggataagtgctgcgacggttcagatcgctatccggtttatactctctgggaaatcaaagaggcactatctgctattggcatcaatatcgccgcagccggtaaaggagagtga

SEQ ID NO: 144865 - DNA, 645 bp, Enterobacter cloacae
atgaaaggtcatgtatacgctgtgcagaacgaggatttggtaaagataggaaggagcttccggccaaaccagcgagtaaaagcaatccaaacacagggcgggtttatttcaggcaacacattcatatccgaagcattccacctttacccaaaggttgagatcgaatgccatgcaaaactatctaaacacagggtggtgggagagtggtttcgtattagcttcgatgatgcagttaattgcataaaagaagtcatgaaatcaattgccacccatgaggccgaggaggcagcagaggcaaaaattgatggcatctctgagttggcggactcttacttttatcaattggaactacttaataccatgcgggcggggatggtaagtgctgaatggcctgatgaagcaatagatttcgcctttggcttgggtttgaagcacgctaaaaggatttatgacgagctttttatgtctccctgcgtaaccgtggtggtagatgacagagtatggatatgttatccgcaaggctttcaagagcatgataaagacgaatatatagccagttatgataagaaatccattgcggaacatatcggctgctctgaggatgatgtccctgactgggatgaatactcagtgctgattgaataa

SEQ ID NO: 144866 - DNA, 1089 bp, Enterobacter cloacae
atgttctatggcatcaagaacaaccctaccaaaattaaatcgctcgaaggtatcgacatctgctggatggaagaggcggaggcggtatcaaaggaatcgtgggaaatcctgattccgaccattcgaaagcccggatctgaaatctgggtaagttataacccaaagaacatcctcgacgatacgcatcagcgctttgttattgcgcctcctgatgacatctgcctgctgaccgttaactacacggataacccatggtttcctgacgttcttcggctggaaatggaggagtgcaagcgcaaggactatgacctttacctgcatatctgggagggagagccggtcgcagatagcgacatggcaatcatcaagccgtcatggattgctgcagctgtggatgctcataagcttctcggattcgaacctgtaggtgagaagcgagtcggctttgacgtcgcggatgaaggtgaggatagcaatgcgatcaccctgcgtcatggctcagtggctattgatgtgtgcgaatggaataaaggcgatgtcatagagtcatcgaacaaagtaaacctttacgcagaacagaatcacgcagatgaaatcatttacgactcaatcggtgttggtgctggcgtaaaagcacagttaggacgcatagccaaagttaatattcagggcttcaatgctggaggcgctgttctcatgcctgagtcagagtacatggctggcaaaaagaacaaagacatgttctccaatatcaaggctcaggcctggtggaatgtgcgcgaccgattctacaaaacatggcgttgtgtcgaggccagaaagaaagaccctaactgtccaatcgaatattcacacgacgaacttatcagcctctcatcctccataccaaagcttgaatatctgaaagcagaactgtcgcgcccatgggttgattatgacggcaatgggcgggtgaaagtcgaaagcaaaaaagacatgaaaaaacggggaataccatccccgaacatggctgactccctaatcatggcattcgcgccgctaatcagaaagccgctgcgaatctccgacgaacttttgaggctcgcatag

SEQ ID NO: 144867 - DNA, 1533 bp, Enterobacter cloacae
gtgtttgaacgctggaaaaagaaaaaagctgagcctccaaaggaagaggcaaagcagcccatgtcgctggctaatgcgctggcgatgctgaatgaacaggaaaggattaagtcagaaggtgcagcgcttcgtcagattgagcgctatacaccgcctcccggagtgattcctgagagcgtgggtgaagctgctctggcgatggactccacgccttacagttatctcaactcagcaaacatcaccgcatatggctacggtggcttccctggctacccatacctgtcacagctcgctcagttgccggaatatcgcaagattaccggcacgatagcggaagagatgacgcgcaaatggattgagctgaagcacatcggcaaagatgagggtgacgataaggccgacaagattcgccagcttgatgacgcattaaagcgttttaaggtgcgcgataaatttcgggaagctgcagagcatgatggttacttcggtcgcggtcagatttacatcgacgtgaagacccctagcggtaactctgcctggacggttcctgacgagctggacaagaagctctacatcagccctcgcaagataaccaaaggcagcctgaacgggtttcgtgttatcgaggcaatgtggacttacccgggtgtgtataacgctgacaacccattgagccccgatttcttcaacccggctgaatggtacgtcatggggcgcacagttcatgccagccgaatgctgacgatgatttctcgccaggtgccagacatcctcaaggcggcgtataacttcggtggactttctcttagtcagatggcagagccctatgtgcagaactggctgaggacgcgcgacagtgtgagcgacctggttcactcgtttgtggtgtacggcctgaagacaaacatgcaaaacgtcttgtctggcgcagctgacccaaacctgtttatgcgtgccgagttcttcaataaggtccgcgacaaccgtggaatgttcatggttgataaagactctgaggagttcttccagtttgtcacgagcttgtccggtgtcgatgctctccaggcgcaagcacaggagcagatggcgtccgtttcaagcatccccctagttaagttacttggcatcacgccaaacggactcaatgcttcgtctgatggtgaaattcgcgtcttctatgactctatccatgccatgcaggagaatctattcagaagcccgctgaaaaccgtgctggaggtcctccagttgaacgaattcggcgagattgaccctgacatagattttgagttcctgccgctttacgagctcacagaggccgagaaagccgaggtcatgaagcatcagtccgaggctgataagaactacgctgaagccggtgtgttcgatatcgacgccatcaagtctatgcgccagtcagacaagagcagtccataccacatgatggaatctgaagatgacgaagattacgaaaacgagtccatcgaagaaggattcgaagacccagaaaacccttcgtccaatcagggctaa

SEQ ID NO: 144868 - DNA, 687 bp, Enterobacter cloacae
atgaacaagtcataccggtactggcttgaagtaggctacaaagacagcatggcgatggatgccagcccggcgaatgagcttaagcgcagactggctaaactcggaaaacagtgggaaggcaagttcaacgagcttgcaaagaaactggcagatcgcttcgttgataagacactccgcaacactgacgtttcgcttcactccgcgttaaaggctggcggctttactgttaagttcacgatgaatgatgagcttaaaggcacgatgcaggccgtcattaacgagaacgtcaaccttattaagtcgatacctgaacactaccacactcaagtggagacgatggtgatgcagtcagtcagccgtggtcgtgacctcgggcatctaaccgatgagcttgaagcgcgatacggcatcacgcgcaggcgtgcagagaccattgctcgcgaccagaataacaaggctacagcagtcatccagtctgagaggcaaaagagcctgggtatcaccaagggcatctggcgtcactctcacgcgggtaaagagccacgccaatcccacgtcaaggctgacggtaaagagtttgagctcaacaaggggctgtatctcgatggtgaatgggtgttacctggcgaagccatcaactgccgttgcacgtggtctccgatcatcccaggactggagagaaaatga

SEQ ID NO: 144869 - DNA, 1269 bp, Enterobacter cloacae
atgccagtcgaagagaaaaatggcaaatggtattggggaaaagaagggccattcgatacaaaagcaaaggcagaagaggttgagcgtgcggcgtatgccaatggctatgcaggtgactcagctctggcattcgacagggcaacggtgcgctcctttgacaaggacggtcgcctgcacatcgaagtgacgccaatcagcaaggctaatatctgcccctactatggccgtgaaattcccaattccaaagcgttaggcctgcagcctgacaaagtttattacctgctgcgcgaccccaaagaactcgcaaaagcggcgaccacattcaacaacatcccgctcctcaatgaacacattccggttactgccgcagaccctcagaagatggctgtggttggctctactggtactgatgccgaatttgacgggacttaccttaagaactcgcttgtcatctgggatgcagactccatcgctggaatcgagacagatgagaagaaagagctttcgtcggcctacagatatgtagctgacatgacccccggcgtacatgaaggccagccatacgatggcgtcatgcgcgatatcgtcgggaaccacgttgcactcgtaatagagggcagagccggatccgacgtcgttgtcggggattcattatcactggagctaaaagagatggcaaaagccaaacaactcgcggctgctctgaagccattcctggcacaagacgcagacctcgaagaagtcgaaaaagcggtcaagaaaaatctcgaactcgaagaggaagagaaagaagagtgcgacgacaagaaatgcaaagcgatggacgaggataaagacgagcccaaaaaagaagacaaaaaggctgaagatgaagagtccgataaaaagggcaaaaaagccgaagatgaagacgatgaagacaaagaggacaaggctgctatggatgccgcattaatccgtaaagctgaagagaatgtcatgggtcgcattcgtcaggcaaacgaagcccgtgagtgcgtacgcgctctagttggcgatgtgagcctggtagctatggactcagctgaagacatctaccgtttcgctctcgactctgtaggcgctaaccataaaggcgttcacccttcagcactgaaatcaatggttgaattcacgatcagccagaaatcagaagctcgcaagccatccgccactttcggtatggactctgcggcaaccacttctttcgctaaggcattccctggcgcaaccaaaatgaaacggagctaa

SEQ ID NO: 144870 - DNA, 480 bp, Enterobacter cloacae
atgggcgactttcaaagtgtaatcaatcagcagcaggcgccaggcgttgaaggtgacttcgcttctgcaaaccctaaggcaagcttgctcgcgggtgaaggtgctctggtagctggcaccaatggcgtggtagtcggtcgattcggctgggtaactaacggcttggtggacaataccggcaccggcgttccggctggcttcgttcatcgcgaaggtcaggcatcaatcactacctggctggctgaagcgtcaatgaccattcagcccggcttccagatgaccctgatgaccgctggcgacttctgggtacgtactgcaggcgcggcaaccgttggtcagaaaatcttcgcaaaactgtctgatggttcagtaaccactggcgcggccggtgcgaccatttccggctatgtagaaactaaatttgttgtcggtagcgcggctgctgctggcgaactggtacagatgggcacctggagctaa

SEQ ID NO: 144871 - DNA, 1041 bp, Enterobacter cloacae
atgaacaacgcagaatttttacaacacaaggcaatggctgaacgggattacggtgtagtccttcctgaagccaaagcttacctgactgatgcagtagcaaatagctactcatacgcgatggatgcccagccaactctggttacctccagcaacgcaggcattccgtggtacttcaccaactatgtagaccctgagctgattcgcattctggttactccgatgaaagcggtggaaatcatgggcgaaactaaaaaaggcgactggactaccatgaccgcgcaattcccggtcgtagaatccactggtcaggtttccagctatggcgactacaacaacaacggccaggtaagcgcgaacgtaaactgggttgctcgtgaatcctacctgtaccagaccatcactcagtggggagagctggaacttgaccgctacggtgaaggccgtatcgcctgggctcagcaactgaacactgcttcagctctgaccctgaacaagttccagaacaagtcttacttcttcggcgttgctggtctgaaaaactacgggattctgaacgaccctaaccttccggcaccaatcaccccaggggcaactggtactggcggcggcactacctgggcaaccaaagacggacaggctgtctacgacgacattcaggcgctgtacaagcagctgatcacccaaaccaagggctatgtcgaacgcgacagcaaaatgacgctggcgatgtctccagagtccgaagccaacctgactaaaacgaacatgtacaacgtgaacgtgtcagaccagctgaagaaaaacttccctaacctgcgcgttgttactgctgttgagtacaacactgcatcaggtcagctggttcagcttattgctgacgatctggatggtcaggacaccggctactgtgcattcactgaaaagatgcgtgcgcatcctgtagtggtagacctgtctgcgtacaagcagaagaaaactggcggtacatggggcgcgattattcgccagcctctggcctttgcatcaatgctgggagtttaa

SEQ ID NO: 144872 - DNA, 348 bp, Enterobacter cloacae
atggctgaaatggtaagcgtaggctgcaaactgcctaacggtctccaggttaccctggacggcaagacggtaattctgaatggggcggccaccaccgccctgcgtggtctcgatggagccattcctgaaggtgcctttggtgtcactcaggtagagaaagacttcatggataagttcatcgcgacctatcaggatgcagcctatatccagaacaacgcggtattcatccaaaaggatgagcgcagcgttaaggctcagggtaaagagctggaaagcgccaaaactggtctggaaggtttggacccggataacccagcgccaggcgtgaagaaggccgaccaaaaataa

SEQ ID NO: 144873 - DNA, 432 bp, Enterobacter cloacae
atgggtgtcgttacgtttgaccccgcagccttcaaactacgctaccctgaattctcctccttagacgacgccctgcttcagcagtatttcacccaggcaactatttatctcgataacacagactgtagtcgtgtgtcagatttggccgtgcgtgcaatgctgctgaacatgctggttgcccatatcgcatttctgtactcgggtgcgaatgggcagtctccatccgggctggttggcagaatagacagcgcatcagaaggctccgtaagcgtacatgctgaaatgcctggcgttaacgcaaactcagcatggtatatgcagaccaaatatggagcggattactggaacgcgacagcaccattccgcaccttccagtatatcagcgggcagtcgccatcaaactatccgtatgggtattaccggaggtactga

SEQ ID NO: 144874 - DNA, 1818 bp, Enterobacter cloacae
atgattatcaatgagttggcctataaggtcacaataaaggccgatgagttcctgaacggcaagaaaaaggttgaagagagcgttaaggagcttcaggacaccgtagataaaagcttcgacgacattgatgaaacctcaaagcagacaggtaaggtagtcgttaagaccggagatgacattcagcgctctacgcggaagacggggcgcgtcatttctgatgccacgtttgatgttaagaagttcggcacgtcggcagccacctcatttcgtggggcatatgctgcagcagctggattccttgggattggtgctgggctgtatggcatcaagcaactgttcacctccacatcaaacgaaatcgtacgcgcaagcaatcaggctaagttcttcggcacagacgttaataagatgttcggccttcgtcgcggattccaacaggctgggcttaacggtgatgcattcattggtgcgtctggcagcgcccgcatggcgctggctaacatcgctgaccctactgtatttggcggccttaccggtgcagcgcagaacctcatggtgcttggcgctcgcacaggactgaatatcaacaaccttggcgacccgagcaaagcccttgctgagttctcccggtatgggaaaagccactcccaagaaaacctgatgcaggtaatggcggcagccggattcgacccgacagacgcagccaagattaaatctggcgagctaaagtctctggtcgactcggaaacgaagaagtcgaacatcactgcagctcaggtgaaagagcaggaaaacttgctggttacccttgggcaactcgacgcgcagtttgctcgtatcagaagcgatctcgcaattgcctttgctcctgaagtcatgagcgcgctgaaacagtttggagattggatcaaagaccaccacggcgacatcatcggattctttcgcgatgccggagaatcagttaagaaactgacagagtcagttggtggggcgaatgcgcttctgttattgctggctgccggtctgaggcttaaccctctagttctcgccgggatggctggcgttcaggcgattaataacatcgctgatgccgcgaaagagaaagacaagaccgattctctgtgggattcgatagttaagcgatggaatgcaggtggttgggctaacgctactggcgtaacatcaaatgatgcagagcagcatgcgcagtcagtaagaagaatgcagcaatcaccgggagaaatggatgatctgctccacggtgtgatgatgacagaatcaagcgggaacccactggcatacaacaccagttcaggcgctgccggtgcttatcagtttatgccagcaactgccagagatatgggattgcgagtggactcaacggttgacgaaaggctagacccggagaagtcacgcgctgctgcttccgtgtacatgcgtcagttactgaagcggtatgatggtaacgttgataatgccctcagagcctataactgggggatgggtaatgttgataagtggatcgccaatggtagtgatatttcacagctaccaaaagaaacgcgcgaatacactggcaaggtctatgggaacatgggaaatgcccgtaactattacgcgactcagggaagaatggcagataacaggccatatcaactggcatcaagtggcgggcagcctcagatacaaaacagtacccatatcaacacagtgaacgttaacagcaatcctcagactgtagattctctcactcagagcattagtcagcaggcaaaaagggcgacaacaaacgcatcgtttgcttctgctgtgaattga

SEQ ID NO: 144875 - DNA, 432 bp, Enterobacter cloacae
atgtataaaaatatcctcgtcccggttgatgtgtttgaaaccggccttgcggacaaggctttgtcccatgctcaattcctcgcgcaaagctcctccgggcagattcatttactcaacgtcatcccgacattttctcctgcactgacgcgcggatttatttccgatgcgcgaaaaatggaagactatctggttaataattcaaaagaaaaactcgctgaactcatcaataaactctctctgaaggaaagcgatgtccagattcatattcgcagcggcaacgtccgcgatgaagtgacgaaactggcagatgaactgaaggcggatgtggtgatcattggctcacgcaatcccaatattcaaacccatctgttgggttcagaggcggcaagtatcgtgcgttatgcccatgtgccggtttttgtggtgcgctaa

SEQ ID NO: 144876 - DNA, 1038 bp, Enterobacter cloacae
gtgaaccgttatttttctctcattcccgttgttattttaataacaacggcttgcgatcagaaagcaccgcaagttaccccgctgccgcggatggtaaaagttgcggatgtcgtcgccattggtgattcacagcagcgcatttttcctgcccgtattgaatccggggattctaccgatctgtcgttcaaacgcggcggacagattgaatcccttgatgtgcgtcagggagccagtatctctcaggggcaagcgctcgcccggctcaacgcccgggaagcgcagcaacgcgtcaacgaacggcagaccgcagcaaccctcgctcagcggcagttcgaccgcttccagacgctggccggtcgccaggccatttcaaaagcggaaatggatatccagcgggccaaccgtgattccgccaacgctgcgctaaaaatcgcccgcgaagagctaagtcaaatgacgctcaccgcgccgtttagcggtattgccgccagcgtcccgatccgtaatcaccaggttgtcgccgccggacagccgatcgtcaccctgacgcgaaccgatctgctcgacgtggtgttcagcattccggagaatctttttacgactattgatatccgcaatgcgcagtatcgtccggtggtgaaaatcaactctatgccggaccgtcagttcaccgccgaatataaagaacataccggtagcagcgacagcaacactctgacctggcagatcattttaaccatgccgcgcccggccgattttccgtcagtgggcggcgtgagtgggaccgtgacggtcaatctggcaaacctgcccgccagcgcgggcgataaagccgtcgtggtgccggttgaagcggtatttaatccggataatcgccagcgcaatgagccccacgtctgggtagttaaaggcgaaggcgaacagctacagcttgaggacagaaaagttggcgtcggccaggtcacctctcagggaggcgtcagtgaactgcatgcgcagcaaccggttcgaatctggacgcgtgaacgaggtttgtaa

SEQ ID NO: 144877 - DNA, 3057 bp, Enterobacter cloacae
atggatatctctcgtcagtttattaacaacccgattcgcgtctggctgactattttactgctgggcatcgggggtattttcgccctgctgaatatcggtcgcctggaagacccggcgtttaccatcaagaccgccgtggtcatcacccactatccgggagcctcggcgcagcaggttgaggaagaagtcaccctgccgctggagaacgcgctgcaacagctgccctatctggacaacgtcagctcaatttcctccaatggtctgtcgcaaatcaccgtcaatatcgcctcgaattatcactccagcgagctgccgcaaatctgggatgagctgcgccgtcgggtaggagacgccgcccggatgttcccgcccggcgtggcctccccctttgtgaacgacgattttggcgatgtctttggcttcttctttgctatctccggcgagagctttaccaaccctgagctggtccgctacgccgagcagctcaggcgcgaactggtgctggttcccggcgttggcaaagtcgctatcggcggtgcgatcccacaacaaatcaatatcgatatctcgctggcaaaaatgaccgcccgcggtataacgctcaaccaactggcggcaatcctcagtcgcttgaacgtagtgtctaacgccggtgagattaaatccggcagcgagtcaattcgcctgcatccaacgggggagtttgaaaatctcgacgagctgggcgatttgttaatcagcccgcacggctcaggttcagcgacgcgattgcgcgatattgccacgctatcgcgcggactcagcgaatctccttccagcatttatcacgctaatggccgccaggcggtcactatgggggtgtcgtttattcccggcgtcaacgtcattgacgttggtcgcgcgctggaaagcaaactggatcagatgtcggcggaaaaaccggcagggatcaaaattgacctgttctacgaccaggctgcagaagtggctcactcggtgaacggctttatcactaacttcctgatggcactggccattgtcgtcggcgtgctgctgatctttatgggcgtgcgcagcggtatcattattgccctgtcgttagcgcttaacgtgctcggtacgctgctgattatgtatctgtggggcatcgagctacagcgtatctcgctgggggcgctgattatcgccctgagtatgctggtcgataatgccatcgtcatcgtcgaaggggtactcattgcccgccagcaggggtcgacgctgctcacggcgattaattatgtgattcgccgctcggcgctgccgctgctgggggcgacggtgattgctattctcgcctttgcgccgattggcctgtcgcaggactccaccggagaatactgcaaatcactgctccaggtgctgctgatttcactcatgctgagctggttctcagcgttaaccatcacgccagtactgattaaatggtggctgttcaaagggcaacagccgcctgctgaaacctcggataccgacccctacagcgggcgcttttatcgcatttatcagcagattctgcacaccctactgatgcgcaaagcgatcaccctgaccgtcatggcggcgctgctggcagcttcaatatggggattcggctcggtgcggcagaactttttcccctcatcgaacacgcctatcttctttgttgacctctggcttccctatggcactgatattgcgacaaccgaaaagatggccagcgatattgaaacctcgattaacggccagccgggcgttgtcaccaccatcgccaccgttggtcagggcagtatgcgttttatcctcacctacagcgggcaacggcaatacagcaactacgcgcagatcatggtacgcatggacgaccagcgcagtattaacgctctgacgcagcatgttgacagctatattgcgcgcaactatccgcaggttaatgccagcagcaaacgcgtgatgttcggcccttccggcgatagcgccattgaagtgcgcatcaaaggcccggatcccgaccgcctgcgcctgctcgccagccaggtgggcgatattctctccgcagacccggccaccgacgtcgtgcgcaacgactggcagaaccgcagcaaggttatccgcccacaatattccgccagcttaggccgcgaactgggagtagataaacaggatatcgataacgcgctggagatgaatttctctggtagccgtgcgggactctatcgcgaaggggctgacctgctgccggtggtggttcgcccaccagccgccgagcgccaggatgctaaccacctgaataatgtgctggtctggagccaaaaccgccagcagtatatcccgctcagtaacgtggtcagcggctttaatctcgagtgggaagatcctttgatcctgcgccgcgaccgcagccgcgtactgaccgtgcagaccgaccccgatccgctgagcaatcaaacctcaggcgatattctggcgcgcgtgaagccgcaaatcgatgccctcgccctaccgcacggctacagtattgagtggggcggcgacgcggagaattcccgcgaagcgcagcaggggttgttcaccaccctgccgctgggttacctggtgatgtttgttatcactgtgctgatgttcagctcgctgaaaaacgcgatcgctatctggctgacggtgccgctggcgctgattggcgtaacgccaggctttttgattaccggtattccttttggctttatggcattgataggcttgcttagcctgagcgggatgttgattcgtaacggcatcgtgctggttgaggaaattgagcagcagaagcaggaaaaagcgcagcaggaagccattatttatgccgccacctcgcgtctgcgccctattctgctgaccgccttcaccaccgttctcggtctggcccctttattattggatgtcttcttccagagtatggcggtagttattatgtttggtctgggttttgctactattctgacgctgctggttctgccagtgatttacgcctgtttccataataagagcctatcccagtag

SEQ ID NO: 144878 - DNA, 966 bp, Enterobacter cloacae
atgaacagtaccggattaaatattattaaaacgctgggatgcatgacggcggtgaccttcttcaccatttataacaccagggatcactatgattacgactatcactggatcctcggttttctgacgtttatttcgaccatagccacgccgctgttttttgtggtggcgggctatctggattcgcagtcacggcacgatgcgcagtggcaaatgggtaaaatcaaaagcgtagttatcgtcttcctgttctggatgacagtgtactatctctgggaaccctaccagcgcggttatcttatccagccgtggtttgtttttgcctttattgtgatttacacctttcatccgcttatcgagtggctcagccagcgacgcaagctatttttcggcgtggtatttgcgctgctgttgctctcatatggctacgatctgctgtccgcgctgtatcctgatgttcatgcgctgagcctggccccgcagtaccgtttgtggacctggctgctgttttacctgaccggccagctgttcagcgatccgctggtcgccagttggctgacccgcgagagagtggtgaaaggcgcgatgatcgccattccgtttatttatctcttcacctggttttacgagcgccatttcttcttcgccctgtttaaggctgacagaaatgcgttcattcttaccggaccacaaatttatattttggtggtggcgctggtgattgccgccaacggcgtgcggtttcgtaaaaacagcgagtttaaagagaccattctggcgactatcagcaaaacgatgaccggcgtctatattcttcactactccgtttttcatctgctgaccgcgcttatcccaattagctcgctgggaaccaagttaatgctgattgtcctgacgttcatcgcctcggtgttaatttcaatgctagcgctgtccaattcgctggtgaaaaaggtgattacgatttga

SEQ ID NO: 144879 - DNA, 576 bp, Enterobacter cloacae
atgcgacgttgtctgcggatagtgtggggaactctgtttattttcgcctttgcggtacaggcggaaacaaaggtttatggcgaacaacgcgtcagcggctggtggaactggctaaaagacgatgtctcgcaaacctggaatcagccgcaaaactacgacctgtatctgccatttctcagctggcacaaccgctttatgtacgataaagagaaaaccgataactacaatgagatgccgtggggcgggggatttggtgtctcaagatataacgaagaaggtaactggagctcactctacgcgatgatgtttaaggattcgcacaacgagtggcagccgattatcggctacggctgggagaagggctggtatctggacagtagtcgcgattttcgcctggggcttggggtgaccgccgggatcaccgcccgagaagacttcgccaactacgtaccgctaccgattattttgccgctcttttccgccagctatcgccgcctgagcgtgcagttcacctatattcccggcacctacaataacggcaacgtgctgtttgcgtggctgcgctacggtttttaa

SEQ ID NO: 144880 - DNA, 432 bp, Enterobacter cloacae
atggccgtcatccccttctttgtaaacaaggtgggagcgaaaaaagcgctgattgcaggaggcatgatcatgatctgtcgcattctggtgtcagcaacctcagaaagcccttacatcatctcgctgattaagctatttcatgcgattgaagtaccgctgtttgtgatctcggtattcaaatacagcgtgtccaactttgattctcgcttatcttccaccatcttcctcgtgggattccagatcgccagctcgctgggtatcgtgttgttatcgatcccggtggggatgttgtttgatgcgtttggctaccattttgtattctatctgttctccgccatcgtctcggtgattctgctgtttggcgtggtcttcctgagcaatggacgtaatacaggcccacgcagtggtgtggtgcaaaacgaaaccttataa

SEQ ID NO: 144881 - DNA, 570 bp, Enterobacter cloacae
atgaatatctatgttgttaccaataataatttcatgcttgaaggtctgaaatgtatgtttagcgacaacagcctctccgtcaacagggttttattttcccggatcaccgaaattgctttcagcaacagcgatgtggtgattgtggagtcagagctgaaaacctgcgatgccgggcgtctcaaacacctgcacatttcaccagtcaatatcatctttttattaaaaccgcggtcaggaatgaggggggcagatcgcgaagcggtattcattgataccgaattaacaggtaatgaatatctcatgataaggcaggtttttaaaaaaatgcggattcatctgaagagggaaaagttggcgtttaccaaaagagaagcgcatatcatccatctgattttaaatggctactcgctggtggaaatttcccgccgcctgctaatctccataaaaacggttcagtcttatgtcaatattattttgcataaactgaatgccacaaaaataagtgaaatataccgttgcaaaagcctcatcattgacagctttgtcaggaaaaatttgcatcttcaatga

SEQ ID NO: 144882 - DNA, 1644 bp, Enterobacter cloacae
atgacggacagtaaacgcgcaggggagcctgcgcaacaaagtgatttgattaacgtcgctcagctgaccgcgcagtactacgtactgaagccggaagcgggcaacgcggagcatgcggtgaagtttggcacctctggccatcgtggcagcgcagggcgccataacttcaatgagcagcatattctggcgatcgctcaggcgattgcggaagaccgcgcgaagaacgggattaccggtccctgctacgtaggtaaagatacccacgcgctctccgaaccggcctttatttcggttctggaagtgctggcagccaacggcgttgatgttatcgtgcaggaaaacaacggttttaccccgacgccggccatttccaatgccatcctggtgcacaacaaaaaaggcggtccgctggcggacggcatcgtgattacgccgtcgcataacccgccggaagatggcggtatcaagtacaacccgccgaacggcggcccggcggataccaacgtcaccaaagtggtcgagaatcgcgctaacgaactgctggcctcgggtctgcagggcgtcaggcgcctctccctcgacgcggcactggcatccggtcatgtcaaagagcaggatctggtgcagccgtttattgaaggactggcggatatcgtcgatatggcggcgattcagaaagccggcctcaggctcggggtcgatccgctgggcgggtccggtatcgaatactggaagcgtatcgccgggcactacaagctcgatctgaccatcgtcaacgatcacgtcgatcaaaccttccgctttatgcaccttgataaagacggcgccattcgcatggactgctcttcggagtgcgcgatggcagggctgctggcgctgcgcgataagttcgatctggctttcgctaacgatccggattatgaccgtcacggcatcgtcacgccggcaggtctgatgaacccgaaccactatctggcggtggcgattaactacctgttccggcatcgtccgcagtggggccaggatgtcgccgtcggtaagacgctggtctcctcggcgatgatcgatcgcgtggtgaacgacctcggccgtaagctggtggaagtgccggtgggctttaaatggtttgttgacggtctgttcgacggcagcttcggcttcggcggcgaagagagcgcgggcgcctcgttcctgcgttttgacggaaccccgtggtcgaccgacaaagacgggatcatcatgtgcctgctggcggcagaaatcaccgccgtcaccggtaaaaacccgcaggagcactacgacgagctggccgcccgcttcggcgcgccaagctataaccgtctgcaggcttcggccacttccgcacagaaagcggcgctgtcgaagctgtcgccggaaatggtcagcgccagccagctggccggcgacccgatcaccgcacgtctgaccgccgcgccgggcaacggcgcatcgattggtggtctgaaagtgatgaccgacaacggctggttcgccgcacgtccgtcaggtacggaagacgcttacaagatctactgcgagagcttcctcggtgaagcacatcgtaagcagatcgagaaagaagcggtggaaatcgtaaatagcgtgctagcagcgcaccattag

SEQ ID NO: 144883 - DNA, 2448 bp, Enterobacter cloacae
atggaaccacgcttaagttatatttcacccagtctgaatgaagaagcgctacagcatgctatcgcttataagctcatgtttattcttggtaaagatccctcacttgccaataagcatgaatggctcaacgccacgctgttcgccgttcgcgatcggctggtagaacgttggctgcgggcgcatcgggcgcggatctcgcagcaggcccggcaggtttattatctgtcgatggagtttctcatcggccgaaccctctctaatgccttactgtcgctgggcatctatgaggatgtgaaaacggctctggcagggatggggctggatctggaagagctgattgatgaggagaacgatccggggctgggcaacggcggtctcggtcgtctggcggcctgttttctcgattccctggccacactggggctgccaggccgcggctatggtatccgctacgactacggtatgttcaagcaaaacatcatcgacggccggcagatggagtcaccggactactggctggagtacggtaacccgtgggaattcgagcgccataaaacccgctataccgtgcgctttggcggacgtgttcaacatgagggcaaaaactcacgctggctggaaaccgaagaaattattgccgtggcctacgatcagattatcccgggttatgacaccgatgccaccaacaccctgcgtttgtggagtgcccaggccagcagtgaaattaatctcggtaaatttaaccagggggactatttcgccgccgtggaggataagaaccactctgagaacgtttcccgcgtgctttacccggacgactcgacctattccgggcgtgaactgcgcctgcgtcaggagtatttccttgtttcggcgacggtacaggacatcctcacccgtcattaccagctgtatcaaacctatgacaacctggcggataaaattgctatccacctcaatgacacccatccggtgctgtcgatcccggagctgatgcgtctgctgattgacgaacaccgcttcagctgggatgacgcgtttgaggtgacctgtcgggtcttctcctacaccaaccataccctgatgagcgaagcgctggagacctggccggtcgatatgctggggaaaatcctgccgcgccatttgcagattatcttcgagattaatgactattttctgaaaacgatgcaggagcactatcccgatgatatggcgttgctgagccggacctcgattattgatgagtccaatggtcgccgcgtgcggatggcctggctggcggtagtggtcagtcacaaggttaacggcgtgtcggaactgcactcccggctgatggtggagtcgctgtttgccgatttcgccaaaatctttccgcgacgcttcaccaacgtcaccaacggtgtcacgccgcgccgctggctggcggccgctaatccgtccctttccggggttctggaccgttatattggccagacctggcgcacagatttaagtcagctgagtgaactgggggaatatcaggattatccgctggttaaccaggccgtcagcgaagccaaactggcgaataaacagcggctggccgattatattgcccgccagctgggggtggtggttaatccgaaggcgctgtttgatgtgcaaattaagcgcattcacgaatacaaacgccagctgatgaatgtgctgcacgtgatcacccgctataaccgtatcaaggctgacccgcaggccgactgggtgccgcgagtggtgattttcgccggcaaagccgcatccgcttaccacacggcaaaacagataatccatctgattaacgatgtagccaaagtcatcaacagcgatccgcagatcggcgacaagttaaaggtggtgttcattcccaactacagcgtcagtctggcgcagaccatcattccggccgcggatctttctgagcagatttcgctggcagggaccgaagcctccgggaccagtaacatgaaattcgccctcaacggcgcgctgaccattggcacgctggacggcgccaacgttgaaatgctggagcacgtgggggaggagaatatctttatcttcggtaataccgccgaacaggttgaggcgctgcgcagcaacggctaccagccgcatgattactacgaccatgatgaagagttgcgccaggcgctgacccagatggggaccggggtgttcagcccacaggagccggaccgctatcgcggtctgctggattcgctgattaactttggcgaccactatcaggttctggccgattaccgcagctatgttgactgtcaggacagggtggatgcgctctaccgaaccccggaagagtggaccgccaaaacaatgcacaacattaccaacatgggctatttctcatcggaccgtacggtgcgggagtatgcgcaaaagatctggtatatcgacaaaacgcagctctag

SEQ ID NO: 144884 - DNA, 1407 bp, Enterobacter cloacae
atgttccctctgttgaaaacgggggggctggctgatgtgaccggtgctctcccggcggcgcaaatagccgagggcgtggatacccgcgtgctgctgccggggtttcccgcgatccgcgacggagtcggggaaccgcaggtggtggccagcagggagaccttcgccgggccgatgacactgttgtttggcgactttaacggcgtgggcatctatctgattgatgccccgcatctctatgaccggccgggtaatccttatcatgacccgcagatgcaggattatcccgataacgtcctgcgtttcgcgctgttgagttgggtcgcggccgagcttgctggcggtctggatccgttctggcggcctgaaatcgtccacgcccatgactggcatgcgggcctcacgccggcttatctggccgcccgcggcaaccccgccaggtcagtgtttacggtgcacaacattgcctatcagggcttgttcctcgcccggcatatggcggagatcgctttaccgtggtcattcttccagatgcatggggtggagtttaaaggacagatctccttccttaaggcgggcctctatttcgctgaccatatcaccaccgtcagcccgacgtatgcccgtgaaattaccgaaccgcagtacgcgttcggtctggaagagttgctgcggcaacgtcagcgggaagggcgactgtcggggatccttaacggcgtcgacgaaagcatctgggatccgcgccgcgatccgctgctggctgcgccttacgaccggaactcgctggctgagaaagcgaagaacaagcagcagctgcagacgacgctggggctgaaggaggacggccgggcgctgttgttcaccgtcgtgagccggctcaccagccagaaggggctggatctgctccttggcgcactgccgggaatcattgcgcagggagggcagctggcgctactgggatccggcgacccggatttgcaggcccgttttcttgccgctgcggcgcaatactccgggcaggtgagtatccggatcggttacgacgaggcgctgtcgcatcagatgattggcggcgccgacgtcatcctggtgcccagccgttttgaaccctgcggtctgacccagctctatggccttcgctacggcacattgccgctggttcgtcgcaccggcggactggcggataccgtcgccgactgttcgctcgaaaaccttgctgacgggatcgcgagcggatttgtgtttaccgacagcgagactgaatcactattacatgccatccaccgggcctttgtcctgtggtcccgtccatcgctgtggcggtacgtgcaacgtcaggcaatgagcatggattttagctggcaaattgccgctaagtctttccaccagttgtatcagcgtattatttaa

SEQ ID NO: 144885 - DNA, 1284 bp, Enterobacter cloacae
atgagtaaaattgaatatactgacaacgtaatgctgtcgcgccagttaccgcttaaatccgtggccctgatcctcgccggcgggcgcggaacccgattaaaagacctgaccactattcgcgcaaaacctgcggtgcattttggcggtaaattcagaattattgattttgccttatcaaattgtattaactcaggaataagacgtattggggttattacacaatatcagtcgcattcactggtgcagcatattcaacgcggttgggcattctttaacgaagaaatgaatgagttcgtggatttattaccggcacagcagcgggtgcatggggagaactggtatcgggggacggcggatgctgtgacccagaacctggatattatccgccgctatgatgcggaatatgtcgttattctggccggggaccatatctataaacaagattattcgcggatgctgcttgatcacgttgaaaaaggggcgcgctgcaccgtggcctgcatgccggtcccggttgaagaggcaaacgcgtttggcgtcatggccgtggatgagaatgacaaaatcattgaatttgttgaaaaaccggctaatccacccaccatgcctggcgatgaaacccgctcgcttgccagtatgggcatttatgtgtttgatgcggaatatctctaccagctgctggcagaagacgatcgggatgaaggctccagccatgattttggcaaagatattattcccaaaataacggcggcaggtgaagcgtatgcgcatccgttcccgcgctcctgcgtacagtccgataataatgccgagccatactggcgcgatgtcgggacactggaggcgtactggaaagcgaatctggatttagcctctgtggtacctgaactggatgtttatgatcgtaactggcctatccggacttatgtcgagtcgctacccagcgctaaatttgttcaggaccgttccggcagtcatggcatgaccatgaattctctggtctccggcggctgtattatttccggctcggtggtggtgcagtcggttttattctccaaagttcgcattaactcgttttgtaatattgattcgtcggttttattaccgggcgtctgggtcggtcgctcctgccggataagacgctgcgtgatcgacaggggatgtgttattccggagggaatggtgattggcgaaaatgccgttgaggatgcgcagcgtttttatcgttcggaagaggggatcatcctcgttacccaggaaatgctgaaccgacttgaactatga

SEQ ID NO: 144886 - DNA, 381 bp, Enterobacter cloacae
atgcatccttctgacggctcttgtcagcagcagacagaccttgagataggtaagcgtattgcctcgttcacgtgggtcgagaaatttgttctggttgctggcgctggcaaaccatttgccctccttttcacggccttttatgcccagaaaatcatcgtttttagagccgtatttaaagaaaaagtagcttttgtaggttggaaccacgatgccgattttatccccatgctcaacaacgtgggttggccagcaaaacagctccttccagtattcacctccggactggccaaaaatgttttgcctgtagcgtccggtgatcatatcaatccgatcccgggcctgctcgttctgcggtttatgataaaaagcgacgacgtatga

SEQ ID NO: 144887 - DNA, 165 bp, Enterobacter cloacae
atgtcagcatacgatgaaattatgaacgcactcgccttctacttcgtcgatggagaaggcctaaacccaagcgaggaaagcatccgtgaaattatcagccaggagcatgacccaattgagacgattgctaaagcgttagacgattaccgcgcatcgaagtcatga

SEQ ID NO: 144888 - DNA, 429 bp, Enterobacter cloacae
atgaaacgcacacccttctaccgcaggcccggtcgaaccgggcaattctccggccttcgtgagcgcgttatctggatgattcagacgcgcggccgcccggtaaccggcagcgaaatcgcagagaagtttggcgtaacgctcatcgagttcaaccgggtcgccaatggcattacccgcggcaccggacagatagcgcagatcgttgagtcgaaaaaatggctcaacgaggacggcatctgcgaccggacattcgacctcgtcacgaagccgaaggttgtaacgccacagggtaaatcgcggctgttcacccggcgcgccattgcgcaatctcaggaaggtcgacggcaggagtgcattgcgcgtgctgcccgccgtcgccgcctgattgcccagggcctctacatcgacgaaatggagtcagtgctatga

SEQ ID NO: 144889 - DNA, 462 bp, Enterobacter cloacae
atgcagatgactggcatatgcgtatgtctgccctatgcagatgcgcggcatatggatatgctgtgcatatcctgctttctcatttttccaccgcagatccgaaaactcccagtcccggacgtctgcaaagttgacctgtttcccacagtcccggatgtctgtaaagttgacctgttttccacagtcctggccgtccgcggagttgacctgtttcccacagtcccggacgtctgcaaagttgacctgtttcccacagtcctggccgtccgcggagttgacctgtttcccacagtccgggccgtccgcggagttgacttgtttcccacactcccggccatccgtgaagttgacctgtttcccatagtccgggccgtccgcgaagttgacctgtttcccatagtcctgagcgtccataaagttgacctgtttcccacagaggatggaaaactcttcttgtgctga

SEQ ID NO: 144890 - DNA, 168 bp, Enterobacter cloacae
atgttgaatggttgtcactgggagagcttggcgatttcatacgtggcaatggactacagaaaaaagatttcgttgaaagtggttttccagcaatacattacggtcagatttatacaaggtatgggttatcagctgataaaacatttacttacgtgcttccagaactaa

SEQ ID NO: 144891 - DNA, 381 bp, Enterobacter cloacae
atgaagaaagataatctgagtaaaaaagatgaaacgatgatattcgccatttcagcaacgctaatgttgtatgtggacaggatatacagcatggcaagtgtaaacaaagatgatgcaatgatttatgtaaatgatgaagatgttgttgagtttgcactacgaatccacatgaaggaagtattaactgagtttgagtattacaaggctgcttatggtacaggaaaggaaaagaatgaatatataaatataacagagctattaaaaagggtgatgttttttcatgatttatatgtcaaggatatgttgataagaaatatagagtcgggacgatcttttgatgattatagtgttttggactgggatatggacataaatagataa

SEQ ID NO: 144892 - DNA, 291 bp, Enterobacter cloacae
atgactaaaaatattgaaagtaaaaatacatctactgagttgttctatgatcttgcaaagcgttcttttgaagcgagctggaaaacaatgcaggatatgtgtagtgacagcatttcgcatcttgtcgatgacgctgattttatcagtgcatttatacggctcacgattaatcatgtttgtcataactttgacaagtttactacgcaggaaggtaatcaaggaaatattgaagaagttaactacgaggaggtagcagaacgacttgtacgtaatgcttgggtgttttgttaa

SEQ ID NO: 144893 - DNA, 312 bp, Enterobacter cloacae
atgaataaagatctgaaaaaagaagcaaacaagatattactgcatttatctaaacaatgctttgaattgcgtgtgagttctattattcagaaccatcctgaacaagtagaacaactcaagcatgaagaaactttcatgatgaatacttataaggacagtattaaagtagcaaaacagatgttccctaaagtcgtaaggaatacattctttgatataaagttatcaccaagactcattgataacgattttatattgaaagcattaaaggcatttcataaagaaatggattttatgaaagattctcaaaagtag

SEQ ID NO: 144894 - DNA, 330 bp, Enterobacter cloacae
atgaaaaatataaatgtgcctgaaatatcatttatctttgataatgataaaactgaagttttctcaagaatggcaatggataacttagctctttatgtggaaaacatgtttaagataatgggtgatcaatttgaacgtcacctttatgataaaaaatatatgaatatggttatggatcatattatttatatcacaaaaccagacttcctcaagtgggtgagagacaataatgttggggaatgtatttttttgattgatgaagttatggaagatttaaaatactcttatagagagttcaaaaaaatctatcctaaacttggcattaaataa

SEQ ID NO: 144895 - DNA, 219 bp, Enterobacter cloacae
atggttcaaaacaaaacagataaaactttaaaacttattcgcttatcagaagtaataaggaaaaccgggttcggcaagacgtggatttataaacttatcagcgcggggaaattccccaaacaaataaaaatcggtgaaagagctgttgctttcattgaaagcgaagttgatgagtggatttataaagctataaccgcttctcgtaatacatctaactaa

SEQ ID NO: 144896 - DNA, 2694 bp, Enterobacter cloacae
atgaaaacaggaaaacctgaacgtccgtattatcaacaaaccgttgacgaaaccctgtcgaatatccactccaccctggaaggccttagcggcacagaggcatcagcccgacttcagcagcacggtgagaatgcgttaccgcaaaaaaagggtaaacccggctggctacgcttcctggcgcattttaacgacgtattgatttacgttctgctggtggccgcgttgcttaagctctttatgggccactgggtagacatgtttgtgatccttggggttgccatcattaacgcgctgattggccatatccaggagagcaatgctgaaaaatcgctgcagagcattcgcaatatgctctccagcgaagccgtggtggtacgacaggggaatcacgaaacgatccccaccacggcgctggtcccgggagatatcgtggtgatccgcgccggggatcgtatccctgcggacctgcgcgtggttgaagcgcataacctgcgcgtggaggaggccatcctgaccggcgaatccaccgttgttgagaaaaacagcgatgcgttaagcggggaactgcctttaggtgaccggtataatctgctctactcaggcactaccgtcagctccggcggcggtaaaggcgtggtggtggcaaccgggggcgagaccgagctgggccacatcaatcagatgatgtccgacattgaaaagcaccgcacgccgctgatggtgcagatggataagctcggtaagaccatcttcatcactatcctggtgatgatggtggcgctgtttgtctttagcctcctgttccgggatatgccggtttctgaactggtgctgtcgcttatcagcctcgccgttgccgccgtgccggaaggcctgccggccattatttccatcatcctttcgcttggcgtacaggccatggcgcgtcgcaaggccattattcgcaagctgcctacggttgaaacgctgggggcgatgacggtcatctgctcggataaaaccggcacactgacgatgaatgaaatgacggtcaaagcggtgattaccgctgacacgacctatcgcgtagagggcgacagctacgaaccggtggggaatattcaccccgtagatgacccgacgcccgtcagcgtgacgcagggttccctgctggaacgctacctgcgcaccattgacctctgcaatgacagccagctaatcaaagacgagcaggggctgtggaaaatcaccgggggtccaaccgagggcgcgcttaaggtgctggcggcgaaaatcccgctcccaccgctcgacaccgaaatgcgcagcaaaatcccgtttgattcacagtataaatacatgtccacgctgtaccggctgggcgatgaagaggtgattttaatcaccggcgcgccggacgtcctgttccgcctctgccagtatcagcagacgaatgacggactgcagccgttcgatcagccttactgggaagggaagattgaagagtatgcccgggaaggtttgcgcatggtggccgcggcctggaaacctgcccgcgagggacaacgcgagctggatcacccggacctgcatgatggcgtgatcctgctgggtattgcagggatgatggacccgccgcgtccagaggccattaccgccattgccgactgtctgcaggccgggatccgcgtgaaaatgatcaccggcgaccacccgcaaacggcaatgagcattgggcaaatgttggggattggtaacgccgcaagcgctatcaccggacgtgagctggaagcgatggacgatcgtcagctgagcgacgccgcgcagcagtacgatattttcgcccgaaccagcccggaggataaattccgccttgtgcaggctctgcaaagtaagcaggaagtcgtgggcatgaccggggatggcgtaaatgatgcccccgcgctcaagcgggcggatgtgggtatcgccatggggattaagggaacggaagtgaccaaggaagccgccgacatggtgctaacggatgacaactttgccaccattgccagcgcggtgcacgagggacgccgggtttacgacaacctgaaaaagaccattctgttcgttatccccagcaacatcgcgcaggctctgctgatcatcatcgcgctgctggcggggaacctgatcccgctgacgccggtcctgattctgtggatgaacatggcgacgtcggcaacgctgtcgtttggcctggcgtttgaagcgggtgagaaggacatcatgaaccggccaccgcgaaaggctaatcttcatgtaatggaccgctatgccatctggcgcgtcgtgtttgtcggtctgatgattgccattagcgccttcgtgctggaagcctggcttcagccgcgcggttattcggcggaatttatccgcaccgtgctgctgcaaaccctggtcactgcgcagtggttctacatgctcaactgccgcgttaatgacggcttctcgctgagcaaaggcctgctggcgaacaaagggatttggatcgtgagcggcttactgctggcgttacagcttcttatcatttacgcaccgttcatgcagatgctgtttggcaccgaagcgctgccgttccgctactgggtcatcaccttcctgattggttttgtgatgttccttattgtcgaggcggagaaagtgctgacgcgcaggtggcgcaaaaccgaggcgtaa

SEQ ID NO: 144897 - DNA, 504 bp, Enterobacter cloacae
atgtcgcgccagtgcacgcattatgggcgttggcctcaacacgattttacgacacttaaaaaactcaggccgcagtcggtaacctcgcgcatacagccgggcagtgacgtcatcgtctgcgcggaaatggacgaacagtggggttacgtcggcgctaaatcgcgccagcgctggctgttttacgcgtatgacaggctccggaagacggttgttgcgcacgtattcggtgaacgcactatggcgacgctggggcgtcttatgagcctgctgtcaccctttgacgtggtggtatggatgacggatggctggccgctgtatgaatcacgcctgaagggagaactgcacgttatcagcaagcgatatacgcagcgcattgagcggcataacctgaatctgaggcagcatctggcaaggctgggcaggaagtcactgtcgttctcaaaatcggtggagctgcatgacaaagtcatcgggcattatctgaacataaaacactatcagtaa

SEQ ID NO: 144898 - DNA, 1239 bp, Enterobacter cloacae
atgaaaattatcaacgcacgcctgcgccataaagaatcgctttataccctcgacttagatgacggcgtgatcaagagcatcactccgcaggccgccgtgcagacggctgacgccagcgatatcgacgcgcaacaaaagctggttatcccgccgttcgtcgagccgcatatccatcttgatgccaccctgaccgcgggcgagccggagtggaatatgagcggcacactgtttgagggtatcgcccgctggagccagcgcaaagcgagcgtaacggttgaagatacgcgccagcgggcgctgaaaaccatcggtatgttacgcgataacggcgtgcagcacgtgcgcacccatattgatgtgaccgatccttccctgacggcgcttgaggcgatgctggcagtgaaaaaggaggcggcccagcttatcgacctgcaaatcgtcgcctttccgcaagaaggcattgaatccttccccggtggccgagagctgatgacgcgcgctatcgagatgggcgccgacgtggtgggcggcattccgcactacgaaaatacccgcgataaaggcgtcagttcgctgggctttttgatggatctggcccagcgccatggctgtctggtcgatgtgcattgcgatgaaatcgacgacccacaatcacgcttcctggaagtgctggcggaagaagcccgggtgcgtgggatgggcgcacaggtcaccgccagccatacctgcgccatgggctcttacgataacgcctactgctcgaagctgttccgcctgcttaaagcgtcgggcatcaactttatctcttgtccaaccgaaagcattcacctgcaaggacgcttcgacacctggccgaaacgtcgcggcgtaacacgggtggcagagctggaccgcgccgggatcaacgtctgttttgcgcaggactccattcaggatccgtggtatccggtgggcaacggcaacatcatgcgtattctcgatgccggtctgcatatttgccacatgctgggatatgaggatttgcagcgctgcctcgatctgattactgataacagtgcccgtgcgctgtgcttaggtgataactacggcattgccgaagggcgcccggcgaacctgcttatcctagatgcggaaaatgactacgatgcggtgtgccgccaggccaaagtgctgacctctgttcgtcacggtaaagtcatcatgcagcgccagccggaagagatttgctacccggtctga

SEQ ID NO: 144899 - DNA, 1236 bp, Enterobacter cloacae
atgagcctgacggtcagcgaaatcctcgccctggaggaactctcccccatgcgcctgcgtgccggtaaacaggggctgcaactggcggttcgctggtactacgtggcggaaaatgaaaatatcgccgaatggatcatgggcggggagctggtctttatcaccggcatcaaccatccccgcgatgaagacaacctgatccatttactgatggaaggcaaacagcgcgggatagccgggatggtgatcctcaccggcgatgcgtatattcaggcgatcccccctcgcctgatcgcactggccgacgagctgggcattccgctgatcgaacagccctatctgctaaagatggtgattgtcaccgaacgcatcggcactgcgctggtgcgcagtgaaaatgccctgcaatcgcagcgcgatattctgttgcaactgttaaccggcgattttcccgatctgcacatcctgcagcaacgagctatccaccaacaactggattttagccgccccctgcgggtagtggcattgcgtcttgaggggatacaaaacctgtttcgccagtttccacccgggcaggccgaggcctggttacagcaggcgcgacgtaccatccgtcagcgattgcagcagcagctcaatcaacaggagaacccctttccgctggtcgagcgcagcaatatgtttatcttcctgctgccggatgaggacggtgagttttatcagcagaaaaagtggttagcacagtggctgctcgcgctggcggaaggtgacgacaggctgtcgctactgtgtggcctttccgctcgggtgcagcaattacaggactatcagcgcgcgctgtcgcaggcgcgtcaggccctggatcttagcgatactctgcgcccggcccagcgcattaccgactatcaacaactgggatttatcaagctcctctctgccatcggcgaccctgcgctgctgagcgattttatgcacgacacccttggctgcctgatagaacgcgatcgcaaaagtccgtggctattgatggagacgctggaaacactgctccaggagaacgggaacgtggtcagagcagccgagcggcttggcattcaccgcaacacgttacatcaacgcatccaacgtattgaaaagctgaccagctatctgattagccatccgcaattccacctcaacgcctcggtcgcgttaacgatctggcgtatgtcacaaaaccatttacgggaatactcatga

SEQ ID NO: 144900 - DNA, 921 bp, Enterobacter cloacae
atgcatttttgtatgaatctaaatattccatgggaatggtatcgaaccttcctggcggtgatgaaagaaggttccctctcgggggcagcacgcatgcttgccatcacccagcccactgcggggcgacacatagcagcgctggaatccgcccttggcctggttttgtttacacgttcgcaaacgggcctgcagcctacggatgcggcagtcgcgctgcaaggccatgcgcaagcgatggaaaacacggccagtatgattgagcgttcggctgccagcttcagtgcccactccgccgggttacatggcgtggttcgcgtatcggcgagtgaaatcatcggcactgaggtgctgccacctctgtttgcacgaattaaagaagattatccgcagcttaccctggaactggtgatctctaaccgaatgcaggatttattgaaccgggaagcggatattgcggtacgcatgagcacaccggtgcaggaacaactgattgcgcgtcggttgggcagtattgaaattggtttgcatgcctcgccgtcttatctggcacgccacggtacgccggagagtattgacgcgttgttcacccatacgcttgtgggctttgataaaacgacgccctttattttacaggcactgaaacactttcctcagttgaatcgtgaacgctttaccgtacgcactgacagcgatgtggcgcaattgaaccttatccgcgcaggtgcgggtataggaatgtgtcaggttcaactggcatatttccctgttccgttggagcgagtgatgcctggtttctttgcctatcatctcgacacctggctggttatgcatgaggacttgcgccacagtaaagcctgtaaaacggtgttcgatattctcgccgcgggcttacagacatatatcaataatgcaggtatgtaa

SEQ ID NO: 144901 - DNA, 1251 bp, Enterobacter cloacae
atgactagaccgattgctgttgatttatttgctggagcgggtgggctgagtctcggtttcgagcaagctggctttgatataatggcatcagttgaaatagatccaatacattgctctgctcacaaatataactttcctatgtgcaaaacgatatgtagaagtgttgttgatgttaccggagaatacgttagggaagtttcaggtattggtgagaaagagattgatgtagtgatcggaggcgctccctgccaaggcttttcattaataggaaaacgcgcgcttgatgatgatagaaacaaactggtctatcactatgtacggctggttcttgagctaaagcctaaatactttatttttgaaaatgtaaaagggttgacggttggtaagcataagcagtttttagtagagataatggatgcatttaaagatggcgggtacgacgttgtaagcgattataaagtgctaaacgcagctgattatggagttcctcaagatcgccgtcgtcttttcttaatggggggaaggaaaggaattgctctgccatcataccctgagccattatccattagaacgacggttggggatgctattggggatattcctgatgcggaaaaatatcctgagctatgggatagagattgggtttatgctaaatttggtgagcaatcattatactcatcctatttgcatggcgtaggaaaagatcctagtgattttagctacccaaggatttttaataaagacaaattaacgtgttctttactgacagatcactctgacatttctagagggcggtttgttgaaactttgcctgacacggtagaaccaatcagcaggtttaaaaagctctcgatgaatgggctatgtaatactttaagggcaggaacagcaagtgacagaggtgcttttacatctcctcgtcctatacatccgatctatcctagggtcatcacggtcagagaggcagcaagactgcattcatatcctgattggttcagatttcatgtgactaagtggcatggatttagacaggtcggtaatagtgttcctcctatgctagctagaagtgttggcttgcagattatgaaggttcttggtgttacgccaaaaaaaccaacgaagaaaatcaaactcggtgatgaaagtttggttgctatttctatgtccgatgctgcatctatgtttggtgtgtcatcaaatgtaattgctaagagaataaaaaatagtaacaaggaggttgtttgtgagtaa

SEQ ID NO: 144902 - DNA, 810 bp, Enterobacter cloacae
gtgagtaaggataaaaaagaaaggtccaaaaatagataccatcagttggtagaaaagatatttttcgataaatatgttgatggtgacttagaggttttgtttgaaaggttagagataaacagtgctgcaaaagatttaggtatagaactcccatctaatgttggtgatgttatatattcaatcagatttagaacgcctatgccagaaagtattctgttgactcagccagaaggtaaggagtggattattgagctggctggtaggtcaaagtatcgatttagattagtaactattagtaggattttgccaaatcctaatatggtggcaataaaaattccagacaataccccggagataattacaggttattctttagacgacgagcaggcattgctggcgaaggtgagatataaccggctaatagatatatttctaggtataaccacatattctttacagaatcatttaagaactacggtgaagggaattggtcaaatagagatcgatgaactttatgtaggtatagataaatacggttgccattatataataccagttcaagcaaaaggtgggacagatcaaatatcaatggtgcaaacatcgcaagatacagcgtggtgtgaacaaaaatacccaaatgttagatgtagagctatttccgctcagtttgtttcgagcgatttgattgcactgtttgagctaaagatagacgaaggacaagtgaaattgattgaggaaaggcattacaaactggttccggcaaaagagttagatagctctgacatctcaaactaccgcatgtctgtataa

SEQ ID NO: 144903 - DNA, 237 bp, Enterobacter cloacae
atgaacagactgacaaacctgacacctgcagagaaaaaatttcttgatgatgctattgccgcagctgagagagcgtcaggcaaaaagctaaatcagccgaaccggcatatcgtcctgaacagagcgcgtgcgcagattgagttgcagcgttacgccgaccgccagcgtgcattacgtgaggatgagcggcagcagtccgagtttgcctggtcacgtccgcgcgcgccgcgccgctga

SEQ ID NO: 144904 - DNA, 240 bp, Enterobacter cloacae
atgcccgtatcagccatgcgccataaaaaaaccgtcagtgtgacgctcgagcctgcgcttttgcgtcaggcccgcgaagcagggattaatctgtctgccacgctcgccaccgccctgaaacatcagatccgtgagtcagaagcggagcgctggaaacgcgctaaccgtaaggcaatccaggaactgaatcgtattacggacgaacacggcttactctctgacgatcacaggacgttctga

SEQ ID NO: 144905 - DNA, 309 bp, Enterobacter cloacae
atgcagttcatggtgtaccgcaataacggcaacagccgggcttatccctatctgctcgatgtacagagcgatattatcggcgaactgaatacccgcctggtgatcccgctgtttctgctcgatgaagtgagcggacggcccgcccgccgcctgaacccggtgctgaatgtggacggtgaggattttctggtcatgacgcatgaaatggccagcgttcgccagtcacagcttggggaagaggtggtgagcttacgggagcagcggcaagccatcaagaatgcgctggattttctgctcgacggtttctga

SEQ ID NO: 144906 - DNA, 237 bp, Enterobacter cloacae
atgaccgagaccgaaaaactgctgctgagcgcgttagagcgattacagaacgattacgacacacaacagcaggcatggcaggccagttacgacagcttgcagaccatgttcaccactacttcggccgcgctgatgcgcagcgaccaggcgtgtcagcacttgagcgggcaggtggagagcttgcggcagcaggtgacgagcttaaccgaagccgtcagccgcttgacgcgcaggtag

SEQ ID NO: 144907 - DNA, 486 bp, Enterobacter cloacae
atgagcgggattttagatttagcgaaagccttcgaggagatctcgaatcagcaggcacagcgtactggggagagcgtgaagagcgagtttgtgaagctcgagcaatccatcagcgaggccttgaaatcaagcgggaagaacatcagcgacgctatccacgagcagaacacccggcagacaaccctgctgcggcgctcggtcacgatttcgctgatatggatactggtttgtggtgtgctgctggtcggtattctgttggggatactgtggtttcaggggacactcatcgcctcacggctggacgagatgaacagctacagccagcagcttaccgacctgaaagcgaaatcgggggcaggggtggaaatcctcacggacgacacccggaagaacaagtattacgtggtgttgccgaagagtgcgaagggcatcgagctgtatacctcgaaaaacgacaaacaggtagtgacctacaccgcgaaatag

SEQ ID NO: 144908 - DNA, 153 bp, Enterobacter cloacae
atgatgggccgggatagcgtccagaccatgcagcttacgagctatctgattaaggttattgccgataccggtcacctgccgaagcagtaccggatcaacgtcaggcacacgccgacgacgcaatacatgttcacccagaccgagcgaacgtag

SEQ ID NO: 144909 - DNA, 750 bp, Enterobacter cloacae
atgtcacaaaagccactaatatttataagtcatataaccgaagagtctgagcttgccaaaatgttggctgcgtttataaaaaaaacatacctaaatatgtttgatgtttttgtttcttcagatggagaaaatatatcttcaggtgatagatggcttgaaagcattgataacgcgcttggatcttgtgtaatacaagtttctttgtgtagtccttactccgtaaccaggccatggataaattttgaggcaggtgcttcttggattaggcgtattcctgttattcctatttgtcactctggaatgacaaaaaataaattaccaattcctctatccttgttacaagggattgatatggagcagtctgatgccatggaccgtttttttgttactctatcggacaaactaggcgctgacattccttcagtagatgcatcttcattgattaatgattacaaagactggtcgttaaattatacattcacatcaatcgttaaatcacacataaataatctttgttcattgtatccagtgttttctcaagctttctatggtggtaaccagtctatacctattcaggttagagatcaggatttagcggaggttggtaaatctttagattaccttgtggatcaggatcttattggttatagcttccatggaatgtctatcggcggtggagtatttaaaactggatctatgaatttaaccgacaaatatatgagagtagttttccctctcattaaccagtaa

SEQ ID NO: 144910 - DNA, 930 bp, Enterobacter cloacae
ttgaataaccaggcactcgaccttttcaacgagcggctcccccgcaaaccctatttcaccgatgaactccagttcggcgtacgtattgccgggaaagagcgcgccattctggctaaatacatccagttcaaccagccacatgcgatgttctggctcgggtttgacgttgaccgccccggtgcggcgatagactggagtgaccggaacgctcctgcaccgactctcaccatcatgaacccggaaaatggtcacgcccacttactgtacgcgctgaaaacagcggtacgcaccgcacctgacggaaaaatgaagccgctgaagtatgcggcagcggttgagcgtgcgctgtgtcaaaaactggacgctgataccggctattcggggttaatctgcaagaatccgaaccatgaccactggcagcttgccgtgtggcagccggaactctacacgctggactggctggcggactcactcgacctgaacgctgcaaatgacaagaaaatcgttgccgactacggtttaggccggaactgcaccttgttcgataaaacccgaaagtgggcataccgagctattcgtcagggatggccagagtatgagcagtggctgaaagcatgctatgaacgagcctgtgcctataacctgaaattcgctactcctttggatgaaaatgaagtgtctgggatagccaaaagcattgctaattggatttataaaaatttcactgaacacagttttaatgattatgttgttagaactcatacatctgaaattcagtcagttaggggcaggaaaggaggccgtgtaagtaaagggggaggaagaaaatcatcccctacatcaaatgagaatgttaagccgtggtgtaaagaaggtatcagtcgatcaacattttatgagagaaaacggaaatgtcacaaaagccactaa

SEQ ID NO: 144911 - DNA, 978 bp, Enterobacter cloacae
atggcttatgatttgactaatactctggtcattggtattagctcaacagcacttttcaatatgcaggaatcagataatctttttaaggaattctgttccagcaatccagaaaaagcaattgagcaatacagagactacatgcttttgcatgagaatgatgagttgcttcctggaactggatttcccttggtagaggctttgctggggctaaataagtataaaaaagaagctgataaatctcctcttgttgaagtagtggttatgtcaagaaatagtcctgatacaggacttatgatactgaacaatataagaaaaaaaggagtagatataacaaggtcagtattcacaggtggtgaaacggtggttgactatctcgaggctttcaatgtggatctctttcttacaaccagtattgatgatgcacagcgcgttatcgactctaatgcctgtgcagttgctattttaaaggaaccgccaaaagaatctataaaatatccgcaagatcaggtaagaattgcctttgatggtgatgctgtcttattcgatgagtcgagtgagattgtctataaaacgaaaggaattaacagtttccatgcacaagaaaatgccaagcaaaatgaacctttggcggaaggtccttatgcaatgctgctaaaaaaaatagcgagattacaagaccgattacctgcaagagttgattattcaccgataagaattgctcttgttacagcaagaaatagcccatccgagctacgagttataaaaacattaagagcttgggggataaatgttgatgaggcattctttctaggtggggtcgagaaaacaaaaatacttaaagctttcaatcctcatatattttttgatgatcaagatgtccaccttgagccagcatcagtatatgtcccttcaggccgagtaccttatgcttctcgctcaccattatatcagcaaatattgtcaatcaagccagcttaa

SEQ ID NO: 144912 - DNA, 186 bp, Enterobacter cloacae
atggtcaggcaaaagtgtagcggtattaggcgcagctatttagtggtagtaattatggagatatttgtcaatccaacattgatagtaatggaatggcagaacaaggttgggtcgcaagtgggtctgatgcttgtactgaggacgggaatgattgttcagtggacaatgttagatgttttgcaataa

SEQ ID NO: 144913 - DNA, 297 bp, Enterobacter cloacae
atgcgcaaacgaaagtcagcccctcaggataaaaatcaggatgctttactcggtgaaatccagcgtctcaggaagcagattcatcagctgcagctcgaacgtgacatactgacaaaggcgaatgaactgataaaaaaagatctgggcgtcagctttctgaaactgaaaaacagggagaaaaccctgatagttgatgcccttaagaaaaagtaccccgttgctgagttgctaagcgttctgcaacttgcccgcagctgttatttttaccaaaacgtctgtacgataagtatgcggtaa

SEQ ID NO: 144914 - DNA, 1437 bp, Enterobacter cloacae
  misc_feature (98)..(107): n is a, c, g, or t
atgatcgaatatttcgaattgggtaaacgcctcgattcatcggggcgtgatagcctatatccgcaaacaatctcattgcttacagcatgcgaacagcnnnnnnnnnngcatccctatataactgttcgagaattacgtttatctgagcaaaacaatgaccgctcggaatacctagtcattgatgttgctgatggtacagtaacttctggcaataaggctggcattcgtcgtaaagaacgattagctattgagataaaccctaagttcactatcccgatcctagttcatgcattgcgtaaagattttcctgttttatctcatcaacatgcaggtgtaccagactctccaaaaattctttgcctttatgatgtatcttggagcgccgtcgaacgcaactggacacctgaaagatttattgagcgaatattttggtggctcagagaatcagctgaacaacgtttgcatcgagaagaccaacctcttgagcaacttttttatatgagcccctatcaacttattttaccagcgaattatcttgattataatcatgccgcagctcataaactcagcctccagatggtcagcaatggtaagccgataattttaagggctgtacctgaacattctaatcagggcatcagaccatttcgcttattaaccattgccgtcccaccagttgaagcctcattagttgcttcatatcctgacaatctgaaaaaactggaagagcagcttcaatcctggggaagtgaacttctccagccactcgctgatgctgtttatgatgctatacctgatacaggtcttcgccctagctctggtgaaaaggaaggtttgctaattctgctatgggttcctcgtttaagggatggtaaaacagaacgtactgatgttatgggctatatcgtggaacgctcactctacgaacttgccagcgtattagacatacttgcccctaggaatgagcggggaatacagcaccgtttccgactacttggtggcgtaagaggtacacaatggcaacaattaccactgttacctgtcgaaatacgttcggctatgaatgctgcacgagcaagagacatttctgctgttgattctgataatgcatctttctatggtgttctggctggcgttggggctcttggcggcacattagctgatatctggatacgagtcggctggggacactggacatttatcgatcctgacaaactccttccacataatctgccccgccatattggggttgatgatcatattggataccctaaaactgatattcttcggcacctcgcaggtagtatttatccacatgaacctctccccggagcgatcaataaaagtattcttgatgacgatcatgatattgccagagctgtgaatgaggctcacttagttgtggatgtcagtaccacctttgaggtgcctaaatag

SEQ ID NO: 144915 - DNA, 486 bp, Enterobacter cloacae
atggacgcattggccaccggtcgcaggatcaagtgccttacctgcgtagacgacttcacgaaggaatgcctgacggtcactgttgcctttgggatttcaggcgtgcaggtcacgcgtattctggacagcattgcgctgtttcgcggctatccggcgacgataagaacggatcagggcccggaatttacctgccgcgcactcgatcaatgggcctttgagcatggcgtggagctgcgacttatccagcccggcaagccgacacagaacggatttattgagagttttaacggacgctttcgcgatgaatgcctgaatgaacactggttcagtgacgtcagtcatgccaggaaaaccatcagtgaatggcgtcaggattataatgagtgccgcccgcactccgcgctgaattatcagacgccgtctgaatttgcggcggcctggagaaagggtaattctgatagtgaaggatccgacattactaagtga

SEQ ID NO: 144916 - DNA, 789 bp, Enterobacter cloacae
ttgtcatcggttaaagtcaaagcaactatcgtagaagataatactggcattaaaagtcagctccccatcttgatcaccgaacaaggtgaagttggttcagttaccgattacttgctaaagatggaagctgatggtgctagtaatgctttaatgaatggttttatacaagccacttctttgctcttggattacatggaagccaacaaaggattatttgaagatcctaaaatgctattccaaacctttgctaagcgtctttacacaggcaccatcggtgaagatggtttagatccctctggcttgtactgggtgccaagctcaactgataacgtcaataaacatattcatcgattaacggcatttactgattggctggctaacaagcatggcgcagagccaatgaaccctttgcgagatgccacacctcatgagcaacgccttaattacgctgcttggtatcgaaaaaaccaaaatgacttccttggacatattgaagataaaaccgttaacaaaaccatccgtaaagctcgcacaatgaaaggacgtactccattgacgaaagccgaagacgatgctttagcattcccagataagcattgggaatcattctataaagatggtattggcggagcaaaagatccacgagttgcgttgagagataagcttatgctgctcttgatgcacggtggcggtttgcgtgaaagcgaagctattatgctgtgggtgactgatgtacttgaagatccgtatgaccctgaaaaagcgatagttcgaatttacaacgaatga

SEQ ID NO: 144917 - DNA, 615 bp, Enterobacter cloacae
atgaatgtccgtatctactgccgagcatctactgaaagccagcatgccgaccgtgcattggtaagtctgcgcgaatttgcgcatagcaaaaaatggcaggtagccggagaatacattgaaaatgccagtggtgctaagctggagcgtgtggaactgatgcatctccttgaggaagcacaacccggcgatctgcttctcatcgaatcgattgaccgtctcagccgccttaaacatgaagaatgggctgaactcaaagctacgctgaacagtaaagggctggtgatagtatcaatggacttaccgaccagttggcagatggttgaaatgtccggcaacgaccttaccagcggcattcttcgggcagtcaatgctatgctgatcgatatccttgcgacaatggcacgacaagattatgaaacccgccgtaaacgccaggcacaggggatcgagagagcaaaacaggcaggtttgtatacgggaaaagagaaagatatggaagcccgtgaagtggtacgtgaaatgttggcacagaacgttaaaccagctcacataatgaaagctgctgatatcagtcgtgcaacgttctaccggatcaaaaaggaattggtaatctag

SEQ ID NO: 144918 - DNA, 585 bp, Enterobacter cloacae
  misc_feature (564)..(573): n is a, c, g, or t
atgctggtcaatcgcggtttaaaattgggaacacgcgtaattatatatggggctggagcgtctggacgccagttacttcctgcgttaagccaaatggatgaatactatcctgtggcttttgttgatgacaatcgctcattgcaggggcaggtcatccatggtgtaagcgtattttcacctgaaaaattggcctggttgatagagaagtacgaagctaagaaaattctcctggcaatgccaagtgccagccgcgccagaaaaaatgaggttatatctacccttgagggacttccgtgcgaggtgctttcaatacctgggatggtcgacctcgttgaaggaaaagcaagaatcgatgccttacgtaaggtagtaattactgaccttttaggtcgcgatcctgttaccccgatccctgaattaatttcaaagaatattcagggtaaaacagtcatggttactggcgcgggtggctctataggctctgaactatgtcgacagataatcagaaataaacctactcaactaattcttttcgaattatcagaattctcactatattcaatnnnnnnnnnnatattcaattga

SEQ ID NO: 144919 - DNA, 1233 bp, Enterobacter cloacae
atggcttctactgtcggtcaacaaatgaaacagatcggtgaagcagttaatggctatataaatatccgttatgataaattatcaaccttatccaatgctgccggaacaggaaccgatccgggtccaagaacctgttcaggttcagtatgtgaaattacttaccagacattgattaatgaaggtttactaccttcagcctatacaggcactaatgctaataaatcctcgtataaaatcatattaaaacgagatggaacttcacctaactatgttattaatggtcttataacgacatcgacggcatggattgaaggcggtaaaacacgttatgatttattagggaatgccatgcaaatagcgggtattgatagcggaatgaccagaactacatcaaatgcttttggttatggtggtcaatggtcagaaacatctgccaatttcaataatattacctctgcagggcaattagctttccgtgtaggatttaatagcgcgttatattctatctatctccgtagagatggaaccttacccatgaccggaaaccttaatatgggtggtcaaagcgtttataatgctcagaatataactgcgaatggaacaactacaacaggaatattaaaaactaatgctgctgctacagttggaacaacattaaatgtagcaggcgtaactactttaagatctgatttaaatgtttatggaaatggacaaatatatggtaatttaaactcaagtaataccgtttctggaaaaactgtaatatctcgtggcgatacctatactcaaaactggttcagaatattaggtgatggaggtctttatttcgagaaatatgggggaagattaaccatgctagatgataacactataagtgctggagaatctaaccttaaaactaattctgtattatatgcaactgaaatttcttctggtaatataaattctgctggaacagtaactgctgaaagagtagatgttattgattacgtatgggcatcaggaaacatcagctctaaccatgtttattctactggcaatattgatgcagatggtcaaataaacgctaataaatttgtttatataaatggacaagcgaatgtaggatggggatgttctcctaatggattacagggaagaacgtcagaaggggctattttatcttgtgttaatggtttgtggcaaagtagttctgcaagaattgagagaactcaatttgtagtttctaaatag

SEQ ID NO: 144920 - DNA, 981 bp, Enterobacter cloacae
atgagccatcaactcaccttcgccgatagtgaattcagcactaagcgccgtcagacccgaaaagagattttcctctcccgcatggagcagattctgccatggcagaatatgaccgctgtcatcgagccgttttatcccaaggcgggcaatggccgacggccctatccgctggagaccatgctgcgtattcactgcatgcagcattggtacaacctgagcgacggtgccatggaagatgccctgtacgaaatcgcctccatgcgcctgtttgcccgattatccctggatagcgccctgccggatcgcaccaccatcatgaatttccgccacctgctcgagcagcatcaactggcccgtcaattgttcaagaccatcaatcgctggctggccgaagcaggcgtcatgatgacccaaggcactttggtggatgccaccatcattgaggcacccagctctaccaagaacaaagagcagcaacgcgatccggagatgcatcagaccaagaaaggcaatcagtggcactttggcatgaaggcccacattggtgtcgatgccaagagtggcctgacccacagcctggtcaccaccgcggccaacgagcatgacctcaatcagctgggtaatctgcttcatggagaggagcaatttgtctcagccgatgccggctaccaaggagcgccacagcgcgaggagctggccgaggtggatgtggactggctgatcgccgagcgtcccggcaaggtaaaaaccttgaagcagcatccgcgcaagaacaaaacggccatcaacatcgaatacatgaaagccagcatccgtgccagggtggagcacccgtttcgcatcatcaagcggcagttcggcttcgtgaaagccagatacaaggggctgctgaaaaacgataaccaactggcgatgttattcaccctggccaacctgtttcgggtggaccaaatgatacgtcagtgggagagatctcagtaa

SEQ ID NO: 144921 - DNA, 564 bp, Enterobacter cloacae
atgaaaaaaacagtattaattaaaaacataaaaagtaaaaaaggtttctcacttttagaactattacttgttcttggtattatcgcagcgttagtggtagcagcatttatcgtatatcctaaagtgcaagcatcacaacgttcacaagctgagagtaataacatcgcaacaatccaagctggtgttaaagccctttatacttccgcttcaagctttactggtttgaataactcagtagcagttcaagcgaagatcttccctgacaacatgttaagcggttcaggtaactctgcaacaccaatcaacgcattcaaaggtgctgtaacattaggtgtagctaacactggtccatcatcagcagcaggttcttctttcacaattacttatgataacgtaccagcagcagaatgtactaagatcatgacagcaacagcaggtaacttctacattgctcaagtaggctctacaactgttaaaccagcaggtggaacgcttgacgtagcggcaacagcaggtgcttgttctgacgctaacagtaatacattgatcttcacttctatttaa

SEQ ID NO: 144922 - DNA, 141 bp, Enterobacter cloacae
atggcggttgcgggtggcaggcttgagatcgagattatgcagatagctcagaatatctgcctccgtcatacctgccagctttttggcaccgagaagagggcgcaggtatttacggatcttagaaagatcggtgttagctga

SEQ ID NO: 144923 - DNA, 276 bp, Enterobacter cloacae
atgacccgtctggcttcgcgctttggcgcagcaaaccttatccgtcgcgaccgcccgttaacccgtgaggagctgtttcgcgtggtgcccagtgtgttcagcgaggacaaacatgaatcccgcagtgagcgttatacctatatacctaccatctccctgctcgacagcctacagcgagaaggcttccagccattctttgcctgtcagacccgcgtgcgtgaccccggtcgtcgtgaacatacaaagcatatgctgcgtctgcggcgtgaggggtag

SEQ ID NO: 144924 - DNA, 480 bp, Enterobacter cloacae
atgttgccgggactatttcgtgcggtttgtcagaacgggctcgtctgcggtgagtcgtttggcgaggtgcgggtgccacacaagggggacgtggtgagtcaggtgattgaaggcgcgtatgaggtgctggggatttttgaccgggtggaggagaaacgggatgccatgcagtcgttgctgttgccacccccggcacagcaggcactggcaaaagccgccctcacataccgctttggtgaagaccaccagccggtgactgaatcgcagatcctctcccctcgccgctggcaggatgagagcaatgacctgtggaccacgtaccagcgtattcaggagaacctgattaagggcgggctcagtggccgtaatgccaaaggaggacggtcacatacccgtgccgttcgcggtatcgacggggacgtgaaacttaaccgggcactgtgggtgatggcggaagccctgctcacgcaactgcagtga

SEQ ID NO: 144925 - DNA, 180 bp, Enterobacter cloacae; identical to SEQ ID NO: 144067

SEQ ID NO: 144926 - DNA, 486 bp, Enterobacter cloacae; identical to SEQ ID NO: 144168

SEQ ID NO: 144927 - DNA, 528 bp, Enterobacter cloacae
atgacccacaaaatttctctcagaaatgaggcgtgcgatgaacataaatttgtcatctccgcctgcggttttacgttccagggatatcgtctgatccttaaccagtacggaatacaggcttcgcatattcactttgacggggatgaggcatcccagcaggatctggaaaatatccttataaatcagaatgctcatgttgtggtgtttctcgggaaaggtatcgtcagcctcctggagagcctgaagcgactggcatccgtgctcaatgcacttcccgttattcgacgcgttaccctgtatggcgacataccggatggctggctatatcgcaccctgggcactcttttaaataatagttatcaattatctttgattcgcatagcccgcgtttcggatgtcgtcactggttctcaaacgcaccatcatgtttttaaggatcgttcgtatttattacgcgatcgctacaaggataattcttcgcaagacaacgtaaagtggttaaaaaaagagagattgacgttttattaa

SEQ ID NO: 144928 - DNA, 303 bp, Enterobacter cloacae
atgaaaaaaagaaatttcagcgcagagtttaaacgcgaatccgctcaactggtcgttgaccagaactacaccgtggcaaatgcagccagcgctatggatgtcggcctttccacaatgacgcgatgggtgaaacaattacgtgatgaacggcacggcaaaacaccaaaagcctcccccattaccccggaacaaattgaaatccgtgagctcaggaaaaagctacaacgtattgaaatggaaaatgaaatattaaaaaaggctaccgcgctcttgatgtcagactccctgaacagttctcgataa

SEQ ID NO: 144929 - DNA, 453 bp, Enterobacter cloacae
atgaaggcccacattggtgtcgatgccaagagtggcctgacccacagcctagtcaccaccgcggccaacgagcatgacctcaatcagctgggtaatctgcttcatggagaggagcaatttgtctcagccgatgccggctaccaaggagcgccacagcgcgaggagctggccgaggtggatgtggactggctgatcgccgagcgtcccggcaaggtaaaaaccttgaagcagcatccgcgcaagaacaaaacggccatcaacatcgaatacatgaaagccagcatccgtgccagggtggagcacccgtttcgcatcatcaagcggcagttcggcttcgtgaaagccagatacaaggggctgctgaaaaacgataaccaactggcgatgttattcaccctggccaacctgtttcgggtggaccaaatgatacgtcagtgggagagatctcagtaa

SEQ ID NO: 144930 - DNA, 189 bp, Enterobacter cloacae; identical to SEQ ID NO: 144198

SEQ ID NO: 144931 - DNA, 543 bp, Enterobacter cloacae
atgaatatgaccatgacatcttggtatgccaatcaggctaatatcgcttcttatgttgatatgatgattgataaagatctccaggatgaaattgcgggtgaaaatctaaaccatatgacagatgttttttatcatttttataatgaggctgaaactttagctgggcatgaaggaaaaagaataaaaaaccttcgtactgaaggcgacacgcgtatttacttaagccgagaagagattcgcaaacaagttcaagatgggcagctttctcttgttgaacatccaggcggctattgtacgaatccaaattgtgatcgtatttgcgatatgacgacctgtcagtacaaaattgtgactaaagagcaggctaaatcacttattccgattagagaacagttaataataaaacataatgtgattgctactgccggatttgatatgccgaatgtcacttcaaagttcttctatgaaattaaggctattgagcaggtcttatccgagcatcatcttgagtatgttgcttttaataaaaaggatacctattga

SEQ ID NO: 144932 - DNA, 477 bp, Enterobacter cloacae
atgattgatgaagagacgctctctgaccgaggtaaacagaccataatcaggcttgaacgggcacttgaacgtttgttgaacggcgtcccggagcggactccccacgatgggcgagtaagtctgagccgtatcaatcaggaagcaggtctgagttcggggggcatctactattacgatgagtttgtccagaaagctaaaagagctattcacgaaagaaagcttgataacgcagtgtctactatcgagtcaggtaaagcttcggtagataaaatgcgcgtacaaagggataaagaacgcgagttaaaagagcgttacaggactcaacgcgacgatatcaaagccttctgcgataagattattgctaaaaatgcccagttagaattctctttgttcgaagcattagataagatcgaggatctggaaagggaagtatcagcactcaaggttgttgatataagtagcaggagaagtcagtga

SEQ ID NO: 144933 - DNA, 1608 bp, Enterobacter cloacae; identical to SEQ ID NO: 144217

SEQ ID NO: 144934 - DNA, 1206 bp, Enterobacter cloacae
gtgaaacaaatcagtgtcactcaaccaaagctggtcgcagatttttcatgtgtcggtggggaatgccgtgaacattgttgtcagggctggaccatcgcatttgataaatcctccgttaatcgctacctgaacagtaaaaatgccgccattcgtcagacggcgaaaacggcgataaaagtcaccaaaaagcagtatggcaactggggcgaagtgattttccatacggaaagtaaaaactgcccgtttatggatacggaaaaactctgttctattcatagcgccatgggtgcccaggccttaagcccaacctgttcgtcgttcccgcggacaaaccgggtctataaaaatgaaatcgaaaaatcgctgaacctctcgtgtccggaagtgacccgacttctgttgaacgatcgagagtctatgtcgatgatggaatccattagcgtccagcaggacgtcaataatgcgccgatgattgatttgaaggcaaaggtcatcaatctcttctgccagaatattttcagcgttgagggcgtcagcgttgaagaacaggtttacgccgtggtgaaattcctcatggtggctgaaaagctcgataatctcgaagagaatatcggcacgctcgaaacggtctatttctcgctggttaacgagctggtgagcggtaaaatcaaaacggaattaggcggatttaatcagaactacagcctgaaattcgcgttaatttcgctcatccagagctacttcacgaagaaagcgacagcccgcggcggtgcggtattaaaccgttattttacccaactttatcaagaatttgagtctgcgggtgacaccgtgccggcagagaaggtcatggagaacatcgagtccgtctggcgcgatgtggcgggcagttacctggcgaccaatgaccatttatttaagaacttttttaaatacaaactgtgggagcagggcttcccgcagaacaatggccgcagcatgttgaataacctttatttaatcgtcgcggagttctatttccttaaaacgttacttgccggtcaggcgatcgtggcggggaaaattgaacaagataatattattgatgttatttacagcttccactcccttagccagcataatcaggaagcgggaaagctctttcatcaacatatagatagcgtcaaactgggcgacgatctttcattgttacaactgttaatttag

SEQ ID NO: 144935 - DNA, 960 bp, Enterobacter cloacae; identical to SEQ ID NO: 144187

SEQ ID NO: 144936 - DNA, 1038 bp, Enterobacter cloacae; identical to SEQ ID NO: 144216

SEQ ID NO: 144937 - DNA, 408 bp, Enterobacter cloacae
gtgtttcagggggctacatcagaaagcgatctggtatcccgggaacaggatatccgtcttaatctggaattcgatttcaaacgccagcccgtacagcccgccatgaatgaagggcatctactgatgttttcccgcccgtgggataatatggaagaggctatgcagcaacgctcccttttcgacgactggcggcaaacgcatacactgaagaccctggctgactgggatgactggtgtgattttctctattgccggacggtgttttctgatatgaaactaaaagtcggaagcaaacgtagtgatgatattttagtcagactatttctccgggcgctgactcagtgccaatgggggcttatgctgaaagataaaaaaagttattcctgtaaagaggttgctgaatggtaa

SEQ ID NO: 144938 - DNA, 543 bp, Enterobacter cloacae
atgaaccgttcgtataacatcgtctggaattgcgccagaaatatgtacatcgttgcctcggagttttcaaaaggggacagcaaagtcaaatcctgcgtacgcgccggaagcgcgatcgcaacgtttatcttgtcaggtgttgtgagtaccgcacacgccagtgacacgacgtttgttgcagtcccgggtaataataccatcagtggtgaatattcaacgacgagccctaatacctcggcggtatccgcctctggctctgatgtcatcgtcaccgataacggcgccttaacgatatccacaaccggggatgcaggcatggggctatccgtgtcgaatggagcgaaaatcacgctcgatgattcgggatccacaatccgcacttccggggaaggcagtcatgcgataaccattgtcggtgataactcagaagccatgttgaacaaccttaccgtttcgacggaaggcgagatcgcctctgccgtattgtttagctctaatgcaaaaggcaccattgacggggggagctatacggcgacgggatag

SEQ ID NO: 144939 - DNA, 213 bp, Enterobacter cloacae
atgctgccaggtacggttggcgtccgtcagacgctgtccgctgattttattgaagttctcaacgttgatattgatgttgttatcaccgttgcggttatagccgccgtgattatcccagtcaccgtcatggtggtggtcccagtcatcgtcgtcatcccagtcgatattgctgaaaatggcataggttgtggcaacgcccaggctgaagcctaa

SEQ ID NO: 144940 - DNA, 756 bp, Enterobacter cloacae
atgagcactattaccaaagagcaggcgcagaaaatcattgaagcagccgatgaggttattaccgctctggccggaacaaacgaggatgttcaccccgaaagcgacagcatgctccgtttatgggatgacttgaatgatcgttacgcaccgccggaagttgtgcgagagctggcgcgtatcgcgctggcatcgctcgaagcggagcctgtggcgtatatcttcaagcatccagcgggtaggcttttctgggcgcttactgacgagagcaataaagggcaaagcgacgttatgcctgtttacaccgccccaccagccccagccaatgccgaacccgtagcgtggctgtggtcacacaggaaacacccgagcgaagtcacgcttgttcgccctgaagatgatgagagagcggaaggtgctcactggtctgggtggagttgtcaggcgctatatgctgagcctccagcgccggtatctgtgcctgataccttggctgatgatatcgacagtgatgaccatccgctactgtggagctacaacaatggctggaacgcctgccgcgctgccatgactcagggtgctgaaaacgccgagtcgcccagcggcaactctccggtgattccggatggttgggtgattcttcctgctgatccaactcaggcaatgatgaatgcatggctttccgaggtcgctaactggcgcggacacgcatccggatatagggccatgattgcagcagcgcccaaaccggaggcctaa

SEQ ID NO: 144941 - DNA, 288 bp, Enterobacter cloacae
atggctactttgcaggaattaatcgccctgacgccagaacaggaaaaagcgtggaagcgccttgagaaagccgtgaaggatttcagggccgcgggaggtcgtttttacagcgtccttgacactcttagcggttgcaacggcgagcatgttgccaccattgataacgacactggctatcacactgcaagcgtctatatgccgagcattgatgcgccaggatttaccagctttgcggacgattggcatggcataacgctgaaagatggcgttgaagtggatgaggactaa

SEQ ID NO: 144942 - DNA, 345 bp, Enterobacter cloacae
atgcagaagtggcctgatggtgagttcgtttatcactccgattatcaggcgctgctggatgagctggaagccaaagacagaaaaattctcaagctggaaaagctggcagaggctgaatctgtaggcgcagataaagctgcgacatcttgtgttgaatggatgaaacgataccatgccgcagagaagcggattgctgagctggaggcgttagcgcgtggcgtgaagcagtactcagagttccagatttgccattacggtgccactgaggactatgcgaagggctatatcgactgtcagaacaattacaacaaagtgctgttcgccgaagcaggcaaaggagagtga

SEQ ID NO: 144943 - DNA, 567 bp, Enterobacter cloacae
atgagcaactctatcgcagacggcgcgaaattaacgccggaaacattcgcagatttcattgagcgtttgaagtatcaccatcgcggagaaggtattaatcgtcatgccactgccgatccaattttcatggttcagaagcaggcaaccatttatggcctggcggaggagttcggagaatcgaagatagtccatgtcgaagactgcgaatgggatagtccgcaagaatattgggacgatctggatgaaatgcagcaggaagagttaaatgccttctgcattgaccagtgcgatacagcatttaccgatctcgacgaagatgctcagtgggaagtgctggctgaccttgacggccacactgtctgcggaactcgtaaagagtggcagaacatcaacgctcaccttacccgtgaggcagcggaggctttcattcgccgtaagcagcatgattaccctcctctgcgggtctacgtcgagagcatgtacttcgggtgggaatatcaggaaatcatcaaggcgctttgtgatgggcgcttagtactcgcagataccccggaggcggcccaatga

SEQ ID NO: 144944 - DNA, 831 bp, Enterobacter cloacae
atggacctcgataacgttgttaaattttttgccccgaagggaatgcatatttccgacagtgtgcgcgctactgccagcgaacagctgacggtgactgatgttatggctgcgctgggcatgacacaggcagacgccggaattggtcttgccatgtatctgggcaaggcaggtgtaagcaagcaggacagagacgcctcgattaactggcttgctgaatacgccaaacaatccgcgccttttgcagtacgccgtctcgccggaaagaaattccctctctgcatgcttatcctcgctaagttcgcctataacgactatgcatcgtcagccgctgatttatccgattgcccaaaatgcaacggtaaaggtcttattgaaaaagtcggtacggtcaccaaaagccattacacaatgagaattcctcagtgggcaaaagaccttggacagtcgccatcttctttcgaaaagaagcgggaggtgaagaacgtggagcaatcactctgcgcaaaatgcaacggtatcgggaaaataagtaagcgctgccagtgtggaggaacaggaaagacactggaccgtaaagcaacggagctgcaaggcgtacctgtttataaggaatgcaagcgctgtgaagggcgcggttacagcaggccaaagtcatctgttgcttaccggggaatattctctgagctgccaagtcttcctgatcgcacctggcgttacagctggaagccattctacgaaatgcttgtttctcgctgctttcaggaagagagctattcaaacacccaactgaaaaaagtaacaagaaacgataatttgacggatatcgcgtaa

SEQ ID NO: 144945 - DNA, 282 bp, Enterobacter cloacae
atggtaacaagtgatccgagtgcgatggcaaacgcaattatctctgctgtgatcgttattgcactgatgttctaccagcgcggcggggcgagacatcgccctctgatatcgctgatggcttatttcacggtgctggtatacgccagcgtccctttccgttacctgttcggcctgtaccatgaatcgcactggttcgtggtgctggtgaacgtcctgatatgcgccgccgttctatgggctcggggaaacgttgcgcgcttggttgacgcactgaggcactaa

SEQ ID NO: 144946 - DNA, 627 bp, Enterobacter cloacae
atgaaccaatcacaatttcaaaaggcggctgggctaagcgccgagttagctgcgcgctggtttcagccagtgagcgatgcgatgaaagagttcggcatcaccaagccggtagaccaggcgatgttcattgctcaggctgggcatgagtcgctaggtttcacccgactacaggaaaacttcaactacagcgtagtggggttggcaaacttcattcgagcaggacgcatcacacaagaccaggctaatgagcttggccgtcgacctgaagaacgagcattaccgattgagcgccagcgtgccattgcaaacctggtctacagcaaacgctacggtaacaatgcgcctggtgatggatggaaataccgagggcgtggactcatcggcatcacgttccttgataactatcgtgactgcggaaatgccctgaaggtagatttggttcaacagcctgagctgttagctgagcccatttatgcagccagaagcgcagcgtggttctttgctactaagggatgcctgaagtattccggcgacctgatacaggtgacgaagattattaacggcggcacgaacggacttgaagatcgtcgcgcacgcttcgggcaagcgaaaacggtgctggtatga

SEQ ID NO: 144947 - DNA, 225 bp, Enterobacter cloacae
atgaaaaagtggctgcgcatcttactcccgcgatgggagacagatacggttgttcttcaggcacaaggtaatgagcttcatatcgtctgcagctacgaagatatcgatcccggcgagatgtttgacggtatgtgtgagctcaagaccttcacctggctgaactggtctttcccgtcaggggaacccatgaacgttcgatcctttgaaccgaaggtggaagcatga

SEQ ID NO: 144948 - DNA, 234 bp, Enterobacter cloacae
atgtacaacaaactgttaaccgtatgcctgatgacgatgttgatcgcgagctgcgcggaaactggacccgcaaaggttgaagtcatcgacaccagctgtgactgggtaaagccagtctacctgactgatcacgacatcaacgttatggaccgccagacgaagaaagacatcctggcgcataacaaagcgtggcaggcgaattgtcagaaacaaaaagaagtgaggtcaaagtga

SEQ ID NO: 144949 - DNA, 639 bp, Enterobacter cloacae
atggcgacgcttaaagacctttccagtcagttaagacagctgcagaagcagataccgtttgcgactgcccaggcgatgactaaagtggttcgccagatagaggtagcccaaaaaacagcatttgagcggcatctggataatccaacaccttttacagttaaatcggtagggtcagttggtgccaggaaaaacagccttcgtgcaaaggtgtttgttcgtgatactgctgctggctacctagaacctttcgagttcggcggagagcataagctcaatggtagtgctttgcttaacccgaaagacataaagcttaataaatacggcaacctgccgcgtaataagctctctcagctcaaagcaaaggaaaatgtattcgtaggtgaggtggatggcgttaacgctgtctggcagcgtaagaaaccgatgaaagctaagaagcgacgggccaagcgctccgctaatgggacgcgaagaccgaaacgtaaacagcgttctccaaagcttttgatccggtttggtgatgcgctacctgtgactccagtgctggggtatatggatagggcccgtaccatggcgaacgcactgctaccgtctgctttaaatcaggcgatagcagaagccatcaggacggcaaaataa

SEQ ID NO: 144950 - DNA, 504 bp, Enterobacter cloacae; identical to SEQ ID NO: 40102

SEQ ID NO: 144951 - DNA, 231 bp, Enterobacter cloacae
atgtcaaagctctctgtttttatttttactctgttattttgttcattgcctttccgctcatactcggatgattttagcaacaaggcagttaaatcttatcaggctggtgattgggttgttgttgagttcgcggctgacaaacagcttgtttataagatggcgacagaggccataaataaaaacctcaaagaaacatatcttagggaaggtgcgaacaagtccctgatatga

SEQ ID NO: 144952 - DNA, 903 bp, Enterobacter cloacae
gtgccgctggataaacacattgctgactttctggctgcatcatcgggcgcgccgcaaccggcgtcgttaggtgacctgcgtgccgccaccgaagtagatttgttgcggctgcagggagaggatgaattaagcgatgacatgcaggactatgttgtcatcgccgatgatggttacgccatttcccttcgtgcctatagcccagctgcctcaaacgcggacattgcgcagcctgccatactatttgctcacggcggtggatggtgtctggggtcgctgtcgctctatgatcgaccctgtcaggcactggccaatgccactggcaggaaaatactctccgtggattaccgtctggcgccggagttccccttcccaaggccgttagaagatgtttatcaggcactatactgggccagtgaacaggccgcgcttctggggatagatgcgacccgtctggcggtggggggcgacagtgcaggcggaaatctcgctgcagcgacagcgctgctggcccgggatcgcggcggacctcacattgagcatcagttgctgctctacccggcattaagtcgcgaaatgtcgaccgaaagctattgtgaatatgctgaaggttattttttaacgcgtgatgcgatggcgttttgctgggaaaactatctgggagaccgtcgtcatccctatgccgagccgctgcatatggcctcgctgagggggttaccgccagcaaccatcctgagttgtgaatatgatcccctgcgcgatgaggctgaagcgtatgcgcgacggcttgaggaggcgggggtgcctgtgcgctgtgaacggttgccgggaatggtgcatgcctgcatgcatatgtcagggttaacgccagccgcagggcggttgttcgaacgggcttgtatatag

SEQ ID NO: 144953 - DNA, 462 bp, Enterobacter cloacae
atgaatcgtagcgcgcggcgcaagatgctcagggtggtagggatcatcatggtagttatgctgccggtgatgcttgcgctatggtttgcccagctaagagccgtgtctgaaacaagcgcccagctacggacatttgctgaactggctttagacaaaactgagctggttatacaacaggttgatctggcccgggacgaggcagaaaaatatcggggcgagctctgtaccccgggacaccgtcaatatatgttgaacgttgttcgtggtcgcctgtttgttgccgatttaatttacgctgaaggtcagaattttctttgttcgaccgtttttacaccggatcaaccctacgccatacccgtcgctaattacacgcgaaaacctgacgtcgctatctattattatcgcgacaccccattttatactggctataaaatgggtaatggtgccaacttactgatttag

SEQ ID NO: 144954 - DNA, 1518 bp, Enterobacter cloacae
atgctgcagaaaaaagagcagtatttaaagaatgacaatggggcctctggtttcgttgatattttcgcccgtgatcagaaagggcgaatcgttatcattgaaataaaaaaatcggatgctgctgcacgtcaaggcctacaagaactagccaagtatgcagcattggttcgcgcaagatctctgattaaatcgaccgagtataggttgatcatactatcagtcgaatggcacgaattgctgactcctttttctgaattctatcataacactcgctacgccctgaaaggtgggaaaatctcattggggaacgatgggctcccagaacacatcaaatggatttctcctttaccaaaacaggctgagagatccttctctcggcgacatttcatttgggaatataacgatattaaaaaagctcgtgctggcgcgcaagctgggacccaatacatgcagagaatcggtctgcacaacttcatcttcgccgttataacgctcgccgatggaagtcatggcatctcgcatcttgtatatttttctcaacaagaggaaagtgctgaattctaccaagaaatcataaatagacgcttcttcggagaagatttagaggagtttaatgaatggctggagggtatgtccgagcccagtgacattctaggtgaactcgccgacaaagtctgggaggacaacgaagaaatctcattatatgaaaaaatggatgcagaaggattacagatttcccacccggaaaaagctcagtattggctctcagatgatatggttaaagatgttgagatcattcggtttggacttttcgttgaagctaacttgtcggatcgtgatctactggctgagttgcgaggaatgcaaggtggatcaacctacaatatggatatcgttgcatctttagcgtctaagcccgagattgatgcgcttttaactgctactgatgaagtgtttttctttaacccaatctggaggactaatgtgcatagtatcgtcgcccatgcccttcataggaaagcagaatctcttgaactgaaaaccttctcaaatgacgacatattgaaaacgttagtctggaccccatttgatcctcagagatatcttccttatcttatagtgaagctcaactttgcggaccacgaggaagtatttgtaggcgtaatagagtggaacagacatagtccaaactggaaggatatggttgatacttattttgatggtgatgctggcagccttatgtttcaccgtcaatttggatcgatccgttcactgaatggggaaattatggaattattgggattgaactacactctgcttcataaggataaacttgacaatgaagagccagctcaaccaattattttccaaggactttcattttctcagagaaaaagtcctcgaaaggaatatatcgaaattctgtcttgtcaggatttcatgtcgaatgctatcagtaacgaagctagttttgattttgagttctcgacaatgttgaaaactcggatgaaaaactga

SEQ ID NO: 144955 - DNA, 615 bp, Enterobacter cloacae
atgttgaaccgtatccgcgttgtcacaatgcttatgatggtgctggtcattttcgcactacttcagcttatctccggcgggctttttttctcgtcattaaaacagaaccaggacagctttgcggcctcgaacgatctccgcctgcagcagagtgaactcacctcaacgtgggatctgatgctgcaaacgcgtatcaacctgagccgctcgtccgcgcgcatgatgatggatcccaacaatcagcagagcagcgcgaaaaccgatctgctgaaaaatgcccgggcgacacttgcggatgccgcaaagcattacgaggcctttaagaaaatcaccccgcagcctgcgatggagcaggtgagccagaatatcgacgaaaaatacaacgcctaccatgccggtctggcagagctgattcagttcctggagagcggcaacatggacgcctatttcgcgcagccgacgcaggggatgcaaaacgccctcggcgcggcgctggggaatatgcaaaggtcagtggcgatctgtatcactccgcgtttgctgaaagccagaatgactaccgctttgcgaaatggcagatggcggtgctggcgctggcgctggtcattgtgctga

SEQ ID NO: 144956 - DNA, 942 bp, Enterobacter cloacae
atgttaaatcgtattcgtatctcgaccacactgtttttgattctgatcctttgcggtgtgttgcaggttggcagtaacgggttgtctttttgggagtttcgcgatggctatcagaatttgcaggacgttgaggcgagtaatcagcagcgctccgcactggcacaaacccgtgccgtgctgttgcaggcaagcactgcgctgaacaaggcgggaaccttaaccgcgctaagttatccgccggatgacattaaggcgctgatggccaccgcacgcgacagcctgaaacaggctgacgcacagtttaagacctttgcggcacaggccaccggcagcgagaaagagaaagcgctgaaggccgccatgaagacccactttgaacagtggtacagcgatctcgaccatcaggcgacgtggcttgagaacaaccagctgtcggattttatgaccgcgccggttcaggcctcgcaggcggcgtttgacggcagctttgacgcatggcagcaggatatcaatcagtctgttctgcgcgccggtgaagcaagccgcaccagctatcacatgtcgggcgtcatcttcggcgtgatggtgattctggcgggcttgctgaccggcgccgcgctgctctggtcacgcaaaatgattgtgcagccgctggcgattatcagcagccacttcgacagcattgcgaaaggcgacctggcgcgtccggtggcggtgttcggcaaaaacgaaatttcggcgatctttgccagcctgaaggcgatgcagggatctctgcgggaaacggtatccgacgtgcgtcagggcagttatgccatgcacaccgggatctcagagattgcggcgggtaacaacgatctctcatccctcaccgagcagcaggcggcctcgctggtgcagacggcagccagcatggagcagctgaccgcgacggttagctag

SEQ ID NO: 144957 - DNA, 1113 bp, Enterobacter cloacae
atgacggataatccaaataaaaaatcgctgtgggacaaaatccacatcgacccagccatgctgctgatcctgctggctctgctggtttacagcgcgctggtaatctggagcgccagcggccaggacatcgggatgatggagcgcaaaatcggccagatcgccatgggcctgatcattatggtggtgatggcgcagatcccgccgcgcgtctacgaaggctgggcgccctacctctacatcttctgtattattttgctggttgcggtcgatgcctttggggccatttcaaaaggggcgcagcgctggctggatttgggcattgtccgctttcagccttcggaaattgccaaaatcgccgtgcccttaatggtggcacgctttatcaaccgcgacgtctgtccgccgtcgctgaagaataccgctatcgcgctggtgctgattttcctgccaacgctgctggttgcggcacagcctgacctgggtacctctatcctcatcgccctctccggcctgtttgtcctgttcctgtcgggcctgagctggcgcctgattggtatcgcggtagtgctgattgcggcgttcatccctattctctggttcttcctgatgcacgattaccagcgccagcgcgtcatgatgctgctcgatccggaaaccgatccgctgggcgcgggctatcatattattcagtccaagattgcgattggctccggcggcctgcgcggtaaaggctggctgcacggcacgcagtcgcagctggaatttttaccggaacgccacaccgactttatctttgccgtcctggcggaagagctggggctggtgggcatcttaatactcctggccctatacgttctgctgatcatgcggggattgtggattgcagcacgcgcgcaaacgacctttggtcgcgtcatggctggcgggttgatgctgattttattcgtttatgtcttcgtaaatattggtatggtgagtggtattctgccggtggtaggcgtaccgctgccgctggtgagttacggaggctcggcactgatcgtgttgatggccgggtttggtatcgtgatgtcgatccatacccacagaaaaatgttgtcaaaaagcgtataa

SEQ ID NO: 144958 - DNA, 186 bp, Enterobacter cloacae
atgaagacattcaatcagttcggacagcccgtaggcgaagcgcttagcgactggcagcctcgtcagcacccgtcccgggtcgtgcttcagggacgctattgtcggcttgaaccgctgcgcgtggagcatgccaacgcgctgttctctgcgtattccctggccgaagatacccgcagctggacgtag

SEQ ID NO: 144959 - DNA, 2175 bp, Enterobacter cloacae
atgagccaaatctctgttatttcaaaacttactggcgtagaaacgaccctggaaggtacacaggttacgctgaaccattcctctgtcgttgagcttcacgtcgagcgagcgagcgtctcacacttcgcgcgaagcggtaacgacctgctggtgacattgcactccggcgaggtgatcacccttaaaaacttctatgtgacggacgcgcagggcgtgagccagctggttctgcaggacagcaacggcgcattatggtggattgaagatccgaccggggccgccacgtacgaatctatcgcgtccacggacgtgctgcttgcggcgtcaggaagtgacgccggtggcgccgccatctggccatgggccctgggtggtattgccgctgcagggggcatcgcggccgcggcaagtagcggcggcggtggcggcggtggcagcagtaacaattcggccgatccggatacgactgcaccaaatgcaccttccggccttaagttctcctcagacggtaaaaccgtcaccggttccgccgaacccggcagtaccatcacgctgaaagacgcgaacggcaacgtcattggcacaggaaaaacgggcagcgacggcaactttagcgtctccctcgggacaccgttgaccaacggcgagcaggtaaccgccaccgcaacggataacgccgggaatatcagccagggttcaagcgtcaccgcaccggatctcaccgcacccgatgcaccaacgattggcagcgtaatcgacgatatcgcccctcagacggggacggtgaccaacggcggcagcaccaacgatcggcggccgcagctcaccggcaccgccgaagcgggctccaccgtgacgatttatgacggcggaatagccattggcaccgcggtcgtcgccagcaatggcacatggacattcaccccgtccgtcgacctgaatgaaagcacccaccagattaccgtacgggcaaccgacgccgccggcaacaccgggccagcctcaccggtattcaccctcaccgtcgatcttacccctccgacagcgcccaccgcgattgtactgctcgacgatacgggccttatccgaggaacaatcacgtcgggcgtgcctaccgatgcctcgcagccgatcctggcgggaacgggcgaacccggtggaaccatcaccatttacgataacggcgtggcgattggtacaacgacggtgctgcctaacggtacctggagcgttaccccagggggcccgctcccggacggaacgcactcgatcaccgtcactgaaaccgatgccgccggaaaccagagtacggcctctgagcctatcatctttaccgtggacaccacgccgccgtcagccccaggaaacctcgtggtgtcgaatgatggcggtaccatcagcggcattggagaagcaggcagcacggtgaccattcgtgaaggcgatttcgctcttggcacagtggttgttgatagccaggggaacttcagcctgacgctgagcccgccgaggatcaacggcgaaatccttaccgctgacgccaccgacacggcgggcaacaccagtccaaccacctccgcggcggcaccggacattaccccgccgcagaccccggtcatcctgtcggtgattgatgacgtgcaggccaccaccggtcccgtggcccagaatgggctgaccaacgaccgggcaccgaccctgaacggcacaggcgaggcaggctcgaccatcacgatttataacggcagcgatgccctcggtacggtggttgttccctcctccggccagtggagctttacgccgcccacaccgctgaccgacggcacctgggtgctgaccgcgaaggcgacggatcccgccggtaacccgagcgggatatcaaatgcgtggacaattaacgttgacggtacagcgccaaccgccccggtgattttacaggttgtaaacgatattccagggcagaccggcgcgatcgacttgaacgggaccaccaacgacgccaccccgacgctcagcggtaccgctgaagcaaacgcgacgatcagcctgcgcgtggacggtgttgaaatcggtacaaccgttgccaatggcctcggcgtatggagctttacaccttcctcctcaatcggtgaaggcccccacgctctgaccgccaacgctcaacggcacggctga

SEQ ID NO: 144960 - DNA, 7503 bp, Enterobacter cloacae
gtgaccgacgacgtcggcggcgtattgggttcgctcaacagcggcgataccacggatgacactcgccccctgctgcagggcaccgccccggcagacacggtgatcaccgtctatgacggcacgactctgctcggcaccgccaccctcaacggcagcggcggctggagcttcacgcccgtgaccccgctcaccgacggtccgcattccctgacggtgcacgccacggatgccgcgggcaataccaccctctcaacgccatttgaactgacggtggataccgttgcgcctgccacgccggatatcccggccattaccgtcaatcctgacggcacaacaacgccgctgaatccgggcgaaaccacccgcgacaccacgccgaccctgagcggtaccggcaatccgggtgataccgtgacgatctacgacagcggcgtcaaaatcggcgacgctgtcgtggacaataccggcaactggacatggacgccgccatcccccctggctggctgcacctatgacatcaccctgaccgtcaccaacgtggacggcacgggcaacgaaagcgccccgtcgcagccggtcaccatcaccattgataccgaggcgccggctacgcctgcagcaccggtcattactgacagcgtcacccagatcaccggtcccgtccccaatggcggcaccaccaacgatccgcgcccggtgctgagcggcaccggtacgccaaacgacgtaatcaacatcactgacacggttaacggcggcacgccaactatcgttggtaccgtcacggtagacagcaacggcaactggagctggcgccctgacagtaatattgcggagggcagccacgtctataccgccaccgccaccgatgaagcgggcaacgtctctgacgcttccccggcgatcgcgatcaccgtggataccgtggcaccggctacgccagcgatcagcgccgtgggcggtgaaccgaacggaggctacatcacggataccacgccgacagtgggcggaaccggggttaacggtgagacggtgatcgtctacaacaacggcgtcgaattgggccgtgtcgtggtggtgaacggagaatggagcctgacgctgccagcgcaaacggacggcccgctgaacattaccgtggcgggcgtggacgcagcgggcaacctcagcgcgccgagttcggtctttaccgtcacgctcgacaccgttgcgcccgggataccgcaaattaatgctgtctcagacagccagctcaccaacaacgtgctctacacccgcgacggcacgccgaccctaaccgggaccggcgagcccggcaccaccgttatcgtctccgtcgacggtactgcgtcaggtgtgccgatcacgatccagccggacggcagctggagctggaccgcaggcacaacgctcctggatggttcgcatacctttactgtctcgtcagtcgatcaggcaggcaatccgtcaaacggttcagcgtcactgagcgtgacggtggatacccaggacccaaccgccccgggcaatcttagccttgctccagaaggtacaccgctgaccggcaccgccgaagcaggcgcactcatcaccgttaaggatagtggcggtaacgtcattggtaccggggtggcgaccggcggcagtttctccattgcggtcagcccggccccgcaggatggcgcgaccctgaccgtgaccgcgaccgatgcttccggacgtaccagcgttgatgcaacttataacgtcaccggtacgcttccgaatcttcctgacgtacccgtgatcgtggccatcaacgatgacgtcgacccaatcattggcgacgtgaaaggcaaaacgaccaacgacaccaccccaaccctcaccggtacggctcaggcgggaagccagatcgctatctacctggacggtggcgtgacgcccgtctcgacggtcactgccgacggcagcggcaactggagctataccccagccgcgcttggcgaggggctgcacacctttgaggtgaccgcgaccctcaacggccagaccagcggccgctctccggcggccagcgtcaccgttgacctcaccgcgccgggcacgccgaccatcggcgccgtgattgacgacgtcggcccgggcaccggcccgctgaccggcggccagaccaccaacgacaaccagccgaccctcaccggcaccggcgcggtgggcgataccatctccatctacaacaacggcgtgctgctggacagtgtggtaatcggcaataccggcacctggagctacaccacgcctgtcctggcagagggcaatcacgtcctgaccatccgcgaaaccgatccggcggggaaccagagcggtccttcggcgggcttcaccgtcgtggtggattccgtttccgccacgccggtcatcaccaacgtcacggataatgtaggcaatgccgccaccacggtggtcagcggtggtctcagcaacgacgccacgccaacccttacagggacagcggacgcaaacagcgtggtgactattttcgacggcggcacccagattgccgtggtcacggctgacaacacggggacctggacgtttactcctgataccgccctcggcgaaggctcgcacagcttcaccgtccgggcgaccgacccgcagggcaacctcagcgcggtctccgccccctggagcgtggtgattgacctgacggcaccgacggttccaacgctggataatgtgaacgacgacgtccctggcggcgtcctgggtaacctcaccagcggccaggtaaccaacgacagcaccccaaccatcagcggcaccgggctggcgggcagcactatccacatcatgaataacggcacgcagattggtacaacgaccgttgacggaagcgggaactggtcctttacgccgaccacgccgctgggcgacggcagctactccctgcgcgcgtatgcaacggatgcggcaggcaatgcctcggccaactcatcggtcttcgcctttaccgtggataccgcagcccccggcgtgccggtggtgaccagcgtggttgatgatatcggtccggtcaccgggacgctcacgtcgggtaacagcaccaacgacgcgcgtccgaccttcagcggcacgggcgaagtgggttctaccgtgcacgtgctcgttgatggcaacgaaattggcacggcggtggtcaatgcccagggcaactggagcttcaccccgggcagcgatctggccgaaggtccacacgccatcacctttaacgcgaccgatgcggcaggcaacaccggcgccacaacggcaccgtttaacctgacggtcgatacgggcgtgccgttagcgccggtcatctcgaccgcgggtgacaacgtgggcagtattcaaaccccgctctcttccgggcagagcaccgacgacaccacgccgacgctgaacggcaccgcgaccgccaacgccacggtcactgtttatgagaacggacagccggtcggcaccgtgcaggcggacggcaccggcgcatggagctttacgccatcagcgccgctgggcaacggcagccatacctggaccgccacggtcaccgatgcagcgggcaacgtcagcccgacctcgccgggctttaccctgattgttgataccgcggcaccgaacgcgccggttatcagccaggcaatcgacgacgtgggcagcatcaccggcccgctcacgtccgggcagacaaccgacgacacccagccgcagcttgttgggaccagcgaaccgtttgccaccgtgaagatctatgagggcaccaccctggtcggcacgggcaccgcggacggcagcggcagctggagcatcgtgctcacccctccgctgaccgcgggcgcgcacagctttaccgcgcaggccacggatgcggcaggcaataccagcgtgtcgtccaccagcttcagcctcactgtcgacaccacgccgcctgcgctgccggtgctgaccagcattctggatgacgtgggcaatgcggcgacgccagttgccaacggtgggttcaccaacgacgcgcagccgaccctcagcggtacggcggaagcgggagccacggtgaaaatctttgataacggcgtacagatcggcagcgtgacggcgaccggcggcgcgtggagctttacgccatctccggcgctgagcaacggcgcgcacacgttgaccttcaccgccaccgatgcggtgggcaacgccagcgcccccaccgccggatatgtcattaacgtcgataccctcccgccagccgcgccggtcatcagttcggtcattgatgatgtcggcagcgtcaccgggcccgtgaccggtacaaacccgactaacgacacccgtccaacgctgagcgggaccgccgaagcgaatgccacggttcggatctacgacggcatcacgctggtgggcacggtcaccgccgatggcagcggcaactggaccctgtcacaaaccaccaccacgttgacgcagggcacgcataactttaccgcgacggccaccgatgcggcgggcaacaccagcgtggcgtcagccgtgacgacgattatcgtcgatacgaccgcgccaacggcgccgaccggaaccttcaacgccgacggtagcgtcctgaccgggagcgcggaggcgggcagcaccgtcactatccgccttgcggacggttcaacggtgaccgccattgcgggcagcaacggcacctacagctacaccttcattaacaaacagatcgaaggtcagacgctgcagatcaccgcgaccgacgtcgcaggcaacacctccctgccgggctccgcccttgcgccggtggtgccgctctccgccagcaataacgttgaagagctgaacctcagcaccacggcgcccgtcaccaacagccagtacagcgactacggcttcctgctggtcggcgccgtgggcaacgtcctgacgctgatcggtaatgacaccgcgcaggtgaacttcacggtgggcaacggcggcagcgcggacatcgtggtaaacgccaatgccacgggggcggtgctctctctgctcaatacccttgagctggtggtgcagcactacgttaacggtgtctggacaaccgtggtggataccggccagccgcagtttgccgatctcctgaccctcggcgccaccggcgtctcgctgaacctgaccgggctggccgacggcaactaccgcgtgctgagctacaacaccaacctgctggcgacaggctcctacaccagcctcgacgtggcggtgaaagagaccggtccgggtacggtcacgggcgataccagcctcaacggcaacgtgatcctcgatacggacccgaccgccggcagcgacaacgcgccggccggcaccactatctccacggtcactaacgcgcagggcgtgaccaccagcgtgaacgccgacggcacggtgatccagggcaaatacggtacgttgaccatcaaccgcgacggcagctatacctacaacctgactgataccagcgccgcggtcgttggccggacggagagcttcacctacaccatcacccataacggcgtcagcgcgtcggcaaacctggtgctgtctctgggtgccggtacggtcatcaacggcattgtggcagtggacgacacggcctccctgacctttgacaccaccgtgagtgaggtgaataacggcgcctcgtctcagaacggttttaccctggtgggcattaatctcggcagcacgctggggcttaacctgctggacgacctgaccaacccgattatctacaacgtggaggaagggacgacccgcaccatgaccatccaggcctccgtgggcggcgtggcgctggcatcggtgttcgatctgtacgtctataagttcaacaatgcgacccagaccttcgagcaggttcgcgtcgagtcgggctggctgcgcgcgccgctgctggggggcacgtcaccgcagctgacgctgaacctgcctgccggggagtacctgttcctgctgaataccgcatccgggatcaccgccctgacggcctacacgctgagcgtcctgcaggaccatgtctacagcgtggcgagtatcagcgaaacgaccaccggcgacgtgctggcgaatgacccggttccagcgggcacgctggttaccgaagtgaacggcgtgacggtcaacagcagcggcaccaccaccattcagggggaatacggcacgctgaccatcaatgcgtccggtcagtacacctataccctgaggagcggcgtaggcgcggaccatatcagcacgccggatacgttcgtctacaccgttaccgcgcctgacggctcgaaggatacggcatcgctcaacatcaccccaaccgcgcaggcaatgaatgcggtcaacgatgtcagcgccacgatggaccttacctcggtgcaccacacgtcggtctactcggataccaccgtgggcgtcgccagctggaccacggccctgttctcatcaacccagggcagcggcagcggaaccttcgtggtcgacccgaacaccgcgctgcacaacgcgtcgctgcactttagcgtggcctcgctgctggcgctgggcgggctgacggtgaactggacgattagcgatgccaacggcgcgatccgcagcggctccttcagcggcgcctcgctgctgggcggcagtatcgacgtcccgctgaccgggctggatctcaacgccgggacctatacgctgagctttaccggtagcgtaccggggctcagcgtcgggaccatcaccatcacgccaagcgtaaacggcaccacctactcgctgagtaatttcgacgtcaccggcagccacaccgtcaacggcaatatctttgacggcaccgactctggcggcgtgctggatcagctccactcggtggatacccgtctgaacgtgaccggttacaacggcgtgaccaccacgctggatccgtataccggcagcgcaacggtgaacattgtcggccattacggcatcctggcgatcggcgctgacggacactacacctataccctgaacagcggggtatcgctctcaaccatgacctcgaaggagaccttcaactacaccctgaccgactctgcaggaagaacggacagcgccacgctgaccatcaatatggcgccgcagttcatcagctcggaacataacgacgccatcaccggtacggcctacggcgatacgctgatttaccaggtgctgaacagtacggtgggaaatgccacggcgggtaacgtcagcagcgccggaggcgatcactggaccgggttctcgctggcgcagggagacaagatcgacattggcgatctgctggtgggctgggacggtaataccgcctcgttggggaattatatccatgtcacacaaagcggtagcaacactgtgatctccatcgaccgtgatggtgcagggtccacctacactaatactgcactcgttacgcttgataacgttcagaccacgtacgacgagcttgttaaccagcaacacatcattacctga

SEQ ID NO: 144961 - DNA, 240 bp, Enterobacter cloacae
atgaaaatcagtcagcgtgacgtggcggcaatggacgatctggataacgccctcgactccgaaagcggctacaccggcgcgcgtcggatcgtgatcttctcgctgctgatgtttgtggtgctgggcgtctgggcgtggtttggcgtgctggatgaggtgtcaaccggatcggggaaagtgatccccagctcgcgcgagcaggttttacagtctctcgacggcgggatcctcccgagctga

SEQ ID NO: 144962 - DNA, 186 bp, Enterobacter cloacae
atgaccccacgccagatagccgcaatcacagccgctaaactggagcatgaaggccaccagcttaccccggcagaggttcgggaaatggagcgcattattgaagctgatacagcccggcgcaaacggttcggggagatgatgcgagcgcctgcctaccagtggaggaagccagcgccgcgcaggtag

SEQ ID NO: 144963 - DNA, 642 bp, Enterobacter cloacae
atgagtacgcaacccatcattattgagttcggcagctatcgctggcccagacatcttgcaatacatgaagcaggtcatgcgatagccgcatggtttttcggcatacagggggtagaaattgctttatcgggtaataaccgagtggcaaaaacctaccttagcggcgatgttgatgaatgtggagccgtcgcggtatggcacgccaactatccacggaatgtggctgaggttaagtcttacaccctctcgaatgatgacaccaggttacgtctgatagaccaggtatgccgggctatggttatctctctggctggtatcgtcgcgcaatcacgctatacgggggatgatattaacgcactgatggaaacgtccgggaaagcagacatgaaaaatgttcgtgatttatcagaggtataccgggtggctggtggagaggatgctgatatacagagaatatccctttcccgtgctgaggcgctgattgccctgaaatggtgggatgttatcgcgctggcgaaaatactggagaaccgtaaccatatgcctgccagcaacttccagcgcattatgggtgatattgacaagcctgtaccaaagcctatggcgctggctgaactggatgaattggtgggtgaagaatga

SEQ ID NO: 144964 - DNA, 1068 bp, Enterobacter cloacae
atgctgtcacttggtacatatcctgatattcctttgaccgaagctaggttgaaacgcgatgaggctaaaaagctggtggtagcaggcataaaccccagcgatgtacgtaagagagaaaagctggcaagggaggaagaaagggggaatacctttgaagctatcgcccgcgaatggtacgaaaagcgcactgatcgctggtctgctggttatgccgaagaaatgatgaagacgtttgagactgacgtattcccgtttattggcgggcgccctatcgctgaaattaagccgatggaacttatgggcgtcctttcccggctggacgagcgcggggcgaccgagaagctacgtaaagttcggcaacgctgcggcgaggtgtggcgttatgccatcgttactggcagggctgagtataatcccgcacctgatctcgttagtgcttttgtcccgcataagaaagagcattacgcatttttgaaacacgaagagttgccagaattttttagaacgttgaatacctatagcggcagcattgtggttaagctggcaatgcgcttgcaggtgcttactggtttgcgacccggtgaactacggcaaggggagtgggctgaaattaattttgaaaagcgcttatgggaagtaccgccttccagaatgaaaaagcgccgtcctcactgcgtaccgttatccgatcaggctattgccattctggaacagctaaagccaatcaccgggcactatcagtttattttccctggaaggattcatcacagtaagccgatgagcgaaatggctatgaatgttctcatacgccgcatcgggtatgcggggagagtaacaggccacggcttccgccacactatgagcactattctccacgaacagggctataacactgcatggattgaaacgcagctcgcccacgtcgataaaaactctattcgcggcacctacaaccatgctcagtatctcgatggtcgccgggaaatgcttcaatggtatgccgactatatggatgcgctggaacaccgtgaaaacgtggttcacgggcgttttggtaaatcctcatga

SEQ ID NO: 144965 - DNA, 2073 bp, Enterobacter cloacae
atgatgttctttggcctggaagcccttcccgggatcgtgttgtcgctgtttatccgctattacccgtcggtcgggatgttcgaaacggttgccggggtgctccattttattgtccctttagtcctcagctggggcggctaccgggtgtttgcgcccagacgcaatatgacggcgtacggcgacatccggctgatggcgcagcgcatcttctggcaggttatctgccccgcgacgctgtttctggtgctgtttcagtttgcggtgtatctgggcgtgtatgagagtcgccagagcctcgcggggttgaaccctcttaacattcgtacgctcattaactaccaggcgctgctggtcagcgggctgacgggcgtgccgttgagctatctgctgatccgcctgattcgtcatccgcgctatatcaaaagtcttctctcgcagatccgtttccagatagataaaaaggtgacggccgcggagtttttgctgtgggcgattgcgcttggcgggctgctgtcgctgctgctgctcccgataaatgaaaacagctccatcttcaccactaactataccctgtcgctgctgatgccggtgatgctctggggcgcgatgcgttttggctataagctgatttcgctgatctggaccccgatactgctggtgtccattcactatttttaccgctatatcccagtgaatgcggggtacgatattcagctggcgatcacctcttccagttacctggccttttcgtttgtggtgatttatatgtcgatgctggcgacccgccagcgcgcggtgaacaaacacgcccgcaggctggcactgctcgatccggttgtccatatgcctaacctgcgggcgctgtcgcgcgatctggcgaagaatccgtggtcggcgctctgcctgctgcgcattccggagctggaaattctgggccgaaattacggcgtgcagctgcgtattcagtacaaacagcagctggcgcagtgggttaacgctacgctccagcccaatgagcaggtgtatcacctcaccgggtatgacatggcggtgcggctcaacgcggaatcgcaccagcagcggattgacgccctggacgagcatatcaagcagttccgctttgtctgggacggcatgccgctgcagccgcaggttggcgtaagctactgctatgtccggtccccggttaaccatctttatctggtgctgggggagctggcggtggtggccgatctgtcactctcctctaatcacccggaaaatcttcagcagcgcggtgccgtccatttgcagcgcagcctgaaggataaaatcgcgatgatgagccgcctgcagaaggcgctcgacaacgacgaattcatcctgctggttcaacccgttcgcggcctgcgtggcgattgctatcacgaagtcctgctgcggatgccggacaccaatgggatactgatctcccccgatcagttcctgcccgtcgcgcaggagtttggtttgtcctctcgggtggatctgtgggtgcttgagcatacgctgcgcttcctggccgcgcatcgggaaagactgcccggccagcgctttgctattaatctggcgccttcaacagtgtgccgggtgcagttcccgcttgaggtgagccgcgtgctggcgaaatacgctattgaaccgtggcagctgatctttgaagtgacggagtgcagcaacttctgcaacgcggagcaggcgctgcatatcctcagtcagctgcagaaaatgggggtacgcattgcgattgatgattttggtaccggctatgcaagctacgcgcggctaaaaagcgtggacgcagatattcttaaaatcgacggcgacttcatccgcaatatcgtcaacaacagcctggattatcagattgtggcgtctatctgccatctggcgcgcatgaagaagatgctggtggtggcggaatatgtcgagaccgaagagatacgtagcgcggttcacgcgctaggtatcgattatgtgcagggctatctgattggcagaccggcaccgcttgagtcactgctggaaacagaggggtcctgcgcggacgcctga

SEQ ID NO: 144966 - DNA, 1011 bp, Enterobacter cloacae
atgaaggctgctgttgtcactcaggaccaccaggtcaacgtcaccgaaaaaaccttacgcccgcttaagcatggggaagccctgctgaagatggagtgctgtggcgtatgccataccgatcttcacgtgaagaacggtgattttggcgacaagaccggggttatcctgggccatgaaggaattggtatcgtgaaagaagtcggccctggcgtgaagtcgctgaaagtcggcgaccgcgcaagcgtggcctggttctttgaaggctgcggccactgcgaatactgtaattccggcaacgaaaccctgtgccgtgacgtgaaaaacgccggttactccgttgacggcggcatggcggaagagtgcatcgtcaccgcggattacgcggtaaaagtaccggacggtctggattcggcggcggccagcagcattacctgcgctggcgtgaccacctacaaagcggtgaaggtgtcgggtattaagccgggccagtggattgcgatttacggtctgggcgggctgggcaacctcgcgctgcagtacgccaaaaacgtctttaacgccaaagtcatcgcccttgacgttaacgacgaacagctgaagctggcagccagcatgggcgcggacctcaccatcaactcccgcagcgaagatgccgctaaaattgtgcaggaaaaaaccggcggcgcgcatgccgcagtcgtcactgccgtcgcaaaagcggccttcaactcggcggtagatgccgtgcgtgccggtggccgcgtggtcaccgttggcctgccgccggaagcgatgagcctcgatattccgcgtctggtgctggacggcattcaggtggtgggttcgctggttggcacccgtcaggatctgcaggaggccttccagtttgcggccgagggcaaagtggtgccgaaagtgacgatgcgtcctattgaggacatcaacgccatctttaaagagatggaacagggccagatccgtggccgtatggtgattgacctgcgttcgtaa

SEQ ID NO: 144967 - DNA, 135 bp, Enterobacter cloacae
atgataatatgcggaatagacgctgaaaaattaaataacccattgtttttaaagaaaagcagcaataccaccctcattaaaccctcggaaattgcgaaatttaacgcgataaacaaaaaccatcagaaattatag

SEQ ID NO: 144968 - DNA, 768 bp, Enterobacter cloacae
atgagtctgttaaccgtacgcaacatgtcaaaacgcttcggcgggctgactgccgtggatgacgtttcgattaccgtgaacagaggcgagatctacgggctgatcggccccaacggcgcgggaaaaaccacctgctttaacctgatcaccgggctttatccggcggacagcggcgaattttcgattgccgataagccctacttcccgaagcagatagagaaagtgaccgccgccgggattgcccgcaccttccagaacgtgcgcctcttcaacgagatgtcggtgctggaaaacgtgatggtgggccgccacgtgcgcacccgtaacggcctgtgggccgcgctgagccgccataaacgcgcccgcgaggaagagaagcagacccgcgagctggcctggcactggctggactataccggcattgcgcagttcgcccactatcgcgcctgcgacctggcctatggtcaccagcgtcggcttgaaatcgcccgcgcgctggcaacggatccgctgctgctggcgctggatgaacccgccgccgggatgaacgcggcggaaaaagtggcgctcggcgagctgctcatccgcatccgcgatgacggcaaaaccctgctgatgattgaacatgacgtcaagctggtgatgggcatctgcgatcgcctgacggtgctcgattacggcaaaacgctcgccaccggcacgccggaaagcgtgcggcgcgacccggcagtgatcgccgcctggcttggaggtcacgctcatgtctga

SEQ ID NO: 144969 - DNA, 1686 bp, Enterobacter cloacae
atgtctcgtaaagacgttctgtacacgccttataatggcgccgtactgctggaaaacccgttattaaataaaggcctcgcctttattaaggaagagcgggataattttaatctgcatggattattgccgcataacgttgaaaccattgaggagcaaacggagcgtgcctgggtgcagttctgccattttaaaagcgacatttcccgccatgtttatttgcgcaatattcaggacaccaatgaaaccctcttttacaacctcttgcgttctcatctgaaagagacgttaccgattatctataccccgacggtgggtgaagcctgcgagcatttctccacgatttatcgccgcgcgcgcggcttgtttatttcatggcctaaccgccaccgcattgatgagatgctgcaaagtttctcgcgcaacgacattcgggtgattgtggtaacggacggagaacgcattttaggcctcggcgatcagggtatcggcggtatgggcattccgattggcaagctgtcgctctataccgcctgcggagggatccatccggcctccaccctgccgattatgctggatgtcggcaccaataatcagcaacacctcgacgacccgatgtacatgggctggcgtcacccgcgcatcagcgacgaccagtacgctgaatttatggatatgtttatcagcacggttaaggcgcgctggcccaacgtcctcctgcagtttgaagactttgcgcagaaaaacgccacccgacttctgcagcgctaccgcgaccagctgtgctgcttcaatgatgatatccagggcacggcagccgtcaccgccggtacgctgatcgcggcggcccacgcggcggggacgcgcattcgcgatcagcgcgtggtgttcctgggcagcggctctgccggatgcgggattgctgaaaaaattgtcgcgctgatggtcggtgacggcctgagcgagtcggaagcccgcagccggatctttatggtcgatcgcttcggcctgctaaccgacgacatgactaacctgctcgatttccagaaaaacctgctcaccgcgcgcgacgccgttagtcgctggcaggtagactcgcaaaatatttccctgctggacgtggtgaaaaacgcacatcccacggtgatgatcggcgtttcaggccagccggggctgttcagtgaagagatcgtcaaagagatgcatcgccactgtccgcgcccaatcatcatgccgctctcgaacccaacgtcgcgggcggaagcccagccgcaggaccttatcgcctggacccagggtgccgcgctggtggccaccggcagtccgttcgccccggtattctgggagaatgcgcactatgagattgcccagtgcaacaacgcctatatcttcccgggccttgggctgggcgtgctggcctgtaacgcgcgccgggtgacggaagagatgctgatggcagcaagccgcagcctggccgcgcagtctccgctcgtgaccacggaaagaggaggattactgccgccggtagatcagattgaaacggtctcacgccagattgccgttgccgtcgcccgggccgccattgaacaaggcgtggcgccagcgttagatgatgaaaccctgatggcgcgtatcgagaaaacctggtggcaggcggactatgcaccgtaccgccgatccgcgctgtag

SEQ ID NO: 144970 - DNA, 402 bp, Enterobacter cloacae
gtgattgtcggctcgggtaccaatcaggagcgcatcctgctgggctggaacgaagagaataaaaaggcggggcgggcgcctgcgctgccggtctatcttcacgacgatgcctcgggcaatctctatatccagtccggcagggcggatgtgttctttggaccgcagtcggtttcatcctggaaagcggcgctcaccggcaaaacccgcgtggtcggtttagggccgaagaaagcttatgtcgccaccacgaccaaaaaaggcaatcaactggtttatgccctgcaggccgcgctgaacggtgcgattgagcgcggagagtaccagaaggtgctggcgcgctggggcgagcagggcgaagcggtgacgcaatcggaggtcaacccgcctgggataacctactaa

SEQ ID NO: 144971 - DNA, 996 bp, Enterobacter cloacae
atgccaagtgcccactgtgtttgccctgaatttattgctaatcatatttctgatcctttagtttttaataatgtgtttcttggtgttttgttacaatcagatgatcaaatcataactgattctaaagggattttgtcttatgaatatagtaaagctgttgaaaatgatcctgatgccttctcattatataaagtttggcaaagccaattagatgcacgtaccgatgggaagttgttaaaaactgaaactgaagtgacttcttcatacgaggaaataatattcgatgttgtgcaaaaagcagcgacaacgtttgataaacatatcataacttctaataatgaacgctatcgtccattcatatctgaactcacccgacaaagaatttcactttataatttgcaaaacttgacgccttcaaacatacataaagctttgagtaaaaaaatatcatttgaagaactttctcatgatattggatggatacttcacagattagcaagaactaaaagtaaaggtacaactgaagacgactttaatgatcatctacgtaatttgttattattcaagcattacgaagttaaagatcaaacaagagagggagtatcatctgctggaaatagtgctggggaattagatttagtaatagaagaaaagggttttctgtttactatcattgaggctatgattttagagagtgtcgactcttcgtatataagaacgcactataagaaattgttgaataattataatcctttaggggttgataagaactttttgataacttactacacaggctctcgatttgaagaatggtggcgaagatattttaacttcattcgtgacataagtacggatgtttttgaactgtcaggtgatatatctttaactgatactgtagaggaggcaacattgtattcttctttgaaaaaattaactcagcattttgaaattaatggcaggcatgcctgttgtgtgcattatgcggttaaattttga

SEQ ID NO: 144972 - DNA, 1683 bp, Enterobacter cloacae
atgctgctaagattttctggtggaaattataaagcgtttgagtcttttcaacttgacttaaaaccattaacaatacttttgggggccaatagttgcggtaaaagtgcaatattaaactccttcttaatgttagcacaatcgatcgaaacatcctctcgtactgaaacaccattccgtttaaatgggaatagggttgggatgggggagtcattaaatgtaattaaagataaagattctgaaaatattttatcgtttgcatttgaatttgatgatcagacctcgattaagtctcaaatagatgctgctaaaagagaatgtgtagagacacattttgccttttcgagatatatctttcaatcattacggcgaaataaatttttatacgataaagtttttccattattaaatgaattggaagaatcctattattcacatgatagttttaataaccgacaactaaagaagatatcttcaaaaatatgttcaattattagaatatatcgtgcaaacaaagatgatataaccgtaagaacaaaattagttcattccaaagtgttgagtgattttttggataatgtatcttatcagcggattaatgattgtcttaatggcgttttgactgtaccattatctaaattagctgcacagaagatttcctttaaattttcatataataagagaaaggattaccttcatattgtcgaagcaaaacttacaaacaaaattgatgaagttatattgtgtgtaaaaattgaacgtcaaaatgaaattgaactttcttctgatatcattaataacgatattcttagacgctcaaaaaacgacatcaaaaatttcattgattttaattctttgattgttttcaataacgactctggtgttcgttcctcaccgggttcttatttctctgaatcaattaatcccgttgctgtttatttttcaaaagttcttgcagcatcgttcaaagaattaaagaaatcttttcatggtgtgaatataaaccatgtaagtcctttaagggccttacctcagcgatattatttgttagataaagcgatttaccacaaccagctaaatgctctcgatggcacagagttggctgaggttttaaaaaataatgagcatattaaagattcaataaatgaacttctctctgagtttaatattgctgtagaagttgagaaggtgaacgacattattcataaaataacagtaaaccaagatgctgttaacctggagttgactgatgtaggtttcggtatttctcaagttttacctattttggttcaggcatatttatctccagcttattcaataaccataattgaacaacctgaaatccacttacaccctaaaatgcaagcatggttgactgatgcattaattaaaatagcactaacttcatttaagaaatttgtcattgaaacacatagtgatgcattagttcgaaggttacgtttgcgaatagtcgacgaagataatcctttaactgaacaagatttagcgatgtattatttggaacgtgataaattaggaaacaaaacaaatataagaagaattcctgtttctccagatggagatattacatggccttctgaatttatggatgttgagattagcgatacccttcttattcagcaaaagaaattagagagaatgttgaacgataaagggtctaaataa

SEQ ID NO: 144973 - DNA, 858 bp, Enterobacter cloacae
atgtatttcaaaacagtggttataagttcaagtttactattttgtttatcggcctctggtgaggaacttaagcaaaatattgatagtacattacaaaaatgtaagatggatgctgttagcactattgcctcacagaattgctatattaaagctacaactgaatgggatttagaattgggaaaccagtacaaactactaatgaatggtcaacctgataacgtacgtattgctctcagagactcacaaagacaatggattaaatatagagatcaatatgtttctgctatagatgtattttacaaacaacaaggtggtactatttcatcattaaatgcagctgaatctaaactcaatattactcgtgataaaacaattgatctttatcgattaagaaatagtactgatttatcatcgccagcaacggtagacaataataaaatagaaaacactgaagttaataatagcgttggtgaagaaaaggtggatgaaaaagttgtttcaaaagtatcaagtgatgattcctctaatttaaagacactggcgtgtaaatttgtaatacaaactgataaaacaattaaggaaatgcccgggtttttcgcagaaaataaaatgactgtattagataaagggatacagttcactgtacttactggtgattattttaatatcccagataaattaattagccccaacaatctaacttcagtaaaaaataaaatgattggtataggaagccaacaagaggatggtactgtttcaaccttttctaaagatagctctaattatgtagttactacgtgggcgagtacagcattcaagcatacgaaatttaaattaactctttatgcttgtaaatga

SEQ ID NO: 144974 - DNA, 861 bp, Enterobacter cloacae
atgaataaattacagttttttgtttacatgggatttggaataatcatggcattcattgtctatgattttttcagtacatttagtgaacctggcatgtcattttctacggtattacttgcattagttactttagcaatttggagcatggttatgatcatttcactatggtggtcagttatagccattccatctattcaagaaaactaccctgcattaatgcagaaattgccaaaatttttcaataattaccttctgcctgttatgattgtttttttattattaatggcagggcaagctaacgtgtatatgatgaatgtacaagggaggaatctgggctttacggttgaagaccaattttctaaagcgaagagtgcagggatctttagcagagaaaagtggattgaggttaaagctaagcaagatgagtcaataaaattagccgatgaacaagctgctaatgctgcatcagaaaaaaagaataaagactacatcgaaagtaagattaacagcctcgacagaagcagtggtgagtacttagtagctgaaaatacctacaagaaacatggtgtctgggttgatgattacattgctgttcaaaagaaatcgtgttcacgcgaattcaatcggcttttagctgcgactgctgcatctgagcaagcaattgagagctggaatgaaacatcggatgccttaaggcaaagtggctcatccccgttcgcaggcggtcgaagccccacaactgatcctgatattcagcgaaccagcaacgatattagatttgcccaatctcaattagaaaattgtgggatagctcatcttggcgagatagaacaccgtgttacagtgcaaattgataattaa

SEQ ID NO: 144975 - DNA, 162 bp, Enterobacter cloacae
atgagaatggcagattattattacgagcagatgttagctgattataaaatcctggaggaagaatatgaatatcttgtatggaaaggagatggatcactttctgaagccatcaataagcacagatccgcaaaaaataacaatgaacaacataatagaaaatga

SEQ ID NO: 144976 - DNA, 1017 bp, Enterobacter cloacae
gtgccgcagctgacgctgaccgttgaccgcgagcgcgccgcccgtctcgacgtgccggtgtcgcgcatcttcagcagcctgcaaaccgcctttggcggcacgcgcgccggggatttcagcatcaacaaccgcgtctaccacgtggtgatgcagaacgagatgcagtggcgcgagcgtgcagagcagatcggcgagctgttcgtgcgcagcaacagcggcgagcgggtgcgcctgagcaacctcgtcaccatcacgccaaccgtaggcgcgccgttcctgcagcagtacaaccagttcccgtccgtgtcggtgagcggctcggcagcggctggggtgagcagcagcaccgcgatggcggcgatgggcgagatcctggcggaaagcctgccggccggttacgactacgcctggagcggcatgtcgtaccaggagcagcagaccggcaatcaggcgatctggatcgtgctggcggcggtggtgatggcgtggctgttcctcgtcgcccagtacgagagctggacgctcccggcaagcgtgatgctctcggtgctgttcgccctcggtggggcgctggtctggctgtggctggcgggctacgccaacgacgtgtacgtgcagattggtctggtattgctgatcgcgttagcggccaagaacgcgattcttatcgtcgagttcgcccgcgcgcggcgtatggacggaatggcgattgtcgatgccgcgcgggaaggggcctcgcgccgcttccgggcggtgatgatgaccgccgtgtcgttcattatcggcgttttgccgatgatgctggcgaccggggcgggcgcccagagccgccgcatcatcggcaccacggtcttcagcggcatgctggtggcgaccgtggtggggattctgttcatccccgcgctgttcgtgctgttccagcgcctgcgggagtggggccacggccttacggactcgtcgcccacagctcgcagtgcttctggaccagagaaatcagcgagccgccgtcggcgataa

SEQ ID NO: 144977 - DNA, 870 bp, Enterobacter cloacae
atggatagcaacgtttggaaagaaaatagaattgcgcctttagaatactgctcattcgaaagagctgctaagttgctcaattgcgaatgtgaagacttaattcactggaataaaataggtgctatatcgatagcatttaggccagaaaatatggaaggttctttttctgttcaattacgtgagcagaaagatagcgcagacatagaaaaatacaataaatctaaatatatcatgcacgaacttggaattcatggctctcaatttctacgtaatttgggtgatgcaaatgacaagggctatatagcatcaattgatgaatttcgattttatggaaacatcagtgacttatgggttgtaattaatggttccgtggatgaaaaaaacagcataactataacaaaatcattcagcactggatatacaacgctaagccctgcaaacattccaaatgacataatctccgcgttatttttttaccaaggaacgaaagacgtcatccttgagttaaaagatctcctaattacgaggagcgatatcgaaaaaatatggacatcggctatctcaggcaaaccaatggatagttattttacaagcaaggtacgtgaaattaaggccattcctgtaagttcagtttcaatagtacaaacagacagacacgaacacaaccggcaagtagttgaacaggttgccatgaaagttcgtgaacattatccggatgaatgcaccaaaaatggaaaattactactcaataaatgggtagaagccaccctggcgcgtaaaaatgattatggcggtatgaaacttagatcggtgagaaaaatttccacaatacttagcgaaatcatcaaagcagaaaaaactgctgagtaa

SEQ ID NO: 144978 - DNA, 1362 bp, Enterobacter cloacae
atgagcacaactgacgattctttctctgttacccacgacccgattgaaattcagcggccttcgcttaaagagcgctggtggcatattatggatacctggaaaatcgggattattcctctgccgctgttcgttctggcgggcgcgctgatcgccattgattgcctgggcggaaaactgccgagcgatatcgtggtgatggtggcgacgctggccttcttcggctttgcctgcggtgagtttggcaaacgcctgccgattgtcggcaagctcggcgcggcggcgatttgcgccacctttatcccttccgcgctggtctattatggcctgctgccggacgtggtggtcgagtctacgaccaagttctacaaatccaccaacattctctacctctatatctgctgcattattgtcggcagcatcatgagcatgaaccgcacggtgctgattcagggcttcctgcgcatcttcttcccgatgctgtgcggcgaaatcgtcggcatgctcgtggggatgggcgtcggcctggcgctgggtcttgagccattccagatcttcttctttatcattctgccgattatggcgggcggcgtcggggaaggggcaatcccgctttccatcggctatgccaccctgctgcatatggaccagggcgtggcgctcggacgcgtgctgccgatggtcatgctcggcggtctgactgctatcattatctccgggtgcctgaaccagctgggcaagcgttatccacacctgaccggtgaaggtcagctgatgcctaaccgcgccaatgccgatgccaccgtctctcagcctgcgttctccggcaaggcggatgtgaccaccatcgcctccggcgcgctgctggcggtgctgctctacatgctgggcatgctcggccacaagctgattggcctgcctgcgccggtcggcatgctgtttatggcggtgctggtgaagctctgcaacggcgcctctccgcgcctgctggaaggctcgcaggtggtgtacaagttcttccagacctccgtgacctacccgattctctttgccgttggcgtggccatcaccccatggcatgaactggtggccgccttcacgctgaccaacctgctggtgattatcagcaccgtctccgcgctggtggcgaccgggttcttcgtcggcaaaaagattggcatgcacccgattgatgtcgccatcgtctcctgctgccagagcggccagggcggtactggcgacgtggcgatcctgaccgcaggcaaccgcatgagcctgatgccgttcgcccagattgctacccgtatcggcggggcgattaacgtctccatctcactgctgattctgggcaacttcctcgtttaa

SEQ ID NO: 144979 - DNA, 318 bp, Enterobacter cloacae
atggcgacggcggacgagatccccgatccgcaccaactggcaatccacacctggctgaacggccgcatggtgcaggaagacaacaccagcagcatgatccacaaggtggcggagctgatcgagtacatcagcaccttcacccgcttaagtcctggcgatgtgatcatcacaggatccccgggcggggtgggtaaaaagcgtaacccgccgctgtttatgaaagagggggatcgcattgaggtggagatcgagcatatcggtcatctgagcaacgtgatcgtggaagcgccagccgtcgggctcgcggcagcacattaa

SEQ ID NO: 144980 - DNA, 6513 bp, Enterobacter cloacae
gtgacgctggcatccggcggcgacacgctcagcaataccggacgtattgccggacgtaatgtctccacccagacccgtaaagccagtgcaaccgtcagtaacagcggcaccatcagtgccagcgagaaactggccatcgcaaccgcgaatctgaaaaaccaggccggcacgctgagtgcgaccactgacatgcggcttgatgtcaaaaaagagctacagaatagtcaaaaaggcagcattattgccgggaagaacctcaccataaagggtgacggcgcgctggcagtacacaatgacgatgggctgatccagggcgataatatcaatgccagcggaattaccaccctctctaacacccatgacgcgctgatcgcggcaagagaaaacctctccgttacagcgacatcgttgcttaacgacgcctcaaccattcaggccggtagcctgacgctcgatcgcgtcagcaccgtcgataaccttaacgccgccacgctgtatgccagcaagacgctgcaacttacccatctcaacacgctgaataacaccggcagttttgtgatttctgacggcacgatgtcactgtccgatgtgaacaccctcaataacactgaaggtgcaacgctattcggtgctggaaataccacgctgagaaacttaggtacccttaataacagcggcgcatcgatgattaaatcggataatgcgctctcgatcgcgacgaccacgacgcttaataacagcagtgatgcagtgattgcctctgagggcaatctgaatatcagcggcgtgaagacgttaaacaaccgctcggtgatcatcggcaatggcaatatcgcgatcgatgccgttgaggagctgaaaaacgacggtgtggttcaggcaggtctgaacctgattattcgcaacgtcaaaaacctggccaacacaggtgaagggcatgttttagctgcactgcgtaacctgacgattgaagacgttgagtcgctcatcaacagcgacggcgcggtcatctccgccaatatgcagacggtgctgaatgccatcggcgttctgaccaaccgcacggccggtgtcattcaggctgtaaacggcccgctggagattgtcgccaatacgttgagcaacattggcagcctcaccgcagaggacgggcagcagtcggtgtccactctcgtggcgggcggcgacattacgatcaatgcgcaaaacatgcttaacaccgaacaggcggtgattgtgtcgacgcagagcgatctgtcagttaatgtcgctaataatctgatcaacgccaatgcagcggtactatcgggtgccaacaatacgaaccttaacgtagcgggcgggacgattagcaacgaaaaaaatgccctgatcgccgggaataacatcacgattaatgcctcgcagctgaataatcatgattccggcacgacctctgccagaaacgacctcaacatccataccggttcattcaataacatcaatggcatcctcgaagcgggtcatgatttattgctcaaggtaaaagactccatcgcgctgaatgacaataaccgcagtattcgtgcaggtcatgatatgacgctcagcacggaaggtacgctgtacaacaacaccatgatggaagccatcggcaacctgacgatccaggcagacggtaaggtgatcaacagcaagtctgtggtcacggggggtgatttacacatcaacgctaatgaggtaatgaacaacagcaacagcctgctctggtcgttagggaagatggatattaatgcccacgacggtgcctttgttaatgactataacggtaacgtgctgagcatgggtgacatgtcgctcatcgcgaaaacgattatcaactccgccgggatcattcgctccgaacagaacatcaatattgatgcggcctctctggaaaaccagagcacctatacgggtggcaccatttcgcaaacccaaacgcaggatgccgtgggtcaatgggccggtattgataatgtgatgacgcaggtcaggattaccacggttctgcacatcccggttctggcgtcagatatcgctatgagtaagctcggcgaaatcagcgccgggaaagatattaatattaaccagcgcggcattttcgacgaaaaagaggttaaaaataacggcggcctgatccaggcgcgacgtgatatcaccatcacgggtaatctgctgaactcgccaacctatacctccgaatccatgtatgactatctgaatctcgtccttgagcaaccgatagtactgaccgactactggaaggtggcagcagagcactacacgacgctgaccttcaactcgctctatcaataccttgatttcatctttggtgacggcgcacctgcaaccaaaagcggtacccaggatccaaacagagagcgtagctataaatcgcttctcgacgccgcgaatgactcaacccagctcaactacgtcatgagcaaagtgtttggtgaaacgtggaattcgcaagattacgcgaccctgaacacggcatggcataacctggtgagcaatgacaccagcattacccctctgaagacgaatatgatctacttcgtgccttcagaaaaaggtgaaatcacggcgggtcgtaactttacgcacaatggcggcacgctggataacggcctggctaacgctggcacaatcaaagaaaacgccaaaattgagaatatcgacgtgggtgactacaccatcgacaccgccgtcgcgggctatgatgttgccatcaataccaaaaagctgaatgaactggccatggggatcagcccactgccgaccatcaaggatttggtctctctgccgggcatgtttgaagtcactgacgaattcaaaaaagcctctgaggcggcgaaaaacggtaccgaatacagcggcccggccaaccacatcattccgattttcgaaacgcgcccggaaatgatcgatcagagcaagtacagcggctctgactactatttcgacaaggtagattacactaccaccgaaaccgttaacgtcattggcgataactactttatctccgaactgattcgtcgagagatcagccgctctgtaggcagcatgtttgcgatacgagacggtcttgaaggcgatgcgctggtacaaaacctgatggataacgccggtattgcggcgaaaaacagcgatctaaatctggtggtggggcagcctctgagcgaagagcagcgcaatgggctgacccaggatatcgtctggttcgtgagccagaacatcaaagggacggaagtgctggtgccggtggtctacctttgccctgaaacccttagccagctggctaacggtgatatcagtaaaggcacagcgtccattgcagccggaaatagcctttcagttgatgccaccgccattaacaacgtgaacggtaccctctcctctaagggtgacgtcacgctgaaatccaaaggggatattaacaacatcagcaatgcgacagatgctggcatctcggcgggcggtaacgtctcaatgacgccggaaaatggcagcattgcctcaaacggcgcggcagtgaacgccggtggcgacattgagatgaaggctgaaaagggcgacatcaccctgaccgcatctgtcggacacggcgaagacggcaagcagaagattcatgcgcacgatgatggcgtcaccgcaggcggcagtatcaacatgcaggcgaaaaccatcacttccaacgcggctgatattacggcaggccaggacgtgaatatgaaggcgagcgaaggtgacgtcaccttcaacgacctgcatcagattgattctaaccgtaccatcaataccgagatcaacggtctgtccagctataccaccaccgacaccaaaacggtgaccggcgaagctatcggcgcaaccgtcaaggctggcggcaatgtgcagattgatgccagcaagaatgtggtcatcgaaggcggcagcattgacgcgaaaagcggctccatcaacgcggcagaaaacgttgagataaagacgtctgaaaacgtgtccgctgaggaacacaccacacagtctcgccagtttgttgctgaggccggcatcagcggcgccggtaaatccgcctcggcttcctacggcaaaaacgacggcaccacaaaaaataccacctctggcgactacaccagcgcaggcggtaattctgaaacctccgcgattggtgccaaaccgggccgcgcaccgatcaccgatactgccggtttcaaggtgggtatggaagacacaaccgatagcgtgtcgacccagagcaagcagaacaccaacgcgtccattaattttaccgattccggttccgtaaatgcaggaaaaacggcggatattggcggcgctgacctctccgccggagataagctcagcattaacgcgaaggatgtcgcaagcaccaaatacgaggatgaaaccaaaaccaccgtcacacataaagaccgctttgtcggtgtttcaggtgaggcccacagtgcggtagttgatgcgatcgacaaaaccgggaatctcattgataaatcgcagcaaggccagtcgattaacagcggaaccacgacggcggaagtgctgggcgatgtgtccaacatcatgctaaacgatcttgctggcggctccgtcactttcggcgggaacacgacaaaaacgaaagaaacgcgcaccgcaacggcggagaataccaccaatattaatgctaaaaacgtcagcattaattcgaccaacgataccacgctcaacggcgtgaacgtgaactcgcagaatacggagatcaatgcgggtggtaatgtggacattaacgcagcgaaatcaacaacctcttacaccaatgaaaccgaaaaacacaaaggcggtcttaccgcaggcgtgggagtggatataactggcgcaagcggaggtatttcagtcgattacaacggcagtacggaacacggctcgggtaactctacgtcgtataagaacagtactatcaacggcaacacggtgacagtgaacgctggcggtgatatgaacatgaagggcgctaacatcgatgcagaaaaagcggatgttaacgttgcaggcgatatgaatatcacctccgtgcagaataccgagcacaccgaaagcagccgcggtaactggggcgcttctgtgggcatctccgtctcggcagcgggcatcatcccgaacgcgtccgtcaacgggggcggcggctctgaaagttacgattcgtctaaaacagcgaagcaatccggtatcaataccagcggcgagctgaatgtgaaaaccggaggcgacctcaatatgaccggggctaatctggtatctcaggatggcaccggatcggtgaacgttgtgggtgatatcaatgcgaaaacgctggaagaccacgttgagcaggatggtctgtacggcggtggcggcattggcctgagcaatggcgtagtgccttccggtaacatctacgtcgacaccgtggatgaaattcactacaacgaaacgcagaaatccactatcgccgtgggtgacaccaccagtgcggcagtgaatggcgatctcaataccaataaagatgaaatgtcggttgtcacgcgtgatgagaaagaagcaggaaataacatttcctacacgcttgccgatccggggattcgtaagaagaagaaaagcggcgctgacgcagacagcgatactccagcgaagccggatgacggccatacggacgatggcggctgccctcagaagtgtacgccgactaagccaggctcaacgcagcagcagacgacaaccacgacgcgtacaacgtctgattctcagcatatgacgattgagaaaacgacggcgacaacgacctccacgtccgcctcttcggtggtccataaggaggccgtcgcgtctgaaaccgcacgcagtgaagccgtgccaaacgttgcgccgtcaacgtcccagccgctgacgccaaaagcgaaaccagaggccgcaacggttacgccaaaagcgaaaccagaagccacaacggttacgccagtgaagaaatgggccgtaccggaaactaactatcctgtgctctctccgggctctgcaacgggtaaaaccggtaaagacatgccgaaaacaccggaccacaggaagtggaatggcgacatgaccaacggcgttgcgccatccagcaacaccaaaggcaatgacgtcaagctctcgccgggttcatccaccggtcagaccgggatggatatgccgaaaacgccggaacacaagcagtggaatggcgacatgaccaacggcgttgcgccatccagcaacaccaaagggaatgacgttaagctttctccggggtcgtccaccggtcagaccgggatggacatgccgaaaacgccggaacacaagaagtggaatggcgacatgagcaaaggtgcgatgaacgcgcgcccacagtggaaggcgttgcaaatcgatcgaccgattgatatctatgctccggtaaccattaccttcaccgacgagcagtacagctaa

SEQ ID NO: 144981 - DNA, 1545 bp, Enterobacter cloacae
atgccgcaactttatagctacatcaggtggtcaacagatcgccaggacaaagggacaaccagaaacaggcagcttgcagccgcgaaagcatatgcggctgatgctgggctggaaatggttgagatcgaagatccaggcgtcagtgcttttcgtggcaagaataccagcacaggaaaattaggggattttatagatgcagttaaacaaggagctattgcctctgattcctggctatacgtggaaaatctggaccgcattacaagacagaatgtaactactgcacagaaactgtttattgaattgttagagttaggtttgacactcgtcacaggcatggatcagcgggtatatacacttgattctgtaaacaaaaacccaacagaattaatgatttcactactgttgttcagtcgtgccaatgaagaatcagaaacgaaatcaaacaggactataggcaatgttgttgctttggtcgaacgtcataaagcaggattgccaataaacattaagtcagttggtcgccatccgttttggatagatgattcaggttcgcaatatgaagcggttaaagaacatccggtttactggagtatcgcccgcgaagctatagacatgtttttagatgggaatggcatctatacagtaaagcgttatctcgatgaaaaatatcctaacggtttaaagggtaaggagtgggattatcaagttttaaagaaaatgcgtgataatcgtgcgttgattggggaaaggactatcaatgtcggtggtgctacttacaaacttgataactactatccgtggttgtgtaaagatgaagcagagtttttaacgctggctgaacgtaagcaacaaaacaactacaaagctaagaaagacaaagcagaagaaatcaaattgttgtcagggctacaggtgttacggtgtaataaatgtggaggaacgatgcattccttcatgaatcatggtagtgctcgctacatctgtacgaatggggttcacctacagaaaaactgttctggctggtccatatcagctcaattagttgaacactgtacaatgatttcactactgatcggctacatggacaagagtcgtaaggatggtattgacactactgctatagaagaagaaatcagtagaaaagaaatattgataactgatctggaatctcgcatagcaaacatgactcaggcaatagctattgctcctgatgttagtgcattagcagttcaattaaatgcttttgatttagaacgtaaaaagactgttctggaagttgataagttgaaagaacgcttacattcattgaaaggtaaaggctctttagatgtagatattactgatttcctgatgcttattcagtggtcggtgtttacaaatatggaggatactgacagaaacaaaataagaaaaattattagctctataatcgaaagtattattgttgaaaaaacagatggatgtataactataaagataaagtgtcatcataaagatgaatggctagggaaggtgcgaataagcggggaaattcttctcggctga

SEQ ID NO: 144982 - DNA, 345 bp, Enterobacter cloacae
atggacaaaacgatttacgaggaggacggtacgcggcagcagtgggatgacacgccggtcgtgcctgcgcaaatcgctgccttcagtaaaaccgtccagctgcttaaacaacaccacgtgcaggtgattgctatcgtcgacccggttaacccctgggcgctttacaacaccgataccttccgcccggtggataagcaaattaaaaccattctggaaaagaaccagatcccttatttagatatgtacgccatgccttatcagaatggctggaactgggatcgtttgcacccctccgaactggcctgggttcctatgattcgctttattgcacagagctttaaataa

SEQ ID NO: 144983 - DNA, 768 bp, Enterobacter cloacae
atggatcgtctgctaaacattggctttataaaaataggttactgggagttaccggacgggcaattgaattatgtaatgactgaatcattcagagatacctgtaacaacctttacgcatttgtctgtgacggagaggtaaagtacatcggtaagactacaaggttactgaaaaaaagattgtatcattataaaaaccctggcatgtctcagtcgacaaatataaagaacaatgcctatattcgtgaggcattactgcaaaacattgcggtagatattcttgtattaccagataatggtctgatgcactatgggcagtttcatctcaatcttgctgctgggcttgaagatagcattatagaaacaattaatccagagtggaatggtagttcaaaatactcaacagataatactcaggttaatgctgaatttagcacaaatattctcgatgatgagttacgggatggatttctgaaatctgaatctaaagatcatagtttcaatatggccccaacctactggaaacgaggttttttcaatgtttcagtatcatcatctgatgaattttctcatgatggtgataatcttaccattgtaaatcataatggtacggtaatattaactgcaataattaatcggacggcaaataagtccaaaacgccaagaataatgggtggcactggattaagaaattttttccaagaaaattacaagattgatgatgttgttagtttcagaatgctttcaaaaaacacaatgcagttaaattga

SEQ ID NO: 144984 - DNA, 1224 bp, Enterobacter cloacae
atgaatgtcatacagcagcatgctgcagcgcttctggatagtgttgcacgatggaatgaagtgacgattctggctaaattacgctatcaggctgagctggcacctgatttcagccttatggactggctgaagaatgacgaactggccctttcacgctatctacgatttttgctttctcctgatgaaactcatggtcagtcagcactgtttctaaagggatttctttccctcattgaaaagagtgggcacgatagccctataaccaccggaggtagccatcataaagtcagggttgattatgaagtcaccattgaaaacagaagaaagatagacctgttgatgacgtcttcagagggttttattgctatcgaaaataagccatgggcagcagatcaggaaaatcagttacgggattatgcgttatggctgaacaaatgtgaaagaccatggaagttaatttatttatgcaatcaggatccgggtgagtggactcttcctgccaatacacctgaagtgctgaagcaacatatcctcacgatatcctggcatgaaatcgtcgaatggctgagtgagtgtttattgcgtgttcgggcaggtgcggtcaggatatttattgaatcattgattaaatatatcaaccagtcaattaatggtgagttcacaatggataatagtcgtgagttgtcagagatcatccgcaaggatagtcactctatcgaatcggcatttatgatttttaatcaaatgaatgaggttcgcagcgatttattcaaagagtttatctctgatttaaaagcaagcttcattaatcatccttttactattgaagtctcggatggggatttatcgaaacgtggggctaatttttatatcccattaagtctggatggtaattactctttgtgctgggagtttgaatatacaggttattatggtttgttttttggcatttcgggagtgagtctgattgaaggacaatctgcaaaaatagctgctgccatgtcagagatatttccacacacgcagggtaaatccagcgaatactggtcatggtggagcaggggtttagatctgcaagggaaaaatcgcattcctagagactggggtaatgatggagcggtttgggcgaagctccgtgagcgtgatgcagacagcatttttgcagccacccgtgaagcgattctggccgttcatgaaaagctggatatggacttattgcgttaa

SEQ ID NO: 144985 - DNA, 537 bp, Enterobacter cloacae
atggataatatcgaagacagcgttccgcttggtatacagcagttgattgatgctgagaacgacgggaagatttggctaaacagtattccggtcgtgaacgagctgttggatgatttgcagcgcgtggcgtggcatgcgcgaattcaacaggcaaaacatgagataacggcgcacaaaagcgcgtatttggtgaatgccaaaatcagcgaactggtgcagatcttcgaggggcggaatccggcttatgctgtcctgccgtggaataccgatccccaccagatgaaagcatatattacgaaacaggacgactactggggagacgatgccgacgttacccatgatgatgccttgccgcgattactcgattgctgtgccgctgcggcaacttttggcgttgagtcgctattgccagactgccctgagatattccgcagtagcaaagaacaagttctcgctgacctgtctgagcagcgctatctggctggcgcattactgatgggggtgccagtagatatatttatccagatggtgggctaa

SEQ ID NO: 144986 - DNA, 846 bp, Enterobacter cloacae
atggggattttcaatagaatcaaaaaggctcttggtttggaagtgcgaaaggggtttcgacgctggtccacttctgagcttgaagagaagaaggcttatctagaaaacaagtccgcagaagagttcactgcaaaagatcaccatctgtcggcagaatgggtcattcaacgttatttaccagtaggtgaagagcctacacccgaacaatggtcagaggtctctggtgacattcagcagaaaattgacatcaatttaaataaggctgctgcgggtgaactccttaaaactgagtatatgcaacccgctcgctataccctcaccaaggacgacttcctaagtgatatagtgcccgctttctcaaggtttgattggctaccaaatccttattcaaaggattggcaaggccgcgaaatctgggaatcgctctatgaatttactcagccgtattcttttaagcatggtgaagcaaaagatgctctgatgagtatctgtgacacctaccaggctatgcacctagtaatggatctagcgcggacatactctcaaatttgccaagcgcagcttgatggctcgacgaggattaaggtggtttgttctggcaagcattgtgatgactgcatgactcttgttggcacgaaactgggcgttgatgaactgctagctacatttaagaatggagttccaaaatttcctcatcctttgcattatgaagatgaagttcgttggtgcccggcaccatttctatcgccggagagcccacttaaggatgacgatgatccagagtttcatgcctttttagttgatctgtttgatggaccagagaagcacaaagacaaatcaaattga

SEQ ID NO: 144987 - DNA, 123 bp, Enterobacter cloacae
atgcaaactgtcatccgcgtcgagaaactgagcaagaccttcaatcataacaaggctctgcatgccgttgatctgaccgtccggcagggcagcagcagcgcgtggcgattgcgcgcgcgctga

SEQ ID NO: 144988 - DNA, 1116 bp, Enterobacter cloacae
atgtttcgactctacaggtcacatgaattaacacggcgattagaccctgaagattttcaatatattctgacgcctgcgggctcgctgagagaggcatgtatttattacgatctctcttatgaagcgaacggtcacagttttacttttggtctccccaagaaaaaatatagcgtatccccacatcaaagaccgtatgaacgcaggtatcgcagcgacgaagatcccatttatgacgaagtaaaacacgagctgaaaattggttggcttgttggtgtggatacctccaggcgctggagcagcgaccggaacccgttttatatcgacaataacggcgagctaatttttacccctacttcctcatcgtggcatgcatggtataaggacgaaatcctgaatgcctaccggcacgttattgccgataggcaaggcaggaagcccgctcctactcaacggatgcattatgattattacgcgccaacaactgcaccgtcggagaaaacgctgaacagtaaagctgtgggtcgtctgctcgccgctggtggtatttataacggcaatattaaagggtttcatgaaaccgcgctgcagcttggcggagatgctccagcaggttatgagcaagtcatgaacaacaaagggttaatcattgcgagcgcctccgttgcggcaggattaacaatgggcaggttaaatcctttaagcgaaatagatgaaatatcggggctcagtaaaataccagcacttgagagcccatatgtaaaaggtttcacctctcagagcggcacattagtgaatgctgaacacgcggttgtcgacccgaaaaaactcgcggcttatgctttagattcaacacatcctactggaggacacaaagcccgagtgtttgagtcagcgctgggatacaacccaactaatgcagatgttttagccgcaagaattcaggaaggcgtattattggccccagcaaaagtgttacaggcaaatagttacggtcaaacaatggctgtcgaaatgcccattttaggcgtcaacggtgaaacagcaatcgtgcgtactggctggatgtatgaaacagacgcgttagttcctcgcctgacaaccctattcgttaaatga

SEQ ID NO: 144989 - DNA, 2883 bp, Enterobacter cloacae
atgccatatttaatgaaacactcaccagtcgccgctgcgatttcgctggcgttaacgtcagcactatttaccgcacatgcagcggtaatagattttgctaatttacctgcctccggagcggtaacggatttacctgcagaaatacaggcactgatacctgcaacggcaaacgcgaactttagcaaaaataccggcgatcctaactatgtctaccagtacagcccggggaatatcccgatttacggagatgggatcaccctcgaagggcctggggcggaagcctttgagcattccgttaccgttattcagaactccacgtccggcagcccgggcgtgatatttggtgacgatctgactattcgcacccagtcaaaagtggctgccaataatggtaaagacgtcgacggtattcgtacccacgggatgaacacgccggccaacccggtatttatcattaccggcgaccgcacccacatctacgttaatggccaaagcggtgacggcatcaatgccgggtacagctccttcagtcagggttctctcggctccgccaatatttatgtgggtgacgatctctatatcgaaaccacgggcagcaccgggcgcgggattagcgcttatgcactgaatgatgcctcaaaggcaaaaaataacgttatcgtcggcgatcgtgcgcatattgtgacgcgcgggacttacgctgagggcattcgtaccaaccagagcggctcatacgtccggctgggcgatgaggcgaccatcgaaacgtacggcacatcggcctatggcctgtacgcgggctctgcgtcaaaaattgagctaggcgaaagcgcgacgattaccaccgacgcggccagtgcctccggggtttattctaccggctcgtcaaccattacccttgataaaggcgccaccattacgaccaacggtgccagtgcgcacggcgtctacgcgtacaccggtgcggtgaatctgggagataacgtcaccattgcggtaaacagcagcgagaaaaccagcagctccgcgcaggcgccgcatgggatgtatgcctggtcgcgcggcgtgatagcgctcgcgggtggtgcaaccattaccaccgcaggccagcgcgacagcggtagctatgccctgaacgccagtaacggcggggtgattgatgcgtccgcaggaggcaagttcatcctcaacggcgatatcctttccgcaggcggcgtcgcggccaccagcgcgcttccggcacaaaacagtatcattacgctgactatggatgacaactccctgtggaacggagcgtccttcattgagagcaacgccgcgggtaccggtactatcgcactgacgatgaatgatgccgtctggaatctgcgcgacagctccacgctgaccagcctgacgctgaatgcgggcggcacgattaatttccagcatgcagaggacgcggcgtggcaaacgctgaccatcaaggatgattttatcggcaacggcggcaagctggttttcaataccgtgctgtttgacgacacttcggaaacggacaaactgatcgttgaaggcaacacctccggtcataccggggtggaagtgaacaacattggcggtgccggtgcgcaaaccgtagaagggattgaaattgtcagcgttggcggcaactctgaggggacgtttaagaaggccagccgtatcgtggcggggggctatgactataacgtggtgcaaaaaggtaaaaactggtttttgaccagcctggtcgagcccgttgatcctgtagacccaccggtcgaccccgtagatccacctgttgacccagtggacccagtggacccggtggacccggtagatccgcccgttgacccggtgatcccgccgcaagagccggtccccccagccgcaccaccgaaaagcgagcaccagtatcgcccggaatttggcagctatctggcaaacagctatgcggccaatacgctgtttatgacccgtctgcacgatcgtctgggtgaaacgcagtacaccgacatgcttacgggcgagcagaaagtgacgagcctgtggatgcgtaacgtcggcggtcatacgcgttttaacgacggcagcggccagctaaaaacgaccgccaatcgctacgtgctgcagctgggtggcgatgtcgcccagtggagcaccgatggcctggaccgttggcatcttggcctgatggcaggctacggcaacagccagagccggagcgcttccagcctgaccggctaccgctcacgcggtgaagtgaatggctatagcgtcggtctgtatggtacctggtacgcaaacgaggcggataaaagtggcacctacgttgatagctgggtgctgtataactggttcgacaataaggtaatgggacaggatcaggccactgagagttatcgttccagcggcgtgaccgcctctgtcgaagcgggctatagcgttaaggtgggcgaaagcagccgcaacagctactggatccagccgaaagcgcaggccgtttggatggacgtgcaggctgacgatcatcgcgagcgcaacggcacgcgggtgaaagacgagactcagggcaacctgatgacacgtctcggcgtgaaggcctacatcagcggacataacgcgattgacgacggtaaatcacggaccttccagccgtttatcgaagcgaactggatccacaacacccagcccaagcgtatccgcatggatgacgtcagcaatgacatgcgtggtacgcgcaatatcggtgaactcaagaccggcgtagaggggcagattacgccgcagcttagcgtatggggcaacgtggctcagcagataggcgataaaggctacagcgatacgcaggggatgttaggggtgaaatacagctttaaataa

SEQ ID NO: 144990 - DNA, 234 bp, Enterobacter cloacae
atggggcaaatttataactctgattcagtaagcatggctgcgggtggcggcggcggaagtggcggcccaactctgactcatgttccagcgggacagacactggacccgttaacggcctcaccgggtatttattatctggatgtcggggcaatgcttaaaaatggtcccgctgccatcattattgatatttacagagcagtggtcactgtgagagttacggggctgtcagtgtga

SEQ ID NO: 144991 - DNA, 222 bp, Enterobacter cloacae
atggcaatcccagcatatttatggataaaagacgacggcggagcggatattaagggtgcggttgatgtacagaatcgggaaggaagcatagaagttaatggtttttcccacaatctcagtctgcctaccgatggtcttacaggaaaaatcaccggcactcgcaaacattcatccataatcatacaaaaagactttgattcatcgtcaccgtggctttgttga

SEQ ID NO: 144992 - DNA, 495 bp, Enterobacter cloacae
atgcgtaagtttactgcactgtttgttgcttctaccctggctctgggcgctaccagcatggcgttcgccgcagatactgcgaccaccaccgctgccgcgcctgctgaaggcaaaatgatgatgcatcataaaggcccgggtatgcacaacgagatgatgatgtttaaggatctcaacctgacggatgcacagaaacagcagatccgcgatatccggaagagcgaacgcgacaagatgaaacgtccgccgctggaagagcgtcgtgccatgcatgacatcatcgccagcgacagcttcgacaaggcgaaagccgaagcgcagatcgacaaaatggccgagcagcacaaagcccgcatgctggctcacctggaaacccagaacaagatctacaacattctgaccccggaacagaaaaaacaatttaatgcgaattttgagaagcgtctgacagaacgtccggcgatggaaggtaaaatgccagcaccaaccgaataa

SEQ ID NO: 144993 - DNA, 129 bp, Enterobacter cloacae
atgacggtgcagcaatctaaggaaggtgcgaataagcggggaaattcttctcggctgactcagtcatttcatttcttcatgtttgagccgattttttctcccgtaaatgccttgaatcagcctatttag

SEQ ID NO: 144994 - DNA, 720 bp, Enterobacter cloacae
gtgaattcactctataccgctgaaggtgtaatggataaacactcgctgtggcagcgttatgtcccgctggtgcgtcacgaagcattgcgcctccaggtgcgcttgccggcgagcgtggaactcgacgatctgctacaggcgggcggtatcgggttattgaatgcagttgaccgatacgacgctctgcaaggaacggcatttacgacttacgcagttcagcgtattcgtggtgcgatgctggacgagctgcgcagccgtgactgggtgccacgcagtgttcgccgcaacgcacgcgaagtggcgcatgcgatggggcagctggaacaggaactgggacgcaacgcaacggaaaccgaagtggcggatcgtcttggcattgctgttgaagagtatcgtcagatgttgctcgataccaataatagccaactcttctcttatgacgagtggcgagaagagcatggcaatagcatcgagctggtgacggatgagcaccagcaagaaaacccgttacaccatttaatggaagggaatttacgccagcgcgtcatggaagctattgaagctctgcctgaacgcgaacagctggtattgaccctttattaccaggaagagcttaacctcaaagagattggcgctgttctggaggtgggagagtcgcgggtgagccagctgcacagccaggccattaaacgcttacgaaccaagctggataagttatag

SEQ ID NO: 144995 - DNA, 204 bp, Enterobacter cloacae
atgtctaccatctgtcttgcggctcagcgcagctacgtttccggggaggcggtctggttttcgtaccgcattccccgcctgagaaaaatcgcttctaacgcctttttaggaatagtaagcctctgcgtcatgctgatggcggggctgtacgcccacgtatactggcaactgcgccaccctgcgccggagccggtaaaaaagtga

SEQ ID NO: 144996 - DNA, 1482 bp, Enterobacter cloacae
atggcgaattggccctggcgagtcagcgtgcgcctggtggcgcttgcaaagaaaacagggatggtcgtggggatcgtcctggtcgtcctgctggcggtgcgggtctatctctcgcagcaggggccggaactgcacccgtggcacacctggcgggcagatgagatgtccgtgcgcgagctggataacgccgatttcgccgggtgcctcgcccgtgaaaaggcgattttcaccgatctggataacgcggtgacggcgaaaacagcgggcgaggatcaaactccgttaaaccgctactaccgccagagcctggtgtggcccggccagtttgcccccgatgccaaccgctcctttgtgctgatgccagccgggaagccgcgcggcgcggtggtgcttctgcacggcctgaccgactcgccttacagcgtcaggcaccttgccgtgaactatcagcagcacggctttgtggccgtggtcccgcgtcttcccggacacggcaccgcgcccagcgcgctgacggacgtggattgggaaatgtggctggcagcgacgcggcttgccgtgcgggaagccacgcgcctgacggggaataacgtgccgctgcatctggtgggctactccaacggcggggcgctggcgatgaagtatgccctcgatgcgctggaaaaccctgcgctgcgtaagcctcagcagatgatcctgctctcaccgatgatcggcgtgacgtcctttgcgcggttcgccggattcgccgggctaccggcgctgttgccgccgtttgccaaagcggcctggctgaatatctccccggaatataatccgtataaatacaactcgttcccggtgaacgccgcccgccagtcgtggctgctgacaaaggccctgcaggagcagattggccgtgaggcgcgggaaaacaggctggcgaatttgccgccggtgctggcgttccagtcggtgatggactctacggtcagtacccgcgcggtggtcagcggcctgtttgaccagctgccggcaaacggcagcgagctggtggtgtttgatatcaaccaggcggcgagcttccgtccgctctttaaaccgtcgtcctggacggccaccacggcgctgctgccggtcgcgcagcggcgttacggtgtcacgattatcaccaatgccggcgagcacagtttctcgacggtggcgaaaatcacgccggcaggcagcacgcaggagacggtcgtgccgcttgcccagtcctggccgcaggatgtttattccctgtcgcacgttgcggtgccgttcccgccggatgacgatctctatggtcgtgaaccacgcgtgaaaaaccgatatggcatcagcctggggacgattgcgctgtggggagagacgtccgtgttgagcgtcgggaaagaggcgcttatgcgggtcacctcgaacccgttctacgactatatgcaggagaggattaacagccggatcggggaccagaaaaagtaa

SEQ ID NO: 144997 - DNA, 456 bp, Enterobacter cloacae
atgactacagcagaattagggcagttaatggtattgcagaaactaacgagccttggtgccagtaatgccatcgtccagaaagagggcaacaggtcatccatcacatttgatgccccaaacggtaaaacgtataaagttaccgccagagcgaaaacgtcagggacctggcaaacctcaacaaactatgctgcccagtgtacccttgataaaaatgacaatgagttttgggtatttatcgatcttggtcgagaaccgaatactttctatgtcacgccgctatcctggatcaggaatgatatttatacggcatatatgggttatctggagaaacacggtggacaccgtgcgcaaaatgatgagtcgactcatcatgctatttcagtaaaacgtattgctggctgggaagatgcgtggagagaaatgggcttgagtgagtctgtaaatgattcagcataa

SEQ ID NO: 144998 - DNA, 960 bp, Enterobacter cloacae
atgtctgttagcgataaagtattgaaactcgccttccagggcgaatggaatacgcttttacctattcttcgtgattatcctgatctggtaaatcaccccagtgaacctaaaggttataccccgctgcatcaggctgcatggcatggggcgaatttgtcggttattggagaactgttatctcttggcgctgaccgaagtgcgacaacaaatgctaagcggcagactgcttatgacatcgtggttgaaaagcacaaacggcctgatctgcaatatcttctatttccgcaaaaattgaccatcgcacaaattttcagaaaagtggtttccactgagcggcaattgttcacggattatgatggcaaccaaattttggtcgataaaatgattgcggcttcaggtgttgagcaatgccctgatgaccttaacgaactggataccagactaagtcacctcttttttgcgttgacggggaaagcaatatccactgtcgattctgttcgtttttccgtttctagtagttttacgtttgagattgaaccggattttttcaggctaatatttttcccgctgatacataaagttgcggcaaaaaagattagctatctggaaagtgattgggccgttgtatccgacttatttgatcctgctccgacgcaatggggatcgagaggtgacttgttcttgtggctggagatgcgacaggctttatgtcaggtcagtatccctgaagataaagatgaattagcgaatattatttcggcagcatttcagtcactgacggggaagtcgttaatcaatcgggtgggcggcaacgacttttacgttgagcgattcagtcgtggtggcggatcttcgggttatgttgcttccctgttttggcttaatgagttcatcccacaattgcaacagcggttaacttggctgcaaactgtttggtcgatttctccacgttccttatga

SEQ ID NO: 144999 - DNA, 1764 bp, Enterobacter cloacae
atgaccgttgaaaaactgatcacccaacatatcgatacctggacttccgccctgcaaacccgctcaaccgccgggcgcggcagcaatggcaaaatcgatctctacggtatcaagaaactgcgcgagctgattctggagctggcagtgcgcggcaaactggtgccgcagaacccgaatgatgaaccggcgtctgaattgttaaagcgaattgccgctgagaaagaagaactggtaaaacaggggaagattaaaaagcagaagcctttgccggaaattagtgaggaagagatgccttttgaattgccgagcgggtgggatgtaattcgcttaggcgatttaactacaaaaattggttcaggaagtactcctagaggcggacaaaactcttatgtttcttctgggattccatttttacgttctcagaatatttggaatgatgagttaaagttagatgatgtagtatttatttcttcagaggtccattctcaaatggaagggactcaggtgaaaggaaacgatatattattgaatatcactggagcatctctaggtcgctgtacaattttcccagagagaataggtgaggcaaatattaatcagcatgtgacaattatcaggctgattgaacagggaatggtaagttttcttcatttggcaattatatccccagtaatacaaaaaatcatttgggggcgccaagttggtatggcaattgaaggtcttagcaagaaaactcttgaattattcgaaataccagttccacctttaccagaacaattacgtattgtttacaaaataaatgagttaatgtccctctgtgacaaactggaacagcaatccctgaccagtctggatgcgcattctcagcttgttgaaacgctgctggcaacgcttaccgacagtcaaaacgcagaagaattagccgaaaactgggcgcgcattagccagcatttcaacacgctatttaccaccgaagcgagtattgacgcgcttaagcaaaccattctgcaactggcggtaatgggtaaactggtgccgcaagatcctaacgacgaaccggcttccgaactgctaaatcgtattgagcaggaaaaatcgcaactggtgaaagacggtaaaattaaaaaacaaaaacctttgccgccagtgagtgatgaggagaagccttttgaattgccggagggatgggagtggtgtaagttacaaaacatcacgtcaaaaataactgatggtgatcataaaaccccaccgagaattactaacggttataaattactgtcggctaaaaatgttcgagatgggtatattgattatgataactgcgactatatttctgaagaggattatcttaaatcaagagagcggtgccttcctgagatcggtgatcttttaattgtatctgttggcggaacaattggtcgtagttctttaataaaagagagtgctaactttgcattagttagaagtgtagcaattataaaaccattgttgtttaattctaactatcttaagttttcaatggactcatttttattgcagaaaatcatcaatgaaactaaacgggggggagcacaaccttgtttgtatctttctgaaatatcgaattttcttttccctatgcctccagagaaagaacagaagcgaatagtttcaaaaatagaacacctttcgtcaatttgcgatcgccttaaatcccgcctgcaatccgtccagcaaacccagctcaacctggcggatgccctcaccgacgcagcattaaactaa

SEQ ID NO: 145000 - DNA, 168 bp, Enterobacter cloacae
atggctctgagtgatgtgaaggttcgttcggctaagcccgaagcaaaagcctataaactggctgacggtgaaggcatggttttgctggttcaccctaacggttctaaatactggcgacttcgttatcgctttgacctgcccccagagttagatacaaccttcagttag

SEQ ID NO: 145001 - DNA, 1116 bp, Enterobacter cloacae
atgctggcgctgggtaaataccccgaagtgtcattagctgatgccagaaatcgtcgggatgaagcccgtaagttgttagctaagggcgtcgatcctagtgagaacaagaaagctgttaaggtggagcaggaacaagaggcgataacgtttgaagttgttgcaagagactggcacgccagcaatcagaagtggtctgcatcacatagcgctcgtgtattgaaaagtctcgaagataatctctttgctaccatcggtaagcagaacattgcggagcttaagactcgggatcttcttgtacccatcaaagcggtggagtcatccgggcgactcgaagtcgctgctcgtttgcaacagcgaactaccgcgattatgcgctttgctgtgcagagcggtttaatcgactacaaccctgcacaagaaattgccggggcggttgctacggtgaaaagacagcatcgtgcggctttggggcttaaccgtatacctgaattacttcatcgcattgatcactattccggaagaccattaacccgacttgctatcgaacttaccttgttagtctttatccgttcaagcgaactgcgttttgctcgctggtctgaagtagattttgaaacggctatgtggacgattccgggcgagcgtgaacccttagaaggtgttaagcattctcagcgtggttcgaagatgcgtacgcctcatcttgttcccttgtcgcgtcaagctctcgccattttggaaaagatcaaaagcctgagtggaaaccgtgagctgatcttcgttggtgatcacgatccgcgtaagccgatgagtgaaaacacagttaataaatcactacgagtcatgggctacgatacgaaggttgaagtatgtggtcatggtttcagaacaatggcttgtagttcattaattgagtcgggattgtggtcaagagatgcggtagagcggcagatgagtcaccaggaacgtaactctgtgcgtgcggcttacattcataaggcggagcatttgggggagaggaggttgatgttgcaatggtgggctgattatcttgatgctaatcgggagaaggcggtgagtccgtttgattttgggaaactagagtctacacggtag

SEQ ID NO: 145002 - DNA, 576 bp, Enterobacter cloacae
gtggacagagctttcaatgagttagaggcatttgcccattcacatgatctgaaagtatcaaagtacttcaaagagaatgaatcaggtgcaagcctgcaacgtcctcagttattcctgcttttggaaatagcagaacgtggcgacattttgctctgtgagcaaattgatcgaatcagccgccttactggtgaggattggaaaacccttcgagggcttattgagtctaaagggatcagagtcgtgtcgttggatttacctacaagccaccagcttttaaatgttcaggacgaattcaccgcccgtatgtttgatgcaatgaattcaatgatgctggatatgttggctgcgatcagccgcaaagactatgaagaccgccgtagacggcaaatgcagggtattgaaaaggccaaaaatgagaaaaagtatcgaggccgcccggtagatgtgagtctacacagtaaagtacaagagttactgtctgacggaaaaagctggaacaaaattcaggcgttaatcggttgttccagagcgactatcgcgagagtggctaaaaattcttctgcgacagaaggatga

SEQ ID NO: 145003 - DNA, 381 bp, Enterobacter cloacae
atgagtgaacttaaagttatatcacacgcaatgtttaacatatccgtagaacaggcagaagcaagcagggtagaccttgaacacggtgagggcgattttcagaagtattgcggccaattgttagatgagttactggaaaatactcgcagcaaatcctttaaattcagggcaatagaagaatttgtccctgctcatcttaacgtgcttgttaatgatcaaaacgagtgggacaagagaacacttggaattgctgaaaaacttttgtccgtggaaatagatgctcaagataaaattaaggctatgaagaaaaaaattaaaaaaggagccttattaattttattactttctcgtgacaataatttaaaaaggacttcctcttaa

SEQ ID NO: 145004 - DNA, 381 bp, Enterobacter cloacae
atgcgtaatgacattattgcttactttagaaataatgaacaatttgcatacgatgaattagtagagaaagtactttcacataagccagaaagcccagctattgatgagcgtttcgaccaaataatcgagaaattcaaagcattgccagatcataaaaactggaaatttgataggcaatttcaattagaaccaaatgtaattcgtgctagaataaagaaaacaatagctttgtcggacaacattgaattaagaatcaacggggaagttgctgatttccgtaaaaaaattgttcccgaatcagatgcgttaggtaaatatctgaaaatctactcagatactggttacgaagaatttagtgcaggaaaagaagataacgtatga

SEQ ID NO: 145005 - DNA, 1197 bp, Enterobacter cloacae
gtgcgcaatatcaccgatatcgacgacaaaattatcaaacgcgccaatgaaaacggtgagaactttgtggcgctggtcgaccgcatgatcgccgaaatgcacaaagattttgacgcactgaatattatgcacccggacagcgagccgcgtgcgacgcaccatatccacgagatcatcgaaatcactgaacagctgatcgcgcgcggtcacgcctatgtggcggataacggcgacgtgatgttctctgtgccgacggacccacactacggccagctgtcgcgccaggatcttgaccagctgcaggcgggcgctcgcgtggacgtcgttgatgtgaagcgtaacccgatggacttcgtgctgtggaagatgtccaagccgggcgagccgagctggacatcgcagtggggcgaaggacgtccgggctggcacattgagtgttccgcaatgaactgcaaacagctgggcaaccatttcgatattcacggcggcggttcggacctgatgttcccgcatcacgaaaacgaaatcgcccagtctacttgtgcccatgacggcgagtatgtgaactactggatgcactccggcatggtgatggtggatcgcgagaagatgtccaaatcactgggcaacttctttactgtgcgcgacgtgttgaaatattacgatgccgaaaccattcgctatttcctgatgtccggtcactatcgcagccagttgaactacagcgaagataacctcaagcaggcacgctcggcgctggagcgtctgtataccgcgttgcgcagcaccgacaaatctgtcgcggcggccggtggcgaggcgttcgaagcgcgctttgtcgaggtgatgaacgatgacttcaacaccccggaagcctattccgtgctgtttgatatggcgcgtgaagtgaatcgcctgaaagcagaagatatggcggcggcgaatgcgctggcttcccatctgcgtaagctttctggcgtgctgggtctgctggagcaggagccggatgtcttcctgcaaagcagcataaaggcggatgacggcgaagtggctgagattgaagacttgattcagcagcgtctggatgcgcgtaaagcgaaggactgggcggcggcagatgcggcgcgcgaccgtctcaatgagatgggtatcgtgctggaagatggcccgcaggggacgacctggcgtcgtaagtag

SEQ ID NO: 145006 - DNA, 2109 bp, Enterobacter cloacae
atgcagccaatgacggcgctttccccggcagccaccctgccgccgctgcgcgatgaattacacatccacccggcgggcaataatcgggacggttcccctgcctggcatctggcagatccggtgcgtaacctctttttccgccttggctggctggaatttgagatggttcgccgctgggcgctgggtagcgcgcctcagattgccgaggccatcagccgggaaaccacgctgacggtggaagaggaggacgtcaccctcttcctgcgttttttgcaacagcagcagttgttacgccacagtagctttaaatctcgccccccgctgtggaaacgcattctgcatggctatctgtttattcgcctgccgctgattcgcccggaaaaagccctgcgccgctttttaccctgggtctgctggctgttcagcgtaccttttttgctggtaacgctgcttgcggcacttagcgggctggtgctggcggctcgccagtgggatagcgtacaggcagcgctgcacggggcgcttagctggaacggcgcgctggcgtttgccgtggcgctgattttctcgaaatgctggcatgagctggggcacgcgtttgtggcaacccggcatggcgtgcgcgtcggccatatgggtgtcgccctgctggtgctctggccgatggcctataccgataccggagagagctggaagctgtcccgctcgcagcaccggctggcgattgccagcgccgggatcgtggccgaactgatgctggcaggctgggcgacgctgttctggagctttgcgccggaaggaaacgtcaaaaacgcgctgttttttctcgccaccaccgcctgggtaatgacggtcgccgttaacgccagcccgtttatgcgctttgacggctattacattctgagcgactggctggattatccggcgctgcatgagcgcgcgggcaactgggcaaaacgctggatgcgcgggcatctgctggggctggacgatcccctgccggataacgtttcgcccgccttttcccgctttctgaccctgtttgctttcgccacctggatctatcgcctgacgctgtttatcggcatcgcgctggtggtctatcacgcgtttttcaaagcgctcggcctggtgctgttttttattgaaatcatcacgtttgtggtgcaccccctgtttcgtgaactgaggatctggcatatgcgtcgccaggaagtaaaacccgcgcggcttctgcgcctgtgcatcatgttgctggccctcgggctgaccgtgtttttgccctggtccaggcaggtgtcgctgcacggggtgatggaggcgggcgtcgcacaacctgtctataccccgtacgccgcccagcttgagaaggtgcgggtaaaagatggagatacggtcaccgtcgggcagacgctctttgagctggtggccccacttcccggcgatgaaaaagcaaaggcgcaggcgctgaatcaggcctggcaggccagtgcccgtggcgcgatggcgctgaataaagacggagcagcaaaacaggtgctcgccgagcagatggcgcgccagtatgccactcagcaacaggccagcgtcgttgaactgcaacgcctgcaactgctggcaacgcaaaaaggggtggtgcatgacgtggttcagacgctgcacgcgggcagttgggtgtcgccgggtacccgcatcgccagcgtggtagatccgtatcactggcgggtgaaagcgctggtgagcgagaccgatttgtcgcgtctgcgccctcaggcgaaggcgaaggtgtatgtcgaggggcaatggcagacagtgcagggcacaattgtcgctatcgaccacgatgcggtaaaacgcctgccaaacctgatgctggcccagcctcacggcggccccgttgcgcttaaccctacgcttgcagcgaaggaactgcgcccggcggcagtctggtatcgggtggtgattgagggaacgtcgacccggccactcacccaggagcagcgcgtgcaggtggacgtcagcagcgagccgcagagcttcgcccacggctggataaatagcgcgatgttgatgctgattcagcaaacggggttcggtaaggagggataa

SEQ ID NO: 145007 - DNA, 1350 bp, Enterobacter cloacae
gtgagtgcttcggtcttctatgccctgatgggccgcgtcaaagccgcacacagcccggaagagctgggctttattatctgtaacgaaacgcgggcgctggtggactaccgtcaggccgcgctgctgaaatataccgccaccgggcgcgcccaactggttgcgcactccgggctgagcgataccgaccgcaataccccgtatgccctgtggcttgccgccgtggcgaaagcgatcgcgccgcagtgtgccgcattgccggaaggggcgcgggtcatgtcgctcagcgcaggccagctcagcccatcgctggcgcaggagtgggatgagtggctaccggcccacgtctgggttctggcgctggccgggccgaatgggcaacttcacgccctgcttatcctggcgcgcgacaccccatggccggtgcaactgagcgtcgaaagcccggaatataccctgctccagcttgccagcctgtacggttatgcgtggtggacgctggcggcgcggccttcgcgcctgcagcgcctgctgccaacctccgtgcgaaagcgtattgccctcgtgctggtactgcttgtcgccattttgctgatcccgattcgcgaatacaccctggtgcctgccgaggtgatttcacttaacagcgaggttattgccgcccccagcgacggcgtgatccgccggatgacggttgctccgaacaccgccgtcaccgcaggccaggtgctggcagaactggatgacacgaccttaaaaaatcgcctggcgattgcccaggcagaacttgccaccgccgcgctcaacatgcaccagtcgtcccagcaggcgattgaagatcagaatgccagggccgagctggcgctggctgagggcaaatggcgcgagcagaaagtgcaggtagcctccctgcaacgagagctggaaaaactgtcgattcgcgcccaaagcagcggcgtgtttgtctatagcgatccggatgactgggccggacgcccggtgcaaacgggcgagcgtattggcctgctggctgaccccacccggctgggcatccgcgcctgggcaccggtggcggaatccaccaacctgaatgcgcacgcccccatgaccgtctttttgaaggtcgacccgctgcacccactgaatgcacagctggattacgccggctatgaagccgtagaggcacccaacggtgtcgccagctatctactgcgcggttccctgagcgaaccctcggcgctggcgcgtattggcctgcaggggaccgcccgcgtaaccggggagtggagcgtgctgggttatcttatcttccgtcgtccactggcgaccgcccgcgcctggtgtgggttctga

SEQ ID NO: 145008 - DNA, 1089 bp, Enterobacter cloacae
atgaaaagacgtcattacgactggcgcatgggcgccatcatcgcgctggcattcagcgccagcgcgctggcagaggatacggctccggcggtctctgccaccagcacggaacaggcagcgccagcggtggcggagccgacagccgcgcctgcctcaacagcagaaccggaacctgctaccgtcgcacaggaacccgtggcaacgccggaatctgcacctgcggctgtcgctcaggaacccgcagttgccacggaatcggccgcgccctcagaatccgtcacaacagagacggtaaccacgcagataaccccaccaccggtcgccgttgagaaaagcgcccctgtcgccgccagcgagcccgtgccggagaccgctgccgtggaacaaggcccggcgcaggtgcgttttctggtgatggccgataaagagagcccgctgtcgagcgtggtggcaggccgcgtgatgcaggtaaacgtacagctgggcgataacgtcgcagccggaaaactgctggcgaccctcgattgcagcgaactgaaagcgcgtaaagacgcggcggaggcggaattcagcgccgcccagatcaaatacgaggccaaagccaagctgcaggggctggactcagcaggggcgctggaggttggtctggccgccgcagacgtcaaccggacccgcagccagattaagattttcgacgcccagttggcacagtgccgctttaccgcgcccttcgaaggccgaattgcccgcatctatgtcaaagagggccaggggattggcgcaggcgcgccggtcatcgatctggtgggcaatggcaaccgcaaagcccgactgaacgtgccttcaagctggatgaactggctgacgaccggcgcccgcttcgatgccgtggtgggtgaaaatggccagcactatcagatgaccgtctcgcacattagcggacgcgtcgatgcggtgagccagaccattgagatcgaaacccagtttgtcgataacgtcaaagagatcctgccgggcatgagcgggcgcgcgacgccggtctgcccgcaagatatgccgacctgtgccagcggggcgaaccgttcgtga

SEQ ID NO: 145009 - DNA, 1920 bp, Enterobacter cloacae
atgatgataacgacaacaaccgtatcgctgaatgcaacccgcccggtgccggtgatggcgcggatttccgccctgatctgcctggtcctgctcagcggctgtggctccgtaaaaccggaacccttaacccaggatgaaatcgccgcacgcgttaacaacgatcgcctgaacatgtatcgcgatcagcagccgctttccggcccgctgaccctgtcagacgcgatggcgcgcgcgctgaaatacaacctcgactaccgcctgaaactgatggagaccgccctgtcgcgcggcctgctggatgtatcgcgccaggatatgttgcccaaactgatgaccgatgccggatatcgctggcgcgacaatgattccggcggcaccagtatcggtatcgaagaccgggtggtcagcctgcgcccatccacctctgaggagcgcgaccattacctcgccgacgcgacgctttcctgggacgtgctggatttcgggatgagctactatcgcgccaaacaacaggcggataacgtcaatatcgccgaagaacgccgccgcaaagtgctgcaaaacatcgtacaggaggtgcgcgatgcctggtggcgtgcgctgggggcacagcgtctgctggatgaagcccagccgctggcggaaaacatccagattgcgctgaataaaacccgtgaagccgaacgcgcaggcattttgcctcccgttgaagggctggaataccagcgcgcgctgctggacgcggtctcgctgttaaaccagaagcgccaggaaatgcagatggccaaaagcgagctggctgccctgctgaatctgccgccgaacaccgacttcaaattacaggacgtgacaaacccggcgctgtcgcaggtaccgacccagttggatagcctggagcaaatggcgctcgaacgccgcccggagctgcgtgaagaggattacaaaacccgcatcgacgtactggaaaccaaacggcaaattgcctcgctgttccccaacctgaacctgtttggtggcatcagctacgactctaaccaatatctctacaacagcagctggattcagggtggcatgggcgtgtcgatgaatctgttcaaactgctgggagcaccggccatcaaccgcaccaacgacgcccgtctgcagacggatgaagcacggcgtatggccctgagcatggcaatcctgacccaggtacgcgtttccgttgaacgctacaagctggcagtttacgacctgcaaatcgcgcaggaatccgcccgcgtcgaccagcgtctggccagtatctcccgcgcgagcgcgagcaattcgctgtccagcgaactggagtcgctgcgcacccaggcacgctccgtggtctcgcgcttccaggaggccgcttcttatgcccaggcgcagtccgcctatggccgcgtgttgaactcggtggggatcgacctgctgccagaaaccgtgaagaacaccgatctcgccagcctgtcgcagcaaattcaccagagcctggtcgccggagaaaaacatgtctttacccagagcgccgatgcggtggtcacccgccatccggtgaatgtgacccttggtcgcctgcctgctgccgtcaataaaaatgtgatttatcaatcggtcacccgcgtacttaacaccaaccaactggtgctgggcagtggtccgaacagctatcgcctggagatgaatctgaatgtgggtcacgcccaaaatacgttgcgcggtgtgtgggatatcaccgtggtaaacccgcagggagcgtcggtgctgaaacagcactacaccagctatttgcccaatgacgtgaacacccgttccgtgagtgcactggctgaggctgccgcgctgtccgtggtgtccgacctgaataagtacgcaggcggttccaccatggcgacggccaataatccctaa

SEQ ID NO: 145010 - DNA, 10512 bp, Enterobacter cloacae
atgacgcgtataaaaaatcggagtctacggccccgcgcccatcgttttgcgcttgaatctcgccaactttttgatggcgccgcgttagctgaaaccgccgcacataatgataccgccagcgatctggtccaccatgccagcatcgctgagcaaacgcgcattgccgatatcaccgttccggccgccgcacccgacctgaccgcgcccataaaaggcatctccgtcattgaacccagcaccctgaatgccgcaggcgcagatgccgcacagctcagcgactggcaaatcagcgcgacagacagcagcgtgaccgtcaccgccaccctgcgcgacagcaccatcggcaccttaagcgacgggcaaagtagcggtaccagtctcaccatgaccggcacggcagatgaagcgcaggcgtggctgaatagcctgacattcaaagcggcggatgtggagcttggcaataacgccgccaccagccagcttgatgtccacgtcagcagtgaatccggtgatgccagcggttcgatggatattacggtcaccccgtcgaacgacccggtcaccgtcgccgataaccaccagaccgtcgccgaaatcggcagcacggcgatcaccgacaccacgctgttcgctgtcgacccggaggtcagtgcggggacacagttcccggtgcaaatcgtgtacggcttaaccgaattgccgaagtacggctacctgacgctggacggcgaccgcctggggattggctccgtcttcacccaggaagatgtcattaacggcagcctggtttacgtccacacggcaaccggggccgatcagaacactgccgatggttttgtggcggtcgtcaacgacggcgctacgccgaaagatctttcgggcacggtgcacatcacgctggatattgcgccgctgaaccagttgccgtcggtaggcggtagcggtcttgtctatgaaggccagccggctaacgcggtcgataccggcaatgtcgggcagtatatcgtcgccagcaccggcggcgatccgcaggatacaatcctgaccattgccattacgtcactgccgacccacggcacgctgtactacaacggcgtggaagtgaccgtcggccagacctttgattatgccgatcgcagcctgctgacttataaaaatgacggcagcgaaaaccagggccaggacagctttggcgtgcgcgtcactgaccaggggggtggcactggcgtcccggggaatagtgatggcgtcatcaccctgcgcgtgcaggatgttgacgacgatccaaccttcactggcaatggcagaacgccgaatgccgacgtaccatcaacaggcactaccgctgtcacgctcaccgccgacatgctgtctgccagcgatgtggattcaggcaataaccatctgagctttatcaccgataactcggggctgactcatggttatctgacgctcaacggtaaaatcctcaataacggcggcacctttaccaaggcggatatcctcgcgggtaaggtgcaatacgtgcagtacgccggggccagtaccgcaggccaaaccgacagctttaacttcgttctcgtcgataacaccatggcgctgcgctggaacgatgacggcagccgctacaaccgtgccgggggcatttatgacccaggaacgcaaacgctaacccgtttcacgtttaccctgggtctcgtgcagttcgccaacggcagtggtattggcacgctgcccaccagtgatccgcaaattgcccacagtgactccatttgggcaggcgcggttttcaccacgggcgacagccgcgggcagctcaatgaaggcggtagcgtcacccttaacggcacaaacggtgatttctccgccgttgcgggcatgagctacaccgcgacggacgttgatccttcgcaggtggtctacaccttcctaggcttttcgaatggggcgacaggcggcgagattcagcgtaaagacagcagcggcaactgggttaccgtaggggcctacggcacctttactcaggcagatcttgatgccgggaatatccgttttcagcatgacggtggcgagacgttcttctttgccgcccagtttgcggtgtcagcagggctgacgaaaaccgatcaaaacggctatatcactcaggatatctggaccccaacgctcaatatttatgtcacgccagtcaacgatttgccggtggtgaccggttcctcgacgaccgtgatcgcggaaggggaaacggcttacatcaccaccgggcaactgagcatcagcgatccggatgatgccaacagcggcagcgatcttgaaagcagcgccaccctgcgtgatggcgtggataactacgcctataacaacggcgcgggcggtggcacgccgctgaaatttgaaatcgacagcctgccgacaggcggcacgctgcaatattatgacggcagcgcctggaaagatgtcacggtcggcatgacgctggatgcggcgctgcttaccgccagcaccaacaccaccggcctgcgtttcgtgaacgacggctcagaggtacgcaaaaccgactttaccgttaccgcgattgaccgctggggcgcacgctctgcaagcagcgggaaggtgacgattcagataaccaacgtcaacgatgcgccgcagattgccaaaaacccgacgctcgccgacccggttattcagcccaattcgccgaacatcattggcggggctccggaaaacaacccgctgtatgtcaaagaaggcagctatcaacaaatcaccagcgccctgctacaggcctatgactccgacagcagcacacgccaggtgcaatacaccatcacctctgcccctgcgcatggcaacctggcttactctaccgatggcgtacatttcagcattattggtgccgggggttcctttacccagcaggatgtgatcgacgggcatatctactacctgagtgatggcagcgaaggcagtggccgcagcgaaaccagtacgcccaacaccccggacgacaagttcaccttccgtctttccgacggtgacaaagagcagagcggcaacgaattctggatttacaccctgcccaccaacgatgcgccgattgtctcggccccgtctggcgtgcacaacatcaccagtgagaacccggccaataaccacatcacgggcttttcggtcagcgaccctgacctcacggcgataattacgggggaaaccgactatttgcaggttaccgttcgcctgctggatcgcagcggtaacgccctcaccgattacacgggcgtcaccctgggctatgactccagcagcggtgcggcaacggccatcacccacagcggccagaacgattatctggtgctgagcggtacgtatgcccaggtgaacgccgcccttgctggattaacggtcaccttcaccggagatcgcaacacactttatcaggtacaggtgattgccgatgaccgcctgcgcgatgccagcggcgcattagtgggaggggcaaacggcggtagcgaaaaccagtcgaatacgccgggcaaaagtcagccgggcacgatcagcagcactgaatataactggtacagcagtaccaccgttgccgaggcagacaagggcaacatcagcatggcctcggtctgggttcgcgcctcaaccattaacgatcccggcaccctgaccatcaccacaccggcccgcacggcgctggaagatcaggccacctttatcggcggcaacatcacccttagcgatgtggaatccaccagctttggtaccccggtcaccgtgaccatcaccgttgccgagggtacgctgggtatcggcggcagcggcacacaggaaagcgtcaccccgagtgcgacgggtagccagcaagtgaccatcagcggtgatgataccggtacgctggttttgaccgggcgggccagcgacattcaggccctgcttaacgacacgacgctggggctgacctggaccagcccgttgaacactaaccacgatctcaacggcgctgcaccaggcgatgtcaccgtgacgttgcacctggatgacggcggttcgcacattggtgataccgccgggggtgccaaccctgccgatgcaacgctggatgtcactatcgtgccggttaacgatgccccaacggttagcgccgattcgtccaccgcctatctcaacagcgatcggggcgtgacaaacggcaacgcggtcagcggttttgttatcagcgatcccgactataccgacggcggcgacattgccgacggcgaaagcgactttatgcaggtgacggtgcgtatcaccgacaccgacggtaccccgctcgccgccgcgttttacaataatggcagcgtctccagcatcattatcaactctggcaatactcagtccggcgtaatcctcgacacgaccttcgatggcaataaagacgccctggtgatccgcggtacgctggcccaggtgaatgcgtatctggccgatttgcaggtttcaatgaccggcagcggcgtggaaaacgccgacaaagcctggcatgttgaagtcattgctgatgaccgtatgcgcgatctcaccaccggggcgctgcttagcgcaggcaatgccaacggcggtaaaaacgatgccaacggcaacggcacgcaaaccgtgcccaccaccgtgattgacccgtatgcagcgctgcccgcaggcctgacgcaaaacgtcgccattgccgcgcgcaccattttccccagcagcattaacgatccggcgaccattaccgtcaccgatagtaacgtctcagaaggcgtggcgagggtgaaactcccggccatcgccgtggccgatccggatgccgatgtcgccacgttgcaggcgacaatcaccctgccctctggctttacctttagcgggctgaacagcggcgatgtggtcaccaccgatgcttccggtcaccagacgctggcgctctccggcaccctcagcgaactgaacgcgcggctggcaaacctgacggtgcagctcccgacgaccacaggcgtagcggccaccgactggaacggcagctttagcgtaacggtggtggtcaatgataacggcaaccacggtagccgcccgtcaacgctggacggagacagtaacgatccgggcagtaacccaggtgacatcagctatgccgatgccacctctgccgcgctgatcaccacccgcaccttcaccgtcaccgttgtgccggttaacgatgcgccagggttaaccaaaaccacaccgcagacccttgcccccatcagtgaagacagcgcagacgcgaccaccgttggagacacggtcgacaatttgtttggcagctacttccaggacacggcggacaacgttgataactcggctatcggagccagcggtggtacatcctcagattcattctggggtgtcgcgattaatagcctgacgactaacagcgcccagggaagctggcaatactccaccgacggtggcagcacctggaccgccatcggcacccgcaccgacgccagttctctgctgctggataaaaccgcccgcgtgcgctttgtcccggcggccaatttctttggcaccccggcggcgctgaccgtgcgcctggtggaaactaacagcaacaacgacacgacaagcaccacagcaacgccgaccagcgggctggtcacgtcgacggccaccaacggcggcacgtcgcgctacagcgccagaacggtcacgctttccaccagcatcaccggggtcaacgatcgcccggtgctcactggcagcatgccggtgaccatggtggaagatactccgcaggcggtgacgctcggttcactgttgagcggaaaatacaatgacgacaccgacaaccagagcgccatcagcggcggtggcaacgccagcggtgcggcgggctttgtggcgatcaccggcaacaacaccagtaccagcctgggccactgggaatactccaccgatggcagcacctggcagagcctgggcaccgactacagcgacagcaatgcgctggtgttaaaaaccacctcgcagctgcgttttgtgcccctggccgactacaacggcacggtaccgggcgggctgacccttcacgccgccgataccagtaccaccgccgatgcgggggtgacaacactgtatgcggtacaggatctgcaaagtgccattaaccagggcgataccagccactggagtaatgcgcaaaccgtcacgctcactatcactgccgtcgcggatgccaaaaacgatgctgcctcaacccactccggtaccccggtcaccgtggatgtgatggccaacgacacctttagcaacagcaataaaacgctgacatcagtcacccagggcgcgcgcgggtcagtcagtattgtcggtggcaaagtgctgtatacgccgaacaatagcagctatgtcggcagcgatacctttacctacaccgtgaccagcggcggcgtgaacgaaagcgccaccgtgaccatcaccatgaccaacagcgcaccggtcgttgccagcgaacatgtgtcggtcgccgaagacaatagcctaagcggttcaggcaccaccgggcttttgtataacgacagcgatcccgatggcgatacgctgaccgtcaccaccttcaaaattggcagccaaacctataacgcaggggatacggcgaccattgccgggaaaggaacgctggtggttaacgccaacggcagctatacctttaccccgcttcccgactggaatggcaccgtaccgcaggtcacctatacggtgagcgacggacgcaccaacggcgcggtaaccacgacgctcgatatcaccgtcaccccggtagccgacacccacgcagataccgccaccacccatgcgggggtggcggtcactatcgacgtattggctaacgatacgttcagcaacccggatcgctacctcagcgccaccaccagtggtctgcacggcaccacgacgattgtcagcggtaaagtcatctataccccaacaacgggctacgtcggcacggatacctttacctataccgtgagcagcagcggcgtgaccgaaaccggcacggtgaccgttaccatgaccaacaacgccccggtcactcagggcgaacaggtcacgacggcggaagacaccgtcttgtcgcgcccggccaccagcgggctattaatcaacgacagcgatccggatggcgaccccctctccgttgtcagttttagcgctgacggccatacctggagcgcgggcgtcaccggaacgattaccgggaaaggcacgctggttatcaacagcgatggcagctacaccttcaccccggtggcggactggaacggcagcgtgccacaggtcacctataccgtttcggacgggcgcagcaacggactgaccactgccacgctggatatcaccgtcaccccggtggtcgatatccacgatgacagcgccaccactcacgccggtgtgcctgtcaccatcgacgtgctgagtaacgacacctttagcaacagcaataaaacgctgaccgccaccaccgacggccagcacggtacggtcaccattcagagtggcaaagtcatctatacccagacggatgccagctacgtcggcagcgacacctttacctatacggttaccagcggcggcattgccgaaactgcgacggttagcgtgacgctagttaatgccgcaccggagctggcctctgcgcatgtcagcacgccggaagatacgccgcttgccgggcaaaacctgctggcaaacgcgcgcgatccggacggcgacccgctgaccctcaccggcttccaggtggcgggccaggattatcatccgggcgacacggccattctcgtgggccagggctcgctggtgatgaacagcgatggcagctacctgttcactccgatcgctgactggcatggtgatgtttcgccaatcacctggaccgtctctgacggacgcaataacggcgaaagtaccgccacgttgactatcaccgtcaccccggtcgccgatgccaatccggacagcgccaccacccacgcaggcgtgccggtagtcattgacgtgctcggtaacgatacgttcagtaacccggatcgtacacttagcgcgacgactaacgggcagtacggcaccgtgaccatcaacaatgggcaggttgtctacaccccaacgggcggctatgtcggtaacgacacctttagctataccgtgaccagcggcggcgtcagcgaaaccacctccgtgacggtcacgctaaccaacgcctcaccggtcacgcaaagtgaacaggtcaccacgccggaagacacgccgataagcgggccaaatctgctgaataatgaccacgacgcggagggcgatcctctgacaatcaccgggttcagcgtcggtggactgcactatcaagcaggggataccgccaccctcgcaggcagcggcacgcttaccatcaacagtgatggcagctaccatttcgtgccggttgccgactggcacggcgacgtaccgcaggtgatttattcgctaagcgacgggcgcagtaacgggaccgtcaccgcgacgctggatatccgcgtcaccccggtgatggacagccatgacgacagcgcctcgacccacgcgaatacgccagtgaccattgatgtgctggcaaacgacacctttagcaacccggatcgcgtcatcagcggcgcgaccaacgggcagcatggcacggtggtgattgaagacgggaaagcccgctataccccgaacaacggctatgtcgggaccgatacctttacctataccgtcaccagcggcggcgtcagcgaaaccgccgtggtgacgctggatattctcaacaccccgccggtcgccatgaccgataaggccagcacactgctcaataccccgctgagcggtaatgtgctcgccaacgacagcgatgccgaacacgatgtcctgcacgtcacgagcgtcaccgtggacggcgtgcactatgtgccgggcgacaccatcgacctgcaaggggcgggaacgttagtggtcaacagcgacggcagctatcgttttacccccgccacgggctggtccggctttgtgcccaccgtgagctacaccatcagcgacggtaacgttgacggcaccagcagcagtgaactgcacctgctggtgagccccatcggcgaagcctgggtgaaagaggctggcctggtcgacagcgccagcggtacgcaaaccaccagcggaacgctctccctgctctcacttgatgcgatggaaagcctgaccattggcggccacacgctaaccctggcgcagttgacggctcttagcgccacgcagccgttcgatatcgtcaccccggacggcgtgctgagcctgaccgggctgcggacgctcgacgcgggccatgcacagctggattatcgctacaccctctcccacgccattgcgcagccgggctttgtcagcacccaggaagatatctccctgagcgttaacggcgagcagacacaggcgccggggctgctgcgggtcaacatcgtcaacgatgttcccgtcgcgcaggatgacagcaacagcattgaccaggatcgcggcgagcaaattgtctccggcaatctgtacgccaacgaccgtatcggtgccgatggcaccatcgccagcgggccgctaaccgccgtctcgtcagtgaatcttgggcatgaaggggtcattaatggcacctttaaaggtgaatttggcgagctgacgctcgatgccaacggcaactatcgctacgtcgctgaccgcatgaacctgcgcgttgccaccctcgatccgctctccacgctgaccgaagtgttcgtgtacaccctcaccgacgccgacggcaacaccagccaggcgcgtctgtcgattgtgattcatggcaccacgccaccgctgtcaaaacagggcgacgagattttcccgcatgaccgtcggcaggaagagaccgccctcgaccaaccctatacgccggggctgtttattctgcccgccatttatggcatttacagcgaccgcttcacccgtgaggtcgaactgaaccgcaaggtgaccgaactgggccgtggggcgaacgataacgccacgccggtgctggaagacgcggtgctgtttacccgttgggttaacactacgttgctcagaagcccgacgccgtcaggtgataaccacgacgtcgcgacacagcaactggccagccgtttcaatccgttcaccccgaaagccacgggcaaaccgacccctgccgacgtgcctgcgatccaggaagaacgcgtggtgcacggcgaggcaaccaaaggcaaaccggtggtgaaacacgacacccacgagaatctcccaccgcaggccaacatatcgataccgggcgtcgttgtgataccggctggcgcgccccgtcccggtgcgccaggccttgccgagcagatcgacaagcttgcccgtaaccacacgcaggcgccggagccgatcaccgtcggaggtcccgcatcgactcgctaa

SEQ ID NO: 145011 - DNA, 264 bp, Enterobacter cloacae
atggcattcaaaatccctggagggaaagaggatgtggaggtggtcgacacaagtatgcaaaaaaatgatcaatttgcatttttcaaattccaacagttaacagttcagaaactaatgagttcgccaggtaatgggaatcttgctgtctggatcccttctagtggtgacaaaagagtgaaaggttcatctaatatgtatttttcattaaacggtttcaaacaagcttatgcaatagcgaataaattgtgtactgataacctctaa

SEQ ID NO: 145012 - DNA, 186 bp, Enterobacter cloacae
atgatgagtaattacgcgctaattaaaaatggcgtcgttgaaaatgttgttgtatgggatggcactggtgacatttttgatgattatattactgtgaatattgacgacatatcggctggtatcgactggacatatgacggagaggcatttgcccctccgccagaaattactccgcagggggtgtag

SEQ ID NO: 145013 - DNA, 237 bp, Enterobacter cloacae
atggggaggcttaaaggggatgccctaacacaatatggcctatggctggattatcttgatgcactggaggccgttgattatatcggtcctgttcacgccgggttcgttactgttgcgccatcgacaccgcacgatgtgtggcatggcgtggcgtgggtgactgacactgcggcacaacatgctgctgacgtcgctgccgcagaacagaaaaaaatccgctctgcgagcagcaactga

SEQ ID NO: 145014 - DNA, 321 bp, Enterobacter cloacae
atgggatttccatcgccagccatggattaccaggagcagcgcatgacgatagatgttatctgcggtgtagataacaactgccgggttattgaaacttcatgcggctgggccgttattaacgtcagtctgaagccagaaggaggggatacgctgctggttagcatggacgggagaaaccagttcgtgaagctaatgggccacgcgctgatcactgaagatggtgaagcgatagaaggcgacgcgttggatgacgtggaggtttttggcgtgctaacgcatagtcttatcagagtgggtaacgatgattgcccggcaatttaa

SEQ ID NO: 145015 - DNA, 1143 bp, Enterobacter cloacae
atgagactttgcatatattgtcgtgaacaaaaagatgataaggaattttctctcgagcatgttgtaccacagtttctagggggtgcatatgcgcctgacttcctaaagacacgtgacgtatgtaaaagctgcaacagcaatcttggtttatttgttgatgcgtctttcgagaaaaattggctggttactaactggctacaaaaagcgtcttccacattttatgataaggataatccaagtggtgtttctctcgtatgcatgggtaacactgaactttgtcctccggacatgccagagggtcacgtttgtgaaatgtggttgggaccacagggcgaacaagtttttttgatacgtccacatgacgagagattatcttcttacatgggcggaaatcccagaactatgaaaaaaattgaaacgcgggcttatttcttgttttctgaaaatacgtctcagaatccgataaaaacatggctgtcatttgagcaagcatttcaaggccgtaaagtcaaaaaaattctttgcggtgaggttggtggcgcagatccagccagcattggatttgtgcaagctgatgagttggataatgcacgcaaacaatttttcaccgccaacactaaaggagaacatgttcgaaacgttcagaccctgatgtacacaaagtttgatcagcgcttcatgtgtaagcttgcaataggcattgcttattgtctttttggacataaagtgcttgattcagaatatggcaaagagttacacaaaggactttggtatcgcgaaggaaatgaaatgcctaaggttcgtggtacaacactcttctcccaggatgcggctcagggcgtaaatgaaattatcagttttcctaatgcggtaactcttatgttactttcaacgaaggacggtgttgcagttactctaaatatcaactcggagttaaattggaccgttctgtgtgcatccaatgaaagtctaacatcagatgatctagaaaagataggagaagggcagatcctggtgctcgtgcgcgctcttcaaactggcatttacctagacttaccttcatacttcgcctttaagcttggggaaacctcacactcgggactgaagaatattttagtgcaagcagagagaagcaaaatataa

SEQ ID NO: 145016 - DNA, 444 bp, Enterobacter cloacae
atgaccatcgagaagattttcaccccgcaggacgaggcgttttatgccgtcatcacccacgcggcggggccgcagggcgcgctgccgctgaccccgcagatgctgatggaatcccccagcggcaacctgttcggcatgacgcagaacgccggaatgggctgggatgccaacaagctgaccggcaaagaggtgctgattatcggcacccagggcggcattcgcgccggggacggacgcccggttgcgctgggctaccacaccggccactgggaaatcggcatgcagatgcaggcggcggcgaaagagatcacccgcaacggcgggatcccgtttgcggccttcgtcagcgatccgtgcgacgggcgctctcagggcacgcacggcatgttcgactccctgccgtaccgtaccgtaacgacgcggcgatcgtgtttcgccgcctga

SEQ ID NO: 145017 - DNA, 684 bp, Enterobacter cloacae
atgacatatatgcagcgcggaaattatgtagtggtcgttaatccactttcatacagcgaagtcatgtccgcggatcattctctctcgtggggggtttacgacacagtaaccaatgctttcttttccgtcagtcagaaagccaacgtttcgttattaaattcgctgattcgggataaggaatcggtatttcaaaaagataaccgcttttatacgatcgtcacatcccctaaaagaccgattgcggccatcgtgtcgacatcgaataaacgcttttatgaaacgctttatcatcaggcgacattaacgctgccgctgggcatgatctgcagcattattattttgctggtctggtcccgtactcatcgtgagcttaattcgccggggcgtttactgcaccgggcgctgaacaaacgccagctttgcgtgcactatcaaccgattattgatatcaagaacaaccggtgtgtcggcgcggaggcgttgttacgctggccgggttttaacgggcaggtgatgagcccggctgagtttattccgctggctgaaaatgaggggatgagcgagcggattacggattacgtcgttgagaagtgttcagcgatttgggccatttcctggccgagcatccgcatctctatatttcgattaacctgtcggccacggatttccactcctcgcggctga

SEQ ID NO: 145018 - DNA, 936 bp, Enterobacter cloacae
atggctgcacttggacaccatctagtcacccatattcctgccagcctttccccagatgacactaagctttgggaagatatccacccacttattgaaaaggatggcctagaagcggctttgctgaaatatgcgccatctgcatcccttgaagcggccattgtgcagagcactggggaattcattgccaacgctgaagccaatattatctcagaggtctttaataaatctaggacgcttcggctaactaagttgattccgcatttgttaaagccagatgcgggtataccaattgtgacgacaaactatgatcgtcttgccgagctcgcttgtgaggaagctggtttaggtgtcgacaccatgttttgtggccattttgccgcgcggcttgagccgcaggatagctattggagtttttgccgtagtgtcaaattggtgggtaagaacgtgcgctacaagttcgcaatgaaggcgaatgtcttcaagccacatggcagccttgattggtaccatcgtgagggcaatccggttcgctacgctggggcattaccgctccctcgccttatcattacaccgggattaaataaattccggagcggatatgagagtcctttcgacaaacaccgagaaaaggcaaatgatgctatagacaaggcgcgtcgcttcctcattatcggctatggttttaatgatgaccatttggaaacccatctcacgccccgcattaaatcaggtgtgaaaacggtaattttaactttcgcgctctcccctaaagcacgagatatagctttagagaacaagaacgtgatagctgctgagtttcgcgaagaggctggaacctcaggcgcatgcttcattgtcgatggagcagagatattctaccccggtgttgactactgggacctcgatggatttgtgaagggagttttatcagcatga

SEQ ID NO: 145019 - DNA, 3630 bp, Enterobacter cloacae
atgccaagcgacgccgtactcaaaatagcagaacagatcagggctaatttagccagctcaacactatcgccgcagcaagcaaaactttacagccagcgtgtccgtcgcgacatgggggctgatggcctaaaatcgttcactgcatcagaactcgccttacggatcgatgaagcatgcttattactcgatacggcctggcttgaacgaactgtcgatgatggtcgagcttggacggctgcggttaagcgcgccgctgaaattctcgaatgggtttctcacgcaactttaaagcctgcaggtgctccgttccaccttctttctgcggccgcttatcaggtggcgggctatccagcgatggctttaggtcatcttcgtatgatgccagaggtcgagaaatcttccaaaattctgtgcgaatttttgcgcggtgatttcgatgcagcattaactgccgttcagtcgttctggaaagaacagcaaaaacttggagaagactcgactctgcgagacgttggagctgatgacgggaagcaagacgatgacgatcggcttatagattttgaggacttgaccgtccgccacgtcattatgtgcataggtactatttgttcttatctccgcactggcgagacagcactggtcgaccgtgcattagtcaagctcgatggattggcacagaattatttgcatagccgagatccctattcttacctgctagcgaggctctgtgcaggagccgctcaccgcttcatagattcaagcctatggcctcacgtcgaaagacttgctgatgaggtaaacacgcgcactcgcgtcgcgttgactcaatttgcacgggcagcgttcgtcaataggcgcgctttagtatggccagcgcaacgggccggtatcgatcggctagctgctaacaacagcttcgtactttgcacgcctactgggtcgggaaagacaactatcgccactcttgccgcagttcaaggccttttcttgacgccgtctaatctgcttgttgcagaaaatattgtgctttaccttgtaccttcgcgtgcgctagctgccgaagtcgaaactcggtttaccgaagacctgcgagatatagcagcggagcctgtggttgtcaccgggctttatggcggggctgattggggacctactgacgcttgggtacaagtcaatcagccaactgtcgtcatctgcacctttgaaaaggcagatgccttgttgcgctaccttggcacgttattcctagatcgcgtgcgtcttgtagtgattgatgaagcgcatatggttgagcaagatcctaatcgcccggactctatcacagataacacatctcgcgctcttaggcttgagcagcttagtacccgtctgctgcgtgctcaggacaacaagggcttccgcatcatcgcgctctcggcggttgcagctaaggccgcaccggcaattgcatcttggctgtcgagtgacgtaggcggcggtcctgtcagttcaacttatcgcagtactcggcagatgctaggtcgccttgaggtcgcgcggagcggccggtttaacatccgttatgacctgatggatggccgtactcttgagttcgaggatgaacgtaccaatgatggcccctatgttcccagtccttttccagcggttcctggtggagttgatagcgatctaggggtcgagaagtccctaagagggccgacgctctgggctgccctccatcttgctgccgagcgaccagatggcactcgaccgactgtaatgatctctttgacgcagaacgttagttcctttgctgagaactgcgccgatctgctcgaaggttggatcaaggcagaagaatctctacccaattactggtccgcggccgacgacgacccgcattggcaacgctgcctggccgcagcggaggactattttacgacaaagtcctttgagtatcgcctgctggtccgtggggtcgcagtacaccacggtcggatgccgggacttttggctcggcgactaaaggtagcgatcgatcgtggtaatgtccgtgtggtaatagcgacctccaccctttctgaaggggtgaatattcccataaatactctgcttatcccgagtgtgcatcgttctggtaacgtcttcacgaccaatgaattctcgaatctcattggtcgtgccggccgcccgggcgtcgcaaccgaaggcaatgctctcatcgtattgccagagcgtgaatatcgcaaacgtagccgcgaatatgtctggaaccgcacttgggagggttatgaaaatctcatcaatgagctgaaggaagcgaccgaaattgcctcttccgggaaactgtctgttgaagagggcaccgcaaatagcgcgcttgccatgttgctggagcatctgcgcaatgcgtggagaactttgagcggcagcgacgatgacgatgaatttgccgcatggcttgagagaactgcggttggcaatgaagaaggcgataaagatgacagtaagaaactgttggatacgctcgacggattgctaataacggtgcttcaagaaatcgaacatacttacaacgcggatctaagcaccgccgaactcgaaaccgaattgttagcactgtggcggcggacctatgcctgcgtcgcagcgcacgaggaagagcgtttggcacggacttggcttcagcgagggttagctatatctaccctatatcctgacgcgaatcgccgccgccagctctataagacaagtttaccgccgcgctcgggttcgatccttctcgaccgcgtcgacgacatacacgcaatcttagtaggcggtatcaattatgctgattggtcgcttgagcaacagttccaatttatccgtgatgtcattgctctgctgagtgaagtgccagcattccgtatatcgaccaagtttggacggatgcgtaagccatttaaagattgggaaaaattgctcaggtggtggcttttcaaaacctctctaaaaaaccagcccaagccaaaggagcttggaaattggttcgcctttgtctcagaaaacttcatctatcgtggcaattggggattaggcagtctaattggtgtattgatggataaaggcgatgctgctggtccggttaacgcgctcacaatggacgactggccacggagcgggctgccgtggataggtttttggctaaaggaacttgtgagttggggtacgcttgatccggtcgccgcatttttgttggcgcgcggcaatgctcgcgatcgtgttcaagcagaaacagacgcgcaggtttattatgcacagctagcagttgacaccgcagcaaatgataagttagaccctcgtcgtattaggaattgggtcgaaacacgtcaggcaccagttccgatgcgaagagaactgcgtgagattaagtttgatgtgttactgaaacggcctgcagaggactacctttcgcaccaactgagtgtaatgccgttagtaatagctgagcagctcagttggatcgatccagctggatatgtagttgcaaattgtaaacgtccagatgattgggacgaacaattatctcactttcgcttcgagctatccgtaaacaagcggcaagttaccggtgaaccctatctcccgcatcgacgtgatttaccttga

SEQ ID NO: 145020 - DNA, 915 bp, Enterobacter cloacae
atgattcgctcccgacgggtgacattgcagccacttaatgcttggcttgtagcccagcccttgaccagcgttaacagcaaatatgaactacgcgtgtggcgagaggttaatgctaattttggagcgctgcgcgacgaactggttgcttatgctcaagaagctcttgacgatgcccggagacgcatacgtaagggcttcgaagatcccctatcccctttttcagatcgggttgacgacccggcagtgcattatccagcgatgctcaatcgcatcaccttgcaaggctatctcggcgaaactttggctggtcttgcggttgaacattttggtgccttgggagagaaagactggcatgtacctgcctttctctttcgtttccacgaccaagaattccagcatctcgatcttattaacgagcgctttattatgggcgaatcacacgatcctgatgccgaggctgaaaaacgtccggggcgtactggagacgatgccttggcttttcaactcgacggtgaaggcaagatcacccacgttctcgcgcttgaggcaaagtgtttggctgtcagcaattccgcaattattgccgatgctcacggcaagcttgctgctggaaccctgcgtcccagcggtattcgcgaattgattaatttgctgtcggattatgaaaatactgaggcccaggcatgggtagcgcgcttacttgaactttatcgggacggcttcaaaagtgttaaacgtagtgatggacttgcctatactgttggaaattccccggttaaaccaaagacgaggctaagctggctgcaggctaatgcgccacatgcgtcttatactgtcgaccgccaacttgatgccatggagttccagatcacggaacttaaagtgcttgtcgacacactctatcggggggcttga

SEQ ID NO: 145021 - DNA, 435 bp, Enterobacter cloacae
atgtccaggaccccctatacacggttacgcattgagggcttccgcaaagcagaggcttccctgagacttcaaggaatggaccccagtggtacgccactgtacgagtccgttaaagcacgtatcatttcaggtgatctgacgtatgagcaggggcgttctgagatttttgcatactacacaaaagtagataccgccgggcctgtgacagtgggagagatgctggcagaggaatttttaaaaccgctgaacatgtctcatgaggaactggcggagtctatgggtatttgcaggcaggagattgaagatattatctgcggtttacgtcgtcttacggatgacgagactcgcgttcttgctgacatctttgggactgatagggacttttggagcaatctacaagtgctgcaagatcgcagagtaaaacgacgtaagtaa

SEQ ID NO: 145022 - DNA, 1428 bp, Enterobacter cloacae
atgttgaattccaaacttgtgattaaaaacagtaatgttgcgtttggaacaagcggagcacgaggtctggttgtcgatttcacacctgaagtctgtgctgcatttgcacacgcatttattgatgtcatggcgcgcgattttacctttgatactgttgctttagctattgataatcgcccgagcagttatgctatggctaaggcctgcgctcaggcgattattgctaaagggttaagagcggtttattacggagtgatcccaacgcccgcgttggctaatcaatcactccaggatagggtcccagccatcatggttaccggcagccatatccccttcgatcgcaacgggttaaaattttaccgtccagatggtgaaatcaccaaagccgatgagctcagtattctgcagtgcgagtccgcttttagcctcgaactaccattacttgaattgacaacgtcgtcgctggccgccgataactacatagcgcgttacacctccctgtttgctgctgatacgctggcaggaaagcgagtaggtatttatgagcactccagcgctggtcgagagctttatgccaaaatatttacccagcttggggccgaagttatcagcattggccgcagcgataaatttgtaccaatcgacaccgaagctgtttctgaggaagataaagagaaagcccgtgaatgggcgagtgagcttaatctcgacgctatcttttcaaccgatggcgatggcgatcgccctcttgtggctgatgagcagggggaatggctgcgcggtgatatcctgggtctgctatgtgctaaggcgctgggtattgacgcactcgctatcccggttagttgtaatacggcaatagcaaaatccggcttgtttaagcatatcgagctaacaaagattggttcaccttatgttattgccgcttttgccgggctaagcatagactatgatcgcatcgctggctttgaagctaatggtggttttttattgggtagcgacatcacatttggtgatacgacgatttccgcactgccgacacgtgatgccgttctgcctttcctgatggtttttgccagcagcgttaccgcgaaagtactgatgtcggatctgttacacaatctcccacagcgttttactcattcagaccgcatccagaacttcgctacggcgctgagcaaagaaatcatcgctaaagccttacatgacccgctcgactttgtacattctcttggttttaacctcggaattaaagtcgtcgattccacggatggtcttcgactcactctcagtgatgattctgtaatacatttgcgcccatcgggcaatgcacctgagctacgctgttatgctgaaagttgcagtgttttttccgctgtagcattggttgaaaatatacttgatcagctaaaaaaactatctatctaa

SEQ ID NO: 145023 - DNA, 579 bp, Enterobacter cloacae
atgagcagaaaaaaacctcaaagaaagcctcaaaccgccgatccgagaaatcttgttaaccaacctgccacgttagggcgagtccaggacggtaaaacagagcttcttgtaaatgaggttgtaaaaaacccccaagttcttgaacgtctcatggataggcctgaaatggcaggcatcatgatgcaagttactcataccagatcaggccctcttcctgatgccgatgagttggctagatacgaaagagtatctccaggctttgcacgtgaaataatggaaatggctaaagccgaacaaaaacatcgacatgagcatctaaaaaaaggacaaaatggagccatctggcgagatcggttaggtcagatatttgccatgatttctgttcttattttcgctggcttagcttatgtgatgatccagcatgaggcttttggctgggcaaccggtttgttaggggtcgagctagttgcattaacaatgcgtttttgtagctggacgaaaggtcaaacaaagtccaaatcaaatcaaaaaatgatcatacccggccgccgcgccgggttttttattgcacacccataa

SEQ ID NO: 145024 - DNA, 222 bp, Enterobacter cloacae
atgaaaaaatctgcaaagctctttttcagcgctatgggctctatccttgacctttgcccagcaggcggttacagcgaatatcgttacacgactacggacgccgacttgatcaagtctgattgggttcgtgtcggtggttatatgagacacgcggtaaccgataatgagcagaaaaaaacctcaaagaaagcctcaaaccgccgatccgagaaatcttgttaa

SEQ ID NO: 145025 - DNA, 315 bp, Enterobacter cloacae
atgagcagagtaatcgataaagagcttcacgtcacgatgcctgacagcagtgtttgggcagtgccagtccagttgattgccacgcacagagctgagcattacgccaaagagtttggcggtgatttataccgtagtttggcagaagacacccttccgctattccgctctgatgattttgaaatagaagactgggcagcaaataacatgaactggagtgatgttcagcacgctgcaaaatgcatctacccaggtgatgttgatttccaggaaggatgggtaaatggcgataaggaagtgaaggaggccgcccaatga

SEQ ID NO: 145026 - DNA, 363 bp, Enterobacter cloacae
atgagcaacatcgacaaacgcgcattacgggaagcggctgagaaggcattaaatgcgaaagcacgactggctttgatggaatcagtatttgacgacgatggtgaggatgtcaaaccagaagcgcaggaggatatcagcatctgcgtctccttcaatgacctgacaaaccccgccaccgtgctggcgctgctggatgagctggaagccaaagacaagcggattgctgagctgcaggcaatgctggcgcggctctatgccgaatgcgacacaggcgaacgtcgtggcaatggcagtcaatcaggcgttgcaatgccttcgtgggtaactgttgaggcggcgcgcttgctgctgggagttaagtaa

SEQ ID NO: 145027 - DNA, 1842 bp, Enterobacter cloacae
atgtctgatgtgaaaaataatgtagtagtaatgtcatctcgcgattttaattgtcctgaagatgttgctcaatatttaatgcagttgaagactcatcctgagctaaccctgtcagataatcagcccgaaagttattttctggctaaagaagggttgtatggtatcgatcgggccggagaatcacgcttaattatggcgggatatattatccccgtcggtctggcagctgataaaaaccagagtgctggcttatcggtggttttttactgccagaccacaagcgggctggtcagccaggaaattgtcccggttgcagaagttttatcgaagagcgaagccgtttgccgacattttgccggaaagggtctgatccctgtgagtactgtgcctgcgatgaacacttactttcgtgctgccgcgactttgccactaaaacgctatcgtctggtcaacaggcatggctggcaacccggggagttgtgcttcatgcatggcagacacgcaatcaaacccgaaacagttactgaagttcacgggatgatccctgccgcttcgtacaatccctcgtcgggtatcaatgcccggggaagcctggatgaatggaaagaaaaagtgctgaaacatgcaaccggcgatatgcaaaagttggccgtgtggattgggttaagttcgtgcctgcttccgctgctgaatgagcagggcattatttatcatttctacgggcaatcaagtgtcggaaagactgctctgttgcaactggcagcttctgtaaatggcaatggcggtgagccgggaaacagtgacagtcttattgagtcctggaacacgacaccgaacgcgcttgagatgaccttggagcaacgcaatcatatcactgctcctatcgatgagctgggtgtgtataaggggcctaaaattggcgatgccatatatgcactggcgaatgggaaaggtaagaaccgtatgtccggtgagacgctgaaaaatgtcgagcccgcttcatggcttcttaacatcataagttccggtgagatttcgatgcaggaacggctcagggatggaggtgaaacggttaaagacggtctgcttcatcgcagtattgacctgcttatcactcccgaacatgtacggtcttgtgctgatgaatccagtgaggactgcggtcaccgtatagaaataattaaggccaattcagcgcaatattatgggaccgccgggcgggtatttatcgaatacctggtcaatttgacgaatgacgaggctgaaacgcgtgattatgtcaatgacctgcatgagtgggtgtgtaaggcgctgcttgctcactgtgaagatcgtggctatcagctaaataccgtccagaagcggctgttaaagcgcttcgcggtacctggtactgctgcatttatggcgtatgactctggaattcttgagtggggtgaagacgaaatttttgcaacgctgatgaccgcttttgatatctggatggcgaatgttcagcctgaaacagacccgaagctggaggcgctgatgtgtctgcaaactaccctgggcacggagcatcagaaatttggcaacttgtcccgaaaccctatcctgtctcgttatgaaccagtgtatggcattttattaccggagaaacagatgctggttctgccagaagcaattgatggttgggttaaacactatggtgtgaacgccaggcagctagccaaactacttgatgcccgtggatttctgataagaactgagagagaccgcctgatttcccgcaaactcatggggaataaagcgatcaacggcttcattattgacgacagtttcctccgtgccacactgagctag

SEQ ID NO: 145028 - DNA, 855 bp, Enterobacter cloacae
gtgaagctggctgagttattacccgactacctgaactacgctattttgtacaaaaagtcctatacatcagatttatcgaaagtgaagaattatattctaccccgattgggtaatgctgaacttcacgagataaataggcgagacatcgcgagttatattcatggtctggatggacttaaaccgtcaacccgaaacagacatctggcactactgaaagctatcttttcgtgggcggtggaatacgactatttagaggtttcacctgctgccggaataaaagcattccgtgagccatcttctctgcgacgggcaatggagccggaagagttcagcatttttattcgtgtcctgaaagctgaaattcaggcagagaaccgcgataccctgcagttgttaggtttgcttgccttcactggtatgaggttaggagaggctcgttcagcttgtattgaagacctcaacctcacccgtaatacgctctttcttcgggacacgaaaagcggagattcgcgcctggtaccgttatgtggtgaagctatggagattgtttgttcgcaactgacgaaacacggcaatcagggtctgctgttccgatctgcgcacggtacaaaagtggctgaacctcgtaggctgatgaaaaaaatctgtgaaaaggccggaattgtacccttcactattcacgaactgagatatacagcgggctccgctatgcttgctgccacgcgagatctgtatgcggtaaagcgctttttgggccacaagtgtttatcgacttcagagcggtacgcaaattatttcagcggacaacagcacgctgatattgagaaagcaatgagcataatgctcaaaccatag

SEQ ID NO: 145029 - DNA, 1143 bp, Enterobacter cloacae
atgctggatagtacgttgaaaaaataccttaaaaatctggctggagatgctgatgtaaaatatatggagggggtgacgtcagcgactttatttcgctttttgaatgggagtgtgtattttgataatatcaggaagccagtggttaactctgtcttatatgagtttgaagattttgaacggcgtgagctcttattacctttttttgctgatatgcgttatcgggggcgcggattgaaaacggatgcgttcaagaagagtctgcttgggaactatctaaaaatatattatccaatgcatcttaaagcgaatatgtatcatgatgaattcataactaaacagatttctatggttgaaaaatgtcttcagctttgtggtgtatcactattaaccaatgaactttttttagaagatgaaaatgaatctgtcggttattctttctttccaacagtgaagggcttttattctgatgatgaaaggatgtgtcgaaacatcacatcagaccttaaagggaaaggaatggattctctttacgggattaatcatgaaatgattgatgctcttatgcattgcattcagatggggttgaatcatgttatgagtctctgtgatgcacgcacccagccagaacgagtacttgaatatgcactggccttgtacaaggagtgcagggttgatgcaaaaaaattttctgataattttgactctaataattataacgaaaccagaaaggtgcttgagaagaaaatcgcttttgatactgtttttgtatatctactgttatctgaattacgcactctgctgccagaggaccatatgctatgccgtaaaggcaggctctcccctgagcgaccaactattttttatctgagccgtcgtttttcaatgcccagcgatactgttttgaaattacaaaagaaaatcataatgaaatgcattttgttttccacgttgaacagactggaaaatgatggcagcgaagaatatagcttcatggacttgcatcgtgatatcgggagtcattttggttggcttgacactaacgaggaacgccggtttaaaagtgttcaaaatattctgaatagggaggctagttgcctctatcttactgatgaactgttccgggccagaaatcctgtcccttga

SEQ ID NO: 145030 - DNA, 1434 bp, Enterobacter cloacae
atgacaaacatgatctcatatcagggacttgttcgcaccttccctaaagattcccgtagcctcacgttcttacaggatcagttacctaaaatcagtcgcgaactggatgaagccgaggcgcgactgaatgcctatcgagagcaaagcgattcggtcgatttatctcttgaggcaaagtcggttcttgatcaggtggttaacgtggaaaatcagcttaacgagctgacgtttcgcgaggcagaggtctctcagctgttcaaaaagggccatcccacctaccgtgctttactggagaaaaaacaaacgcttgagcgggaacgcgcgcgcctgtatagccgcgtctcctccatgccatccacgcagcaggaaatattacgcctgagtcgtgatgttgaatccgggcgcgccgtatacatgcagttgctgacgcgtcagcaagagctgagcatctcgcgctccagcgctatcgggaatgtgcggatcatagacccggcggtgacgcagccggccccagtcaaaccgcgcaaagccctcatcattctgtttggtatgatgatagggctgctcctctctgccggaacggttttagtgcgttccgccttcaagcggggcattacctcgtcagaacaactggaagagttcgggatgccgctgctggtaacgcttccgcgctcggtatggttatggaaaaaaacgcacctgcgcaggagaaacctgtttacttcccactggaagcacaggatatccaacgtgcctttcctgcccattgaccgtccggctgatacgtttgtcgaggcgatgcgtgggctgcgcaccagtttgcattttaccatgatggataccgcaaaccgggttgtcgtggtgtctggccccacgcaggactgcggaaagacgctggtcagtacttcactggcgtcgattgtggcacaggccggacagcgggtgctgtttgttgatgcggatatgcgcaaagggtatgtccacaatgtgttcaggctgaacaatcatcggggattgtcctgcgtgctcgacggaaccgttgggtggcaggaggcggttcaacgctttgagaaaggcggttttgatgtactgacctgcggacctcaacctacgcatcctgttgacctgctcatgagtgatcgcttccaggatgtgatggcgcagattgaaaagcggtatgacatcgtgattatcgacactccacctgtgcttgcagtgacggatgctttgctgatcgccagagcagcagccactacgctgctggtcgcccgctttggtaaaaccagcgtgaaagagatcgagaccagccttaagcgtatggaacggatgaacgtaaatgtgaatggcgtgatccttaatgacattgtgaaatcggcggcgctctattacaactcggggtatagcgcttacgactatggctatacccgggagtaa

SEQ ID NO: 145031 - DNA, 126 bp, Enterobacter cloacae
atgggggagccagtagaacagcagcggcaggatctggttctcgtgggccgcctggcagcgcagcgtgacgccgtcctgctgctcctccagcagctcctgggtaatggtgccaacttactgatttag

SEQ ID NO: 145032 - DNA, 1893 bp, Enterobacter cloacae
atgaatagtatcaaaatttatacatgtcaccacaaacccagtgcttttctaaatgcctctattattaaaccactgcatgtcgggaaggctaatacttataatgatattggctgtgaaggggatgatagcggagacaacatttcctttaaaaaccccttctattgtgagctgacggcccactactgggtgtggaagaatgaatctctggctgactatgtgggattcatgcattaccgcagacacttgaactttgcagaacaacaaaatcatcctgaggataactggggggtagtcaactgcccgctcatcaatgccgaatacgaaagccagtttggattaagtgatgaatccataagcacctgcgtcgatggatatgatctgctgttacccaaaaaatggtcggtaacatcggcaggaagtaagaataaccttgatcattatgcaaaaggtgagtttttacacattaaagactatcagtctgccctggatgtcgttgaagagctgtatccacaatataaagctgcgattcaacaattcaataatgcaactgatggttattatacgaacatgtttgttatgcgcaaagacatgttcctggattattctgaatggctttttgctattttgtctaatcttgaagatcggatttcgatgaataactacaacgctcaagaaaaacgagttataggacacattgctgagcgtttattcaatatctatatcatcaaatgtcaacaagataaacagctaaaaataaaagaactacagcgcacgtttgttactgctgaaacatttaatggtaaattaaagcccgtttttgacgaaagcgtaccggttgttattagttttgataataactatgcattaagtggcggggcattaatcaattcaattgttctccattctgatgcgaacagaaactatgatatcgttgttctggaaaataaggtcagtcatttaaataaacaacgccttatcaagctagttgctggtcataacaacatatcattgcgcttttttgatgtgaattcattcactgagatgagtgatgttcatacccgtgcacattttagtgcgtcgacctatgcgcgcttgttcatcccgcaacttttccgcgagtataaaaaagttgtgtttatcgattctgacaccgtggtgaaggctgatttggcgacacttctggatgtcgagatcggcactaacctggttgccgctgttaaagacatcgtcatggaagggtttgtgaagtttggtaccatgtcagaatcagatgatggcattatgcctgcagagcaatacctgaaaaagacattaggaatgactaatcctgacgaatattttcaggccgggattattgtttttaatgtcgaacaaatggttacagagaatacctttgctcaattgatgtcagcattgaaagccaaaaagtattggttcttagatcaggatatcatgaacaaagtcttctttggccgagtcaaattcttaccattagaatggaacgtgtaccatggtaatggtaataccgatgatttcttcccgaatctcaagttttcaacctatatgcgctttttgcaagccagaagaaatccaaaaatgattcactatgcgggtgaaaacaaaccatggaatactgagaaagtcgatttctatgatgattttcttgagaatgttttaagtacgccatgggagaaagaaatctactatcgccagttacctgtggccacgctagtacctaaccaacatactgaactgcagcaaaccgtgttactgcagacaaagattaaaagagctttaatgccatatgttaacaaatatgctcctgtcggttcgccaagaagaaataagctcatcaaatattattataaagttcgccgctcgattcttggctaa

SEQ ID NO: 145033 - DNA, 1155 bp, Enterobacter cloacae
atgaagcgtaacaatattctcatcgtcggcgctggtttttcaggtgtggtcattgcccgccagcttgctgaacaaggtcacaaggttaaaatcatcgatcagcgtgaccacattggaggaaactcttatgacactcgcgatcctcagactgatgtcatggttcatgtctacggtccgcatattttccatacggataatgaaaccgtctggaactatgtcaatcagtatgcggaaatgatgccctatgtgaatagagtaaaagctactgttaatggtcaggttttttcactgccgattaatctgcatactattaatcagttctttgctaaaacctgttctcctgatgaagctcgcgcgctcattagcgaaaaaggtgatagttccattctggaaccgaagacttttgaagagcaggccttgcgcttcattggtaaagaattatacgaagcgttcttcaaaggctacaccataaaacagtgggggatgcagccttctgagcttccggcatctatactcaaacgtttgcctgtgcgtttcaattatgacgataattatttcaatcataaattccagggcatgccgaagttaggctatacccatatgattgaagcgatcgccgatcatgaaaatatcactctgcaattacagcgtgagtttgcggctgaaaatcgcgaaagttatgatcatgtattttatagcgggccgttagacgccttctattcataccagcatgggcgtcttggctaccgtactctggactttgagcgatttacctggcaaggtgattaccagggctgcgcggtcatgaactattgctcagttgatgtcccgtatacgcgcattaccgaacataaatatttttccccgtgggaaaaccacgaaggctccgtatgttacaaagaatatagtcgcgcctgcggtgaaaatgatattccttactatccaatccgccagatgggcgagatggctctgctggataaatatctatcactggcggaaggtgagaaaaatattactttcgtcggacgcttagggacttatcgctatcttgatatggatgtaacgattgcagaagccttaaaaacggccgataaatacctgtcttcattgtccaacgacgaaacaatgcctgtatttgtggccgatgtacgatga

SEQ ID NO: 145034 - DNA, 891 bp, Enterobacter cloacae
atgaaacatactgcactaatagtcactttcaaccgtcttgagaagctaaaaaagacggttgctgaaactgttaagctgcactttacctctatcgttattgtcaataatgggtccacggatgggacctctgactggctgcagacaatcactgatccccgagtcattgtcttaaatctggccagtaataacgggggggctggcgggtttaaggccggtagtcaatatatatgcagctctgttgatagcgattgggtcttcttttatgacgatgatgcttatccgcaaagtgatattcttgataagttcgcgacgataaataaagaagattgtcgtgtttttacggctttagttaaagatttacagggccggacatgcgcgatgaatgttccatttgtaaaagtcccgacctcgtttagtgataccttgcaatatatcaaacatccccaacgatatgtaccagataataagaaaatgctggtgcaaaccgtttcatttgttggcatgatcattaagcgtgaagtcttgaatgagcaccttcatcatatttatgatgaacttttcctttattttgatgatctctattttggttatcaattaactttaagtggcgagaaaatcacttatcaaccggagcttgtttttactcatgacgtgagtattcagggaaaggttatatcgccagagtggaaggtttactatctttgtcggaacttgattttggctaagagaatattcacggaagtggaaatttttagtagttcatcaatccttttgcgcctgtgtaagtatatcaccatattccctgtgcagcgccggaaatgggtatatctaaagtttttatgccgtgggattgtacatggtgtaaaaggaatcagcggtaagtttcactaa

SEQ ID NO: 145035 - DNA, 546 bp, Enterobacter cloacae
atgcccgccctgaactccgggcacactgtaggttatgtccgttacccaacgttcatccggagcatccggattgaactgtcgctgaagcctgttgggcgacacgatactggcctcgcctttacgagcccgcgggctccggtatccgacctgagcctttatgccgacacgtttcatcagtcgccagactctgttcactccgcactgttgcccgctgtcccgcagatccagatggatcttgcgataaccataaacgcaaccggactccagccagaactgtttgatctgtcctgtcagtctcaggtctgcctgatggctctgggaatgcggctgctgaagccaggcgtaaaaaccactgggatgaacatccagcacccgacagagcaggcgaacaggccagcaacgggtgttgtcacggataaaggcgtacctcagtcggacagctttgcgaattacgccgctgtagattcaatctgtcaacgcaacacccctttcaattatctctttaggtgttttgaacttcagtgtctttctcggtctgttgtttag

SEQ ID NO: 145036 - DNA, 1299 bp, Enterobacter cloacae
atgcgtgttgtcatactgggaagtggtgtcgttggggtaaccagcgcctggtatttaagtcaggcgggacatgacgtcaccgttatcgatcgtgagtcaggccccgcgctggaaaccagcgcggcgaacgccgggcaaatctctccgggctatgcggcaccgtgggcagcaccgggcgttccgctgaaagcgattaaatggatgttccagcgccacgcgccgctggccatcagccttgacggcacgcagttccagctgaagtggatgtggcagatgctgcgcaactgcgacacacgccactacatggagaacaaagggcgcatggtgcgcctggcggaatacagccgcgactgtctgaaagcgttgcgcgcctcaaccgggattgagtacgaaggccgtcagggcggaacgctccaactgttccgcactgaacaacagtatgaaaacgccacccgcgatatcgccgtgctggaagatgctggcgtaccgtatcagctgctggaagccagccagcttggtcaggttgaacctgcactggcggaagtggcgcataagctgacgggcggcctgcgcctgccgaatgacgaaaccggcgactgccagctctttacgcagcgtctggcgcagatgtgcgagcaggcgggggtgaaattccgctttaacacctctgtcgacaagctgctgtcggaaggggaaaaaatttacggcgtgaagtgtggcgaagaggtgatcaaagcggatgcctacgtcatggcgtttggttcgtactccaccgccatgctgaaaggcattctcgacattccggtctacccgctaaaaggctactcgctgaccattccggtaaaagaggagagcggcgcaccggtctctaccattctggatgaaacctataaaatcgccattacccgcttcgataaccgcatccgcgtaggcggcatggcggagattgtcggcttcaacaccgaactgctgaaaccgcgtcgtgaaacgctggagatggtggtgggggacctcttcccgcgcggtggctttgtcgagcaggcgaccttctggaccggcctgcgtccgatgacgccggacggcacgccgattgtcgggcgcacgccgtttaaaaacctgtggaccaataccggacacggtacgcttggctggacgatggcctgcggctccggacagctgctgagcgacctgatttccggacgcacgccggccattccgtttgacgatctcagtgtcgcgcgctatcaatcggggtttacgccgtcgcgtccacagcacctgcacggcgcacataactaa

SEQ ID NO: 145037 - DNA, 966 bp, Enterobacter cloacae
atgagtaaaaaaatgaccatggctgagatttcaaggcagcttggaatttcaacaatgactgtgtcgcgttactttaatggcggttatgtctcggaagagaaccgccttaaaattgatgccatcgtcaaagagagtcattacacgcctaatatatttgctcgctccattcgtagccaatccaatattattggtttcatcgcgcctcgtattgagtcatatacgaccagtttagtgattaaaggggcgctggctgctgccaatgaatcacaagtacgaatgctgtttcatgccacagggtttaaccatgagtcagaatgccaagctgtgagagagtttaacggcttaaatgcattgggcacgattattattgcgtcaaagcacagtgtcgaagagactttttatcgaaccttagacaatgtggtatttattggcaaaaataccccccaccattgctgtttatattaccccgatcatgcagcgattaaagccctcgtctcccacaccatcactcagttaaaacagcagcaggcaccgctggctgccgtacattatatttatgatgagcgtatgctttctagccgcactaagttgatgcaagccactattaccgacaccgtccctgagttgaatttatcactacaagccctagccaactcggaggacaaagctggctatcaggccgttcaattacagcctaatcatgtctacttttgtgccaccgataatattgccattcgtttatatcgtcgcgccaaagaacagcaactcaagatcggtcataacgtatggattgtaggcatgggtgactatgactacagcgatttgttagtcccgagcctgacgactgtcgcttttaactactatcaagtgggctaccaagctgtcaaaaaattgctcaagcgcgatttcagttctgttgaaggcacattcgacataaagatgagagaaagctcacaattcctctga

SEQ ID NO: 145038 - DNA, 354 bp, Enterobacter cloacae
atggagtccaacggcatcgatgaagtacctgactacaccgacccgattaccttcaacgccaaaatcagctcgcctcaggttggccagtttgtcggcttagttcgcaaactcgatgcgttgattatctcaatggacacactctggttatctagcgtgcttagcaataagcaacgtgttgatggcaactacgcatggcaacagcgcattatcaaactggctcggcgcattattgatatcgaaattcgagcacgaaaatcagttaaagcaaagggtaaagaagcagaagttgaacaagcggtgccttcaaccgatgacgaaatcactgaagaggaaacagatacccccgccaactag

SEQ ID NO: 145039 - DNA, 672 bp, Enterobacter cloacae
atgtttccttatatctctcatttgctcgcagcgatgctgctgggcgcaattattggcgcggaaagacagtggcgccagcgtatggccgggcttcgtaccaatgctctggttgcaacgggtgcggccgtgtttattttaagttccctctcgacgtcacccgatagcccggggcgtattgcagcgcagattgtctccggaataggctttcttggcgctggcgttattatgcgtgagggaatgaatattcgcggtcttaataccgccgcgacgctgtggtgctcggccggaattggcgtgctatgtggattaggtcaattctggaatgccggtatggccagcgtgattattctctgcgccaacatcctgcttcgcgaagctgcgcaacggattaatcaactgcccgcgctccatgaaggcgaaaaatgctatgtcctgaaaatcacctgtgatgacgagcatgaagatgcggtgcggcagagtgtggtcaacatggcgaaagagttgacgttgagtctgaaagccatttattgcgatacagcgcaagcagaaggaaaaactgaaatacgggccgaggtaatgacccgtgaggaataccggaaattactcgagctaattatggataatattggcgggaataaaattatggcttccgtaagctgccacgcaatatga

SEQ ID NO: 145040 - DNA, 990 bp, Enterobacter cloacae
atgaaactcgcggtatacagcacaaagcagtacgacaaaaagtatctgcaacatgttaacgaggcttacgggtttgagcttgaatttttcgactttctgctgtccgaaaaaaccgccaaaacggcgcacggctgtgaaggcgtctgcattttcgtaaacgatgacggcagtcgcccggtgctggaagagttgaaaaaacagggggtgaagtacatcgccctgcgctgtgcgggcttcaacaatgtggacctcgacgcggcaaaagagctgggtctgaaggtggtgcgcgttccggcgtactccccggaagcggtggctgaacatgcgattggcatgatgatgtccctcaaccgtcgtattcaccgcgcttatcagcgcacccgtgacgccaacttctcactggaagggctgaccggctttaccatgtacggcaaaaccgctggcgtaatcggcaccggtaaaattggcgtggctgccctgcgcattctgaaaggctttggcatgcgtctgctggcattcgatccgtacccaagcgccgctgcgctggatctgggcgtggagtacgtcgacctgccgaccctgttctcgcagtccgacgtgatttctctgcactgtccgctgaccccggaaaactatcacctgcttaaccaggcggcgtttgaccagatgaaggatggcgtgatgatcatcaacaccagccgcggcgggctggttgattctcaggctgctatcgaagccctgaagacccagaagattggcgcgctggggatggacgtgtatgagaacgaacgcgatctgttctttgaagacaagtctaatgacgtcatccaggatgacgtgttccgtcgcctctctgcctgccataacgtgctgtttaccggtcaccaggcgtttctgacggccgaagcgctgatcagcatttctgaaaccacgctggggaacctgcagcagctggaaaagggcgaagcgtgccctaacgagctggcttaa

SEQ ID NO: 145041 - DNA, 594 bp, Enterobacter cloacae
atgctgatggatcagtctgcattcaccgggaaaggttccttatcccgttatacgctggatattaataacagtaccgtcagaccggatgtcttacggttcaggggaacagaagccctgagtcagcctttttcatggcgtattgaattcaccacgccacaggttgttcagggcgaggacgtattgctgaaatacgccagtttccatatgcagggctgcaaagcggtgcatggcatcattaccggtcttgaatggctctccaccagtgctgaccagtcacattacgctatgactctgcaatcacgccttgctctgctctcccgctcacgtcgctgtgctatttaccagaacctttctgtacctgaagtggtggcgcaggtgctgcgttctcacgggctggaaggggcggattttgcgtttacactttcccggcattatccggttcgtgaactgataacccagtggcgtgaaaccgacctgcagtttattcagcgcattctgtctgacgtgggcatctggttccgtcaggagataaacgacgtcacagagctggatgtgacgatcttcggcgacagggtaatggtgccaacttactga

SEQ ID NO: 145042 - DNA, 375 bp, Enterobacter cloacae
atgtcaaagaaaaatagtaagataccttccgcaattgttaatgaaattaagcatctatttaatgagttagctgcttttggtgttacagttcaacataagcaaagtagtacaaaagcctacatccaggttttggatgaatatcaggggaatgagaggattcacaccatttacctaaaggacgataaaatacgatatcgtggccttaacgtagaaagcggcaatataacagaagtcgatatagaagataacgaagtaaaatttgcgatgtattcgacattaattatgaaacttcctgtagcttttgaggcagtgaagcagcttctttcacttgttgataaacatggtcttgtagttgtcgcaactcctaaatactaa

SEQ ID NO: 145043 - DNA, 1515 bp, Enterobacter cloacae
atgattaatcctacacctatttataacaagtttaagtatgtatctgctgagtgtggttcaggtaaaacatataaattatgtgagaatatcaataaagtacttaacacaaaaggcagtactgaaaagttcattatcgtacaaaatacacagaaacttgcaacagatacgtctaaaaactttgatagctgcaaattgctaattagtgatttaatgcccaggagtaaaaatgtcattaatacagtgctggatttcctcaaagcacctgttgagcgggttcttatcattagtgataaaacattttttagaataccagttgaaatgttagaagattggcagatttggcttgatgatgtgactaatttccattcattcaaaaatattaatgacgataatcagagaatcaaagacattatatatcatgaactgatgcaggagcatgagattgtcgacgaggaaaaggaacgatatttaacagctaaaaagaaagcagtaaaaggggatttaatgaacaaaatcgcccaagagctttctgttatagctgagaatgatattttcatcatgaacaacgattactttgtcgatccagagaaagtgcaattgagcattcttggatggaaagatctcagtaagtatctcggattacctgttactttcatgggagcaaacttcgaaaattcattgatttataaggcaaatcaagggttgtttgaagaaatcagtctggatgatctgcaacaacgaaaagtacctttaactgaacgcctcaaagtatactatttctcagaaaatataaaattatcaaagacatggaaggaaaggaatcctggtcaactccagcgtgtttatgcttacctctctgaagtactcgaaggtcaggaatactactggacgaacaacaataccgacaagcagaagctgcacaaggcttacagaataagccctgatgcgagggggcataacgactacaaagatcgacatacatgcgtctggttagcctgtatgcgtccagacgatacagaagcgaagctgtgtgagttgctattaaagattacaggtgaagacatccatcaggcaagagagtacgaaaaccttcaccagttcgctttaagggggatatcacgtcagttcaacaatgatgcaactcagattgtctatgtgttcgataaatggcaggctgaatcattgagtacaaatattgaacatattcccggagtgctggaaaacgtagcaccgggggcatcaggaaggccaaaaggagccacaaacgttaagagactgcttgcattgagtgatacaaaatcgaagcgtttcagtcgctggaaaaaggataatccggggcttgagttagtggcattcaaagcatttcttgcaagtactgtcaacgcggatctcagtactgacgatactacggctatgtgggacagataccagaaagcagtacaaaaaagagatgcaaattcagtccgaaacaccgacatgaaaagcagcagtatgtccaaaaataaccccttataa

SEQ ID NO: 145044 - DNA, 615 bp, Enterobacter cloacae
atggcaggcaaaaaagagagcgttgagcagttcagcgaaagacttaaatcaatagtaccttctggttcagggcgagatttcgccaaaaaagcaggcattggctacagtactgtccacaactatctacaagctgtatcaagccctacgcttgagaatcttgtgcttctggctaaagctggtggcgtgtcggttgaatggctggctactggaaaagagttttcaaaatcggcaaacacaaaccaagccgaagaactgttgaaaattccttttattgattctaatgatttccttttactggattcaggtgttttccccgatttacaggaaaaggcagggtctcttgctgcattacgggtcagtacagatgtaatggaaccaacattcttagttggcagtattttacttgttgatcagcaatataagcagttaaaagacggtaaagtggtagtactccacaaagaaggaaactacttgtacaagcgagttcaggtagtgccagatggatacaatttaagcagtgataaccccaaatacagtgcgatgatcgtcaatcaggattcactatcctcctttgatgtgctgggggaagtactgatagtactgaatcatctgtag

SEQ ID NO: 145045 - DNA, 561 bp, Enterobacter cloacae
atgtctggattgatcgttttcattatctgcatagcaatttcggtactttgttataagaaagtttcaaaccgtttcagaaataaaggtcggggaaaattccgtactttaacactttccttggtgataagttttgttgttttcatggtgtctattggaattggtgcagggattgtttcacaagataagagtactgatgcaaaggcttcaacgtctgccagtactgaaaaggccaaaaccaatgtttataaatgtgataaattcgatgcaataacacaaactcgacagggaacaaaacgcgattcaggttactattcagataaaggggtttcaatttattatactatatccgataatgaattaatcagtcgaatgccaattcccggcgataaagatagtgtgtatactgctaaattcaacaagattgcagcagatggttcaaggaagtacggaaatgcgtcaagtaattattttgtatctgtacttaatgatagcactataaaagtaattgatgttgaatttaaccataatggaacgataacgcaaatttgttcgaaacagtga

SEQ ID NO: 145046 - DNA, 3111 bp, Enterobacter cloacae
atgatgaatcgtatctaccggttggtctggaatgccacacaacaggcatgggttgtcgccggcgagttctgccgaacacataaaaaaacaaaaatgctcttttttgaacgatacactacacgtttgctacgcgcactgtcgggaattttctcgccggtggtacgcacctcagtgactactatcgcactggtgatggcaagtactcatggcgcttgggctgttacctgcccggctgacgttaatgggtcgtaccgtacaggatggatcaacgctacctatggagtgggatgcaacgaagtccccgctacgacaggatcaccgacagtactgaatagcaacgcaagctggtatgtcctcgccggcagtaatcttaccgtcggtgccgatgtcattacgatcggagcaacaaatatatcatacttgggcaccaacagcttcagcttaatcggtaaccagtacctgacacacggaagcatcaacttcacggacgtgactgctacgctgaccaacagtggcagcggcggcggcatcaaaggcctaagcacacacaacaccgtgccgataaacgggaacaacttcaccctaacaacgaatagcagttacgtcggcttaaattcgagtggaggcgttggctcttacgccatcctcgctggctcttcggtggattcaggtgaagccattgttgccaacaatggcaagttttcgaccatcacactcaacaacgcaaccatccgacagagcactagcggtggatttactatacccgtgttgaacgcaggtctgcgtgctatccagggcgcaagtggcaactctggtaacggcagttcgggcaagattgaaatcaagggcacgctggacatgatactcactggtgcgcgcatcgaaggaatctatgtctcaggggcagcgtcggatagtgagggggccgaagcaatatcgcaggtagttctaaacaacacaacgctcaaaatggtgaaaagtggtacgcagtcttacgatagcagcgcaatcaagataggcaagtcccgaaccgtcggaagcggcaaaggcctcatcgtttccaacggtgcattgaatatcgacatggaccccaattttggtggtagctcggcttacatgagctctgccatcaagatggctgtcagcggctcggagctgcaggctaacgaacctaacagctctacctacatcaacgcctcccgctcggtcctagccatcggtatagacgattgggggacgagcgtcgattcgacaggcatcaaagcgagctttggcaacgccaccatcaagacccagtcgattaccgcaccgttactactagtcgatagtggtcagcaggatgtgggggttctgtttgatcgacactcaaatctcactgccgcgagtgatggttatctggtcgacatcatcaagtaccggaactcaacaacagccagttcgttgaagctaacactcgacaacggcagcaccatgacggggctgacgaacaaggcgtatgccaactcgacactgaacattaacctgaacaacggctcgacttggaacctcgcagagaaggcgacaggcactgtggcaacctcggccttcgatacgctggcaatgaacggtggctcaactctgaacggcaccacacagagcacgtcaccggcaaagttcatcctcaagggcaacgttacttctaccggttcgactctcaacctcacggatggcaaagtcggcgacgttctcaccatccagggcagttacgtgggcaataacgggaatctgtttctcgatacggtattaggtgatgattcctcaccaactgataagctggtcgtcagcggcagtgccaccggcacgacctatgtcaaagtcaccaacgaaggcggaacaggggcccggacgctgaacggtattgaactcattaccaccggaagttcgactgatgatgcgtttgtacagtcgggtcgtattgcggcaggtgcctatgattactctctggtgcgcggtactggcagcaacagcagtaactggtatctgagtactacaacacctacaacacctacaacacctacaacacctacaacacctacaacacctacaacacctacaacacctacaacacctacaacacctacaacacctacagagtctctgctgcgtcctgaaggcggctcctatgcggcgaacctggcggcggccaacaacctgtttactacccgtctgcacgaccgtctgggtgagacacagtacacggatgttctgaccggtgagaagaaggtgaccagcatgtggttgcgcaacgagggtggccatacccgttcacgcgacagcagcggtcagctcagtacccaggccaaccgttacgttgcccagctcggtggggacttagcgcaatggagctcagacggcagcgaccgctaccacctgggtatcatgggggggtatggctacaataagagtaatacgctttcaaacctcagcggttaccattcccgtggagcggtggaaggttacagcgccggtctgtacggtacctggtatcagaacgatacggacaaaaccgggctgtatgtggacagctgggcccagtacagctggtttaagaacaccgttaacggcgaaggtctgagcggtgagaagtatgattcagaaggcgtgacggcgtccattgagagtggctacaccttccttctgggacagaacgcggccggcacccagacgtacttcattcagccgaaagcccaggtcacctggatgggcgtgaaagctgacacgcatacggagtctgacggcacggtggtctccggtgacggtgacggcaacgtacagacccgcctgggcgtgaaagcatacatcaacggtcacagtaagctggatgagggcagagaccgtaccttccagccgtttgtggaggtgaactgggtgcataacacgcaggactttggcagccagctgaacggtgtcctggtgaaacaggatggcgcggcgagcattggcgagatgaaggtgggtgtggagggccagctgagcaagcgctttggtctgtggggtaacgtggcgcagcaggtgggtgataagggttacagcgacacgtccgcgatgctggggggtaaatacagcttctga

SEQ ID NO: 145047 - DNA, 231 bp, Enterobacter cloacae
atggctattttagattttttgatttctctcgcattctgcttaggcggtattttctacatctggcatacaagtaaagctctgaggacaggagtttttattggctggctcaacggaagctatgagaagtattatgtttattgctctaaacacccctggaaattctattttaaccttttaaccatggcgagcggtggttcgttacttttagggaaggtgcgaacaagtccctga

SEQ ID NO: 145048 - DNA, 396 bp, Enterobacter cloacae; identical to SEQ ID NO: 101138

SEQ ID NO: 145049 - DNA, 1359 bp, Enterobacter cloacae; identical to SEQ ID NO: 101137

SEQ ID NO: 145050 - DNA, 321 bp, Enterobacter cloacae
atgaaaagaaaaataattgtggctatgttgttcacaggttttctgtcacaggcgcatgccgggcttgttcaggtaaataatcgtgtggcctgttatcttgtgatggacaatacaaacaggcaactcatgcagtcagataaaaaacttacagctgaaatttatgaatatttgggaggagagctacagcgttatggcgttgacgaagagtcgattaatgaaaataccatagcgctggagaatgatctgcctcgggcataccagcaggcagcgtttgcagataagtgtgtagcattctaccaaaccccatcaaacagaaagtag

SEQ ID NO: 145051 - DNA, 498 bp, Enterobacter cloacae
gtggataaaaaccggatcaccttttgcggagacagcgcggggggacatctgtcgctggtaacggcgctgcggcttaaggctaaagggctctggcagcctgtacagcttattcttatctaccccatgctcgacgccacggccagttttgaaagctataccctcaacggcatggattacgtaattactcgcgataccctgctgagcggctatgaaatatatctggctggagccgaccgtaagcatcctgaggttagcccgctgtggcgagaagacttcagcggcctgccagctgtccatatcgttaccgctgagtacgatccgttatgcgatgaaggtgaggcgctgtttcaacgcctcacggagcaaggagtgacgtgtaccgctcagcgatggctgggagtaatacatggcttcttccagcttggtggaattagccaatcagcgcgagatattatgcgggatatcgccgggcggattcagcacgcccggggagcgtaa

SEQ ID NO: 145052 - DNA, 972 bp, Enterobacter cloacae
atggacattatgaagtcaaaatcaccatcactcgcaattgtagtgccatgttacaacgaaaaggacgcgttccctttctgtttggatggtttaacgtcagtattatcaaacctcatttccaaaggaaagattagcgataagagttatattctttttgtagatgatggaagcagagatgatacctgggaacaaattaaggccgcatcctgcaaaaattcttttgtccgaggattaaaattatcaagaaaccgaggacaccagatagccctaatggcgggattatcaaacgctgatacagacgtaactgttagtattgatgcagacctgcaagatgatataagttgcattgaaaaaatgatcgacaaataccacgaaggatttgagattgtttatggagtacgcgataacagggacagtgattcagtctttaaaagaaccacagcaaataaattctactcgctaatgagttggttaggggtaaatcaggttcccaatcatgcggatttcagactactggggcgcactgcgctttcggctctgaataagtttaaagagcaaaatgtttatttaagagggcttatcccccttcttggctataaatctactaatgtttattatagtagggatgaaagggtcgcgggcgaatcgaagtatcctttaaaaaaaatgctctcgctggcgctggaaggaataacttcccttacaattactccattgcgtatgatcgctatggctggcattgttacatgcttaatatcatcaattgcagccatctatgcagtcattgagaaattgcagggggacactgttgctgggtggacttcagtcatgattgccattttcttccttggtggtgttcaaatgctctctctgggtattattggtgagtatattgggaaaatttatatggaaagtaaaaacaggccaaaattctttatcgaagagaaagcaggtggtgaaaatgagatataa

SEQ ID NO: 145053 - DNA, 2025 bp, Enterobacter cloacae
atgagatataataagcccctatcaattattttattattcatgattttgttggtggtggttatccaaaccagcatatttatagctcatgaacagaacatttactattgggatttcaatggatactggagaatgtgggaagagttttgtgccacattccctaatgagcctatcaactcaataaggacagtctttcactctattagacatgatgactataactctcttcctgtcgccatcacgtcatggttctatctttttaatttaccttcacggctgtcttatataacttcattggctgtgatgtatcttttccctacagtaatactcttccatttactgtgtaaacgtttttctgataatcactcttttggctggttgttactttcttgcattttacctttaacctttgtggctttttgggccccaacgcttaaaggatatcctgatatatcaggcttaatcccaataattgctgcattactatatgtttcgagcagtgatttcggtgataaggttaaaattaaaaaagcccttgtgactggattacttctgtggtctccattcttattgagaagatggtacgcatatacggttgtatcattgtatatatcattacctgtgcttaattatttcctctacaataatgccaagcatagctttggtcgcgtggccatcattatcaaaaattttttcgttgctggtattttctccgtattgcttaccttgatatttcagggtgcattaattaagagagtaattgcaactgactacgccacaatatattctgcttatcagtcctctctcagtcattccattgaaaatctttataatgatatcggtttatatctattcccctttgtaatcattggattgctttccatttttcggcgtaaagaccgtaatgataaaatccttatcatattctcagcttttaacttagtatttagttttttcttatttacaagaacacaaagccccggcgtacaacactgccttccttttgctctttgggcgttaataatcgccaccttgggattaaaaacgttattgcatcttgctaccagcaaaacttatcaatattcaatgctcattgccgtcactggtttatgtttttttattaactacacttcgctatttagcgcaaaacaatatacaacgattgacaagttgttgcctatcaaatcgttgcctatacacgtagataatttcaacaattacgttactctcgttaaaaatattgaatcgcttacacagggaaatgaaaaagtcacgatacttagttcaagttcagtacttaatgacgatatgataaataccatttcctaccggaaattaacagggaaaatagcatatgcttctcaagttgatctcagagatggtattaatattgaatctttactctcgaaatattttgttgtagcggatccgatacaaacacacctgacaccggatgggcaaagggtaattaccataccagcaaatgaaattctttcaggtgacggaattggtgctgctttcaggagaataggccctgcctataaactgtcggatggagttactgcatacatttatgaacgaacgcgttcctataccgataaagagattaaaaactttttttcacttttctacaagcattaccctcaatgggaacaagtatatgggaaagggctttactatccgtttctttcagcaagtgtagttgttggtgatacctggggtaaatttaccatctccgataatggtgaaatcgatgcccatccaggagacaacacccctaccacagcgaaatggatactaactggagttaacacgcttgtttttgactcttacaacacgacgtgtagtaatgctgatggtgtggacataaaaattagcaacgatgaaggaaaatccagtaatgtttatattaaaaacggcagtagtggaatcatggatgttgaggaattttcaggtaaagaatcaaccattgaaattctcaaacacgaatactctgcttgtgactctattaaaataaccgcaaaataa

SEQ ID NO: 145054 - DNA, 195 bp, Enterobacter cloacae
atgtacgcaatgttccaccctggacaccccttttttatccaaattaacgcgctgttttatcgcttccttacgtttcattggcttagggaaggtgcgaataagcggggaaattcttctcggctgactcagtcatttcatttcttcatgtttgagccgattttttctcccgtaaatgccttgaatcagcctatttag

SEQ ID NO: 145055 - DNA, 1020 bp, Enterobacter cloacae
atggaatcccgtgaacatccttggttcaggaagcgtggttatcttcatttcgataaaccaatttccattgaacacgctttagacatagtaacaaaccctcgagctgttgcagctcattcttttcttcctttcattacctttacttccactacctacaaagtacaaaaagataaaggcactaatgcaataaataaaactttaaaagaaagacctatagcttattcttctcatgtagatagccacatctattcttactatgcagcgacactgaatgagctttatgagaatgcactgcaaattcatggaatttccaaaaatgttctggctttcagatctctccataaaagcaatattgagtttgcatatgatgcctttcaagaaataaaaaaaagaggtgaatgcagtgccgttgctttagacttatctaagtttttcgatacccttgatcattcttttctaaaagatgcttggtgtcgattgctttctactgataaattgccagaagatcattatgctgttttcaaggctataacaaaatattcaaaagtcgacaaagaaaaagtgtatgatttgatggatatcccaaaaaataatgctaaatacactaagaaaacgagaaagcaaatttgttcgtttgcagattttagagataaagttaggaaaaatgcgttaataatatctaacaaagcgaattttggtatacctcaaggctcgccaataagtgcgcttctttccaatatttacatgcttaactttgatatagaaatgaaggattatgttgcaactttaggcggagaatacttccgatattgtgatgatatgctgtttattgttcctcagtctgctaaaaataatgttgcgggcgaggcagaaaaaaggctaaataaacttaaggtatcactaaatactaaggaaggtgcgaataagcggggaaattcttctcggctgactcagtcatttcatttcttcatgtttgagccgattttttctcccgtaaatgccttgaatcagcctatttag

SEQ ID NO: 145056 - DNA, 1410 bp, Enterobacter cloacae
atgaccctacctctgaacaatcccggttttacggatgccgagccttctaaggggctgataaataaaacctttacctatatagtgacattgttgataagtattttcattgcggcaataatttccctgctattaataaaaaataatgttaataaaatcagcgataagcacgatgaatttttgttaaggaaagccctggattcccgccaggaaagcatgcgaagtcacttgaaagataatgctgaatggggagatgcctacaaacatcttcatttgaacactgacgttcactgggcatgggataagcagaacctgggtaagtccctgtatgacaactttggctacgaaggggtgtttattctctccccggaaggaaccacgcgatacagcgtgcttgacgggaaactgaagcttcaggatctcgggcgctggttagataaatcaaccaaggagcgattactccgtgaggtgagcgttaacaatggattgccggtttctatactcacgcttatcgattccgttccagccattgtttctgctgaatggataacaacgggcgatgacgcgagcgtgcaacccttgccggggaaaccgtcggtaatggtgtttgtagacaagttaacggctaaaaaactcctcgcgattgggcaggatgccggtattaaaaatgttcgtacttcgcctgatgcagtcacttctcaaataaacaatcaaacagaatttaccttaagcacccagaatggtgatgtgcaaattatctgggacggtgaaaatcccggccaggcattgattatttattttttaccattactcattctttcagttattctgacggtatcgatgacggttattctcatgcgccatattatgcagaaggcgagaatgcttgacgaaaatacctttctcctcgagcaggcgcggttgaatcttatcaccagtgaaaaacgattccgggacgtcagtgaaacaaccagcgactggttctgggaaacagatttatcgttaaagataacctggctttcaggtcgtttttctacagtaacgggatatgaaaatagcaaatggataggccgcaggctggatgaactctttcctgcgtcacgcggattattacaaaactgtgtgaggctcagggaattaactgaacgctttgaatttaagaactgtccttatattcatgcgcaacaatctacggcctattgcacgcttctggcaaagctttctgctcagcctgatggaacggtggttttgcgaggtgcggcaaccgacgtttctctggaagttgaagcaactaaacgggtggagttcctgtcacgtcatgatgaattaaccggtctgccgaaccgctatcatattaaggaatttctggcaggccagttggctaaggaaggtgcgaacaagtccctgatatga

SEQ ID NO: 145057 - DNA, 147 bp, Enterobacter cloacae
atgcggctcagaaaattaaaactgaaaaacttcagaggctacagaaactctactgaaatcattattgatgaaagcatgacgggtattgtcggtcgtaatgactttgggaagtcaacgattctggaagcgctggctatttttttttga

SEQ ID NO: 145058 - DNA, 1491 bp, Enterobacter cloacae
atgaaggctgacaagaatgacatgaactgtttcagcctaagagaaggggacggccgttttgaaatagcctgtgaatttgatgacctgcccgattttatcatgatcgacgacagggtgcagaccacgctcgcctcagaacatctgctgaatgaagacggcaattttgaaatcgtcaaaacgtttaaagcaacgacctcaggaaaaccggagcagacctgcatccgctgcatccatcccgaagaggagcccctgagaaacttactggcaatgaaaatttccgagctcagggcggtgggaaaagaagctgaaaaaaatgtggcggataaacgcactgcatcgttatggcgtcaggccatcagggaagccgccgctccctatacctgttctgaaatgttgctggatgtcgataaagagtttggaaccgacacaaaatcattatggggtaagatcctcgatttgctgcccacgtatgcgattttcaaagccgacagggaaagcagcgacggggattcagaagctaaaaaccccttacagcaggccgtaaaagacgctcagtctgcgctgcaggacaaaattacagcgctggaaaatgagatccaggacagcgtactggatgtcgcacagagaacgctgaataaattacgtgaaatggcccccgaactcgccagtgaactgactccacgatttaaggagaaacccaagtggaccttcagtttcaccctggacggggaaaatggcatccccatcaataagcgcggcagcgggataaggaggcttatcctgttgaattttttccgggctgaggccgagaagcatgtcgcggggacgcccagaaatgtgatttatgccatagaggagcctgaaacgtcacagcatccgaactatcagatgatgctgatgaaagcgttactggcactggcaggccagccgcaccgtcagattatcgtcactacccatgtcccggcgctggccggattgatccctgtcgaaggcgtacgttatgtcacccgaaatgaggcgggtgaacccgtagtaaaaatgccggatgacgctgtgctgaaggaagccactgaaagcctgggggtgctgccagagaccggtatggaaagggcgcaggggatagttctggtagagggaaagtcggatgtcactttcctgaggcatgcggccagttcattaaaacagtcaggtatgttgccagcctctctggaggacgtgaaaatagtgccagtcctcataggagggtgtggcagcgtcaaacactgggtgacattgaatctggccaacgatctggggcttccctggtgcgtatttctggactccgatattgggggagaccctgcacaggttctgtccattcagaaacgtaaaaaagaagtggaggatgccggtaaggtattcttcgccacgcgcaaacgtgaaatagagaactatctctgcccggatctgattgaagaaatgaccggtgtagccgtcacgtggctttgttga

SEQ ID NO: 145059 - DNA, 813 bp, Enterobacter cloacae
atgacagaacaacaattgacggaaaaccagattcaggccgcaaccggacatgtagtgacactcctcgccagggcaaagaaaccacttcaggatgcggattggctcatgcggttgcctgcagatgaaatctcccgccagacggaaacactgacaaaaggcctttcctctgactggcagtccaggataattgacctttaccaaaaaatgcaggcctgggtggaagccagacaggccgaagatgcagctattgagaacctcagggctctgcgtcagcatcaggccgaaactgaacaggcgagcaaagacaatcggatgcagttcagggaattgcttagccagaacggcggtatcgtgactccagagatgaaagctcttcgggctgagtatctggaacaacaggaaacagccgccgagctggccggtctgattactgaaaaagaagagcagttgccggtactggctgacgcgaccggtcgtaaggcaaacgcctacgtaaactgccatcatggcatcacggaagagcgtattgatgagcttctgcgtgacttttttattttcaacggtgctgaattgagcagcctgctcaggatgaagtacagacaatttgagcggaatagctcagcacatataccggggattattgaaggtacaaatgatgcagatacactgtatcgtgaattcatcctgaatctcatgctgaaatggacgagcgaaatattgccgctgagattccgggatgacgtgatgagcctggccggttcagcgccggtatcaggctcacatgatgacaggaaaaaaagaaaactgttttga

SEQ ID NO: 145060 - DNA, 273 bp, Enterobacter cloacae
atggcgctgaaatgtcctgaatgcggcactatggcccatgccagaaccagttcttatgaagcaccttcggttaaacgctcatggtatcagtgccagaatcttgaatgttcctgcacatttacagcgctggaaagcgttgacacgataattatgaagccgcataaacccgtgccatctgaacctgagtcgcaggatgatccccccgcacgtaagtcgcagacgctgggccgctacggttcggcctgtacccttaaagaccgtcatgcacaataa

SEQ ID NO: 145061 - DNA, 336 bp, Enterobacter cloacae
atgcagttgcatggtaaggccctaatccagacactgagcctgctgaaatccacaatgggccgggaagccagcgcagttgtcggtgtggtgcattcagttaatgacccggacacagtgctgaaagactttattcataaaaatatcatcaaaccggctctcactaacgatgcgatgccggaacaggatcctgtgtttaaactggcgggcgtagccccggattatgcggcccgtctggatttcagtaagcaactatcccctgcagccctgcataagatgaagatacgtcaggaacagatgttgctgcaaaaaaacaatagtgtatcggagggtatgtaa

SEQ ID NO: 145062 - DNA, 1023 bp, Enterobacter cloacae
atgcttcttctcggcaataccagccaaaaagaccagattgatgaggtgtgtcaccgcatcgtacaggaactcaaccgtcctttctccattgagggtaatgatgtcgcaataggcgtaagcatggggattgcgctggctcccctggatagcagcagcgcaaacgatcttttacgctatgccgatattgcgctttaccaggctaagcaatccggcagaaacagatgggtctattatcgcccggatatgtcggaaaagttaactgaacggagaaaactggaactcgaactgaaaaccgcgattcgcgaagaacaactctatctggtgtaccagccccgttataacctccgatattctaagatagaggccgtcgaagcgctggtacgttggcagcacccgcaccgggggacgatgatgcccgatcagttcattccgctggctgaagaaacaggtctgattattaacctcagcaactgggtcatacgcaaagcgtgtgcggagacaaaagataaattgccggggctatcggtatccgtaaatatttccgctatcgaattccaggcaagcgatcttgctgaaaggataaaagagatcctgcacgaaacagggctagaacctgaccgactggaaatagaagtgacggaaaatgtcacgctttccgatcctgaaaagaccttgcagaccatgaaggctctcaaaaaaatgggcgtccgtattttgattgacgatttcggtaccggctatgcctctctgagctatctccggaagtttcagtttgatggactcaagctcgacaagagttttatttttaccctggccgattcgccgcagaaccaatcagtcgtagaaaaaattatcgatctgggtaaggcctattcgatggcggtcactgcagaaggggtggagaccaccgaacagctctcttttcttaaaaaaaatagatgtgatgaagttcagggctacttgcttggaaaaccggcttccattacggaattaaatttaaacgcaaacagaatagatctttaa

SEQ ID NO: 145063 - DNA, 396 bp, Enterobacter cloacae
atgtctaacactaacgccaattttgagatgaccgggatcctgttagggcaagaagtccgtaaacgtaaaactcctcaggagaagatcgccattatccagcagacgatggagccgggtatgaatgtctcccatgtcgcccgcctgcatggtatccagcccagcctgctgtttaagtggaagaagcaatatcaggaaggcagcctcaccgccgttgcggctggagaggaagtcgttcctgcttctgagcttactgctgctctgaagcaggtccgggagcttcagcgccttctgggcaagaagacgatggaagttgagatcctgaaagaagccgtggagtacggtcagtcgcgaaaatggatagcgcacgcgcccttgttgccaaaggacggggaatag

SEQ ID NO: 145064 - DNA, 294 bp, Enterobacter cloacae; identical to SEQ ID NO: 7755

SEQ ID NO: 145065 - DNA, 408 bp, Enterobacter cloacae
atgacggaaatggacgatgactttttagaatatgatctggactggtttttatccagccaggaagggtacttagcgcattttgcaacagcaggtcaggggccgattcctgaaaggatcaagtcatctgtcgaggactataattttatttttgattatatttactcactggaacccttgtcagaggtgtatgtcatagaaggcaatctgcctgcattttcaaatgacaatcagcgttcttgctatctgcgctcatttgttgagatgtcaagtaaaggattgttcagctacgactatgaacaaggtggatataaattaatttcgaaaccaaaaacaccattgaaatatgaaaaattgccaaatgaagtgaaaggcgtgatttatgttgcagaaagagaaattgacttatag

SEQ ID NO: 145066 - DNA, 141 bp, Enterobacter cloacae
atgtttatgcagaaccaaatgccccagttcatgagctgcatcaaatctacttcgttcagcagttttttggttgttcagaaatacatatgcctttcctgctttccaaaacgaataagcatcaacttccgctgtattttctga

SEQ ID NO: 145067 - DNA, 294 bp, Enterobacter cloacae
gtggcgcacgtcttcggtgaacgcactctggccacactggagcgtcttctgagcctgctgtcggcctttgaggtcgtggtatggatgacggatggctggccgctgtatgaatcacgcctgaagggagaactgcacgttatcagcaagcgatatacgcagcgcattgagcggcataacctgaatctgaggcagcatctggcaaggctgggcaggaagtcactgtcgttctcaaaatcggtggagctgcatgacaaagtcatcgggcattatctgaacataaaacactatcagtaa

SEQ ID NO: 145068 - DNA, 294 bp, Enterobacter cloacae; identical to SEQ ID NO: 125611

SEQ ID NO: 145069 - DNA, 378 bp, Enterobacter cloacae
atggacgaacagtggggctacgtcggtgctaaatcacgtcagcgctggctgttttacgcgtatgacaggatacggaggacggttgtggcgcacgtcttcggtgaacgcactctggccacactggagcgtcttctgagcctgctgtcggcctttgaggtcgtggtatggatgacggatggctggccgctgtatgaatcccgcctgaagggaaagctgcacgtaatcagcaagcgttacactcagcgcattgagcgacataacctgaatctgagacaacatctggcaaggctgggacggaagtcactgtcgttctcaaaatcggtggagctgcatgacaaagtcatcgggcattatctgaacataaaacactatcagtaa

SEQ ID NO: 145070 - DNA, 183 bp, Enterobacter cloacae
atgatgtccctctgggatgcgctccggatgaatatgatgatctcatatcaggaacttgttcgcaccttccctaaggaaggtgcgaataagcggggaaattcttctcggctgactcagtcatttcatttcttcatgtttgagccgattttttctcccgtaaatgccttgaatcagcctatttag

SEQ ID NO: 145071 - DNA, 294 bp, Enterobacter cloacae; identical to SEQ ID NO: 125611

SEQ ID NO: 145072 - DNA, 825 bp, Enterobacter cloacae
atggcaggacaaatgatcgttttatcaggcctcaatgcaggcgctgcagcgggcggcccggctgttcgtatgaccgcggcagaccagattgcagcgaggatcccgtctctggcctatgccatcaccccgtcgaccctgaaaacaggcgcagacgggttactcacggggcgggaccgttcgcggggcgctatgctgaaaacagcgggctcgtcagcaaatttgctgcgtgtctctcccatggcaaaccgtccggcgcttaatacaggcaatatgcaggttgccgcatcgcttgatctcccggcaggcagcgtcaccccgtcttattctgtggtcatggccgtttatcttggcgaagccaccctgaacacagcgccgaatgccatgaacccgatcatggccatggggccgacacagtatattgctacagcgctgcgctattacggtaatggcagcacgccgggcgatcccacttataaaggtcagttcgtctctggcgggtcaggtaccaccgcgccctgggccagggtaaatggtccacgggtatcggggtggtgcattctgacggcctgttatgacgatgtcacaaagcaggcaacggtaggcctgaatggctctgataccagtactgttctgaaaacatccggtctgctacctgacgcgaccagctactggtctgtaggctattcaaaatcggcagcaggtctgcaggattccggtatcggcgatacttacatcttcagtgaatctctgctggttaccggttacgggcaggacaggctggctgcactggtcagcgcgcttaaaacacaatacggagtggtgtaa

SEQ ID NO: 145073 - DNA, 2067 bp, Enterobacter cloacae
atggccaccagtaatgaacctctgggttcaggatcgccgggcgtgctgctcgtcaactcccgtaatcttgatcatctcattcaagatccggcgcatcagatccctgaccggtttggtaatccccgccgcacctgggcgggggtggagtatggcgtggaggaaaaaatcaacgaggtggcaaacgccgctgccaccccgctggtcggcagtatcgcagaggggataacgcggacgtcttccacggaaaataagttttttaaagtcatccctaacgggccggataatttaaggcgttccatcctgttcgaaaacgttgccggcactgcggttccccgtgacgtgcaaatcagccgcgacgatgtcgcgcgttctgaactggtaaacagtaatctgaaatggagcgattatccgtttgccattactgatgaaaatctcatccccgtcattgctgtaaaagatgacgggtttgcgcacgttgtcaccaatgaactccccggcggcgacctgctgcatcatctttaccgttacggggtttttgacagtgagaccggcgacctgctgcatggctatacatgggatggcggggtggcgctgggcggttcacgcattcttgacgatgaattccggtacgtctggacggacgaatcgggaaacgttgtttttggcctgcgctgggatggttcgttctaccccggaacagcggacacagacaccgtgctgtacacaaaaggcccggaggggaagcggactatatgggcgtggatgaacgggctgccttaccagctgaccagtacaggcgacgcctggtcaccccggctggcggggccggtcgtgcagtggctttcggcagaaaaaggcggcgtggtgtcacgctcggcaccgttaccggacacctcactgttcgcgccgtttgtcacgcgggcgctccatctcgtctcatatggtcagtcactgagtatcggctcgtacaccacaccgtttaatacagcaccgcactgcgccaaccggctgctgacattgcgtcagggcgtcatggcctacagccagtcagcagcacttacggaaagcgctgttattccgctcaaaccgctggccagcgttcagcgtgaagcgccggttgtcgcaatggcaacagaactgctcgacaaagactggctggacagcgatgcggcagtgattgggtcggcgcacggcaacggtgggcagagtattgcccagcttgaacgtgaatccgtgttttacaacaaccttattaccgccgtgacgtatacctgcgggtatgtaaagcagcagggactgcagtacagcgtgccgtttatcgactgggtgcagggcgaagcggacagaaaactgccagcgggcgaatacacggcccagctgatgcagctgcgccagcatctccaggaagatatagcggccgcaaccggtgatgattatccggttccggttttgcttgaccagataagcaatgccaccgcctataacatgacggcaagcttcgtaccgctggaacagctgcagattgcgctcgaccatcccgcactgtttacctgcgccggtcccaagtactggctggaaacagtggacgacggggtgcatctcacaacggagtccagccagcgtctgggcagtctgcatgcccgtgccgccgccgcaatgctggacggcaggcagtggctcccgacgcactgtaccgctgcgaaacgccacgggcgggtcgttaccctgacgttttatacccccgtcgcgccgcttgtcctggataccggtgcagtgagcgacccgggtcagtatggcctgcgctggatcgacgacaacgccagcgccaccatcatcagcgcggtcgtcaacagcgataataccgtgacggtaacgctggatactgagcccactggcaacaatccgatgataggtatcgcagataccggcgtcagcggtgcgcacggcggcccgtttacaggcgcgcgctcaaaccttcgcgacagtgcatccggcactgatattaccggccagccgctttataactgggcatgccaccaacgcattacagtcacagaggaagaataa

SEQ ID NO: 145074 - DNA, 3093 bp, Enterobacter cloacae
gtgacgattcgcatttacccctcgaggttacccggccagccgctggagacgcaccatcatgatacgctgacgctcagcgcctggtttgagaagaacgtggagggctggacgccggatcagttgcaccctgtcgcggttgaaatcgatggcattccggtgccgccggcagaatgggggcaggtgtccatttgcgcggacagtgatatccgcatgtacccggtaccttatgggaccggtgcggaaatcgcactgtgggtggctgtcagcgtggctgtcgcgtctgcggcgtactcaatttatatgatgagcacgatgcagaccggcggcagccagcagccttctaatggtgaccagctggagcttaacccggcgaaagctaacatggcgaagccgggtgaacccatccgggagatttttggacgctataaggtctggcccgattacgtcatgcagccggtttcccggttcgattctgccgatccaaaaaaatacgttaccagcatgtttttgtgtgtgggcgtcggtgatatgaccattccgggttcgtcgctgcgcatcggttctacgccagtgtccgctttcggcgacgacgtcagttacaccgtttacccgcccggtgccactgtatccgctgacaaccggacggagaactggttcaactccggtgaggtggggaacacgacatccggcacatccggtctcgacctgggttcgacggggccgcagacggtcagtatctctgctgatgcggtgctggtgaatggcaacaccatcaccctgattgcggccagcagcagtgagggagagtccgaaatccccgcggcctgggtggcgggcacggttattaccgtcgtggcacccggctcattccgcgttgtcaattccggcgggtacagcgtcatctacggcgacctgacggagctggccccgtctgtcggcctgccggtgacggtaagctatggcgaagcagagtacgatttgtacatcgccagttatgcaccaggcgtcccggctgtaccgggtgtgggcggttcagcggccagcgttactgccagcgcagcacctgccacctatgatttcagcgccgggccggtgacattcacgatcggctggaagggacgcacctggccagtctcgttaataacgaactacgccacgatgtcgggcctggtgaacgcagtgactactcagctgaccggctccggcctggtcgcgcaggataaatcaggccggctgcagattgtggaaagcagcagcccgtttgcgggcggcagtatcacccacagttcactgcctgtcgcggcattcggtagtgatcccgcagacgtgacgggcgtggcctccagtggcggtaccgctgccgtggagcctcatattacgctggcgtacagcagcgctaccggaaaaccttttacaggcattcccgacggtatacagcgcatcggattaggttatgccggagggcagtaccggattacggccgctgatgaccagacaattaccgttgagcgcgtggctgtgacgcaggacgctgacggagaagacgtggtaaccgtggacacacggtggccgggatttactgagcggacgctgcttgatgctcaggtcacgggcgtgaacgacgattatgcctggctcggcccgttccctgcctgcccggacggcgagaccacgaccacgatcgagaacaatttcatttttcccagtggtcacatccagtacaaaaagaacggggatccgcagacgcataatgtgcatgtgctggttcagtacagaaatgccgccacggccggggcctggaaaacggtggcatacaatttcagtaataagacagcagacggccacggttacacccgccgcatcagcggcctgcccgcggcgcagtacgaggtcagggtgcggcgaacgacaaaaatcggcggcgccagaacggtaaataacgtctactggcaggcgctgcgttcccgcctggcaaagcgtcccgcccggtacaacaacgtgaccaccatcgctctgtccgtccgcacaggaaaccgcctggcggcgcagtccgatcgccgcatcagtgtaatacccacccgcatttacagcggtgggcgtacctcacgcagcatcagcggggcgttataccatgttcttgagtcgctgggattcacgaccagccagattgacagcgtcgcgatagacgcgctggaaacaatctggtggacgccgcggaatgagacgttcgactgggccacgggtgacagtaaatctgccctggaggtgctgcaaaaaatcaccggtgccggcatgggctattttttgctgtctgacgggctgatttccgctggtcgggagggcattaaaccctgggtgggcatgattacgccgcaggagacaaccgaagagctgcagacagcgttccgggcaccctcgcaggatgattacgacggcgtggacgtgacgtacatcaacgggacgacctgggcggaggaaaccgtccagtgccggctgcccggcaatcctgtgccgcagaaagttgagagctacacgctggatggcgtactggatgcagaccgcgcttaccggacaggtatgcgccggttgctgggctaccagttgcagcgcctgcagcacaccacttcaactgagatggatgcgctctgctatgagttcatggaccgtattgtgctggcagacgatatcccgggcagccagacgctgagctgcctgataaccggtatgacttacgacagcagcaatatcaccctgacccttagcgagccgcccgactggtcattcagtaacccccgcgtgattatccgtcatcaggatggccgggcctccggcatgctgacgccggttcgcattgatgacttcaccctctcggtgccgtacagcggggcgctggagccggagaactgggcaatgaacgacccgtatattgagccaccgcgcctgttgttctgttcgtctgtgcgcgtgccttatgacgcactgataggcgaaatatcccccggcagcgacggcatcagccagctgaccgcagttcagtaccatcccggcaaataccagtatgacgacgcggtgtatccgggcgatgtcgcctga

SEQ ID NO: 145075 - DNA, 381 bp, Enterobacter cloacae
atgttcaatcctgataaataccgttctgtcgagtggcagaagggcggtcgcgctttccccgcactcgactgctttggcatcgtcaatgaaatcaggcgggaccttggccaggcaccgtggcctgaattcgccggggtaacaaaggatgataacggcctcgaccgggaagcccgtagactgatggctgatctgcggcgttgcgatcctgttccgggcgcgggaattgcctgctactgcggatccgtggtgagccacgtcgctatcgtcgtagaaattgatggcatgctgcacgctgccgagtgcaatccccgcacgaatgtgacctttctgccgctggcgcggtttgcgcgccgctttgttcgcgtggagtactatcagtga

SEQ ID NO: 145076 - DNA, 489 bp, Enterobacter cloacae
atgaccagtccagttctgaacaggctttatgccagcggtggtgacgaggtcatcatcgatactctgcagatcaccgttggcggccacgattactggctgacccgcggctgggatgacattaccgtcacgctggagaatggtgctcaggcaacattccttggatctgccattgatgtggcgctgccggcgcgaaattccgacggcacccaggatctgaaatttgccatcaccaatatcgacggcgtggtttcaacggcgatacgcaatgcactcgacaatctcagcgatgctgccctgacattccgccggtatgtctcgactgacctgtccgcgcccgcgacgccgccgtttaccctggcgattaaagaagggtactggacggcgacggaggtgcagatcaccgctggctacatgaatattctcgataccgcatggccgcgctaccgctacacgctgccagacttcccgggccttcgctacctccagtag

SEQ ID NO: 145077 - DNA, 468 bp, Enterobacter cloacae
gtgcctgacattttttatccacacgattacctgccgatgccattgcaggatggttatggtttcaagcctgtcagtccgctgcagcgcaccgaaacgacatccggccgggcacgacagcgccgaaagtatacatcaacaccaactatcgccaccgtgaactggatttttacaaagcataatcaggctcagctgtttgaggcatggttccgcgatgcacttacggatggcgccgcatggtttttgatgaagctgcaaacgccgctgggctgccagcaagcctataaatgccggttcaccgacatatatgagggaccgacgctggtttcaccaaaatactggcgttacagcgcgcaactggaactatgggagcgtccgttgctaccaccggggtggggcaatttccctgagctggtggctggcagcgatattatcgatctggcgttaaacagggagtggcctgaagcatga

SEQ ID NO: 145078 - DNA, 3063 bp, Enterobacter cloacae
atgcgcgaatacgggtatagctctgatgaagtcctgaaaattaccgaggctgtttcaaccggccttaaactttcaggagcaaacacccaggaagcaagttctgttatcacacaattcagccaggcgctggcgcagggagttcttcgcggtgaagaattcaacgccgttaacgaagcaggagatcgtgtcatccgtgcacttgccgccggaatgggcgtggcccgcaaagacctgaagagcatggctgaccaggggcaacttacgattgataaggttgttcctgcattaatgagccagttgggatcattacagggtgagtttgccagcatgccgcaaacagtttccggatccctgcaaaaagtcaccaactcgttcatggcatgggttggaggtgtcaaccaggctactggtgctaccgatgcactctctggtggcctggacggagttgcccggacgcttgattcatttacctcatcggcagtaagtggcgcattgagtgatgttgccgacaatatggctacgataacaacagttgcaggtgcgcttgttggtgttggcctggcgaaatatctcagcggggtggtgaccagcgctacgagcgcaaccggcgcgctaatttctgcggctaagtcagaggttgctcttgcagttgcacaggataaggctgcacagtctgccgttgccgcctcaagggcagaagtttatcgagcccagcaagctgtgcaaaggtcgcgtagcgcagatgttcaggccgctcagcaagagaaaattgctgcggcagaagcaaaagtcactgcagcccaggccaggctgacgaccgctttaaccagcggttctgccacagagaaagtcagagccagaacagcgcttgagcgtgcgcaggcagggctggtggcagctaaaaacgccgatgcgcaggctattgctgaaagacgcctggcttctgccgaggccgccagagaccggaaccttgcaaaccgtgtaactacccaaagcaatctcaatagtgtcacatctgttggtactcgcctgatgagcggcgcacttggtctcatcggcggagttccaggcttggtaatgttaggtgttggtgcctggtatgcgatgtatcaaaaccaggagcaggcccgtcgctctgcccaggagtacgccagtcaaatcgacgaaatacgagaaaaaacttctcgcatgtctttgtctgaaacagacgacaacaggggaagaactgttggcgctctggtagaacaaaatcgcctggttggtgagcaagccaaaaaggttggtgagctgaaaattcaaatcgacggtttaaatgcatctcgcggaaagcccggcataaccagcgaaaacgatgcaaatatcctgagagccatagcgatacttacggatcagcttgccgttgaagagggaaagttaaatgacatgcgagataagtctcgcggcattcagcagactctcgaagaaatagagcgccgccgtaacgatttaatacgcgaacaagcctggcgacagaatgcagtctaccagtcgatgatcatgatgaatggtcagcatactgaatttaataaacttctggggctgggtaatcaactcctaatggcccgtcaggggttggctaacgttccactcagacttcctcaggccgatctcgacaaaaagcaaaccgatgcccttgaaaagagccgccgggatctggagttgtcacgccttaaaggtgaggccaaagaacgtttacggctgagttatgccgccgatgatctgggattaaccagtgaccctcaattccagacaggccgtcaggagttgattaataacggtcttgcggaatggcgaaataatgaggccaacaaacctcagaaaaaaatgcccaaatctgatgagcaaaagacatcggagaaactcgaggagtcttacaagcgcctcattagccagcagcaggaacagctcgcgcttgctggccagagtacggagctcgctaaaaccaaatatcaggtaacccagggtgagctgggggctttgtctgaaacgcagaagacagagcttcttcgaaattctgcggcgcttgatcatcttaacgctgtagagcggcttaaatccctgaataaggaactactggagccagaggaggcgctgctaaataccactcgtgaacgcattaaactgctgcgagaggctgcacctgcgactgaagaataccgcaagacaatggagcggatatcaaaagcatcggttcaggaagctccgaagttcggtggtattgattcatctgtcggcggtgccagcggcgaacttattcgtgtggctgatgcgcaaaaagaactggaaaagtggcataaaactcagcttgagatgcagaaagagttgctcgaccagaaggagattaatgagcaaacctacgctgaccgtgtcgctgaaattaacaagacaaatgcttcgcaattacaggatatacaggctggatacacatctgccagcctggctatgttctcagacctcgctggccagtcagcgcaactattacagagcatcgggcaggagggcagtcttgcctataagaccctttttattgccagcaaggcggcggcaatggcgcaggccgtgatcaacaccgaactggcagcaaccaaggctatggcggaaggcggcctgattatggggatcccggcggccacagcaatccgcgccgttggttacgcgtcagtggctttgatagccggacagtcgcttgccggtatggctcatgatggcattgaccgggtaccggaaacagggacctggttgttgcagaaaggagagcgagtggtaacagccagcacctctgccaagctcgatgcgaccctggagagggtgcaacaggccaggcaggcctcggctggtggaaccgttcatatccagaattcattcaccggaaaacccgatgacgcaacgctggaagctatcgaccagcgaaaccgtcaactggtgatatcgatccgtaaggaaatggcggctcaggtggtaaagccaactaatgagtttggcagggccttaaatggattttatggccggaccaggaaggagtga

SEQ ID NO: 145079 - DNA, 279 bp, Enterobacter cloacae
atgtcgcttgcgctccgcatggggcgcacgctttcagagcttcggcagaacatgacggcgagcgagcttctgatgtggattgagttcgacaggcaaagtccggttggcgatattcgcagtgacattcaggccgcccagattgtctctgccgtgtacggcgcacagggggtaaaagtgccactggacgatgcgatcctgcactggggtggtgaagaactatcagcacctgaagacccgtttgccgggcttgaggctgcacttactgccgcgacgcagtga

SEQ ID NO: 145080 - DNA, 387 bp, Enterobacter cloacae
atgtcgcaaaatctgaaaaaattagccatggcgaagatgtcaggctttcgtcataagacggtggcggttcctgagtgggaaggcgtcgaagttgttcttcgtgagccgtctggcgaagcctggctgcgctggcaggaagtggtgaaagtcggtgctgaagatgaaaatgtgtcggtatctgaaaaggcccaccgtaatctttgcgctgacgtggttctcttcattgacgtcctgtgcgacaccgataagcaaccggtattcagtgtcgatgaagaagagcaggtgcgtgaaatttacggccccgtgcattcacgtctgctgaaacaggcgctggacctcattaataacgcggaagaagcgcgggaaaagtcgcaacccccggcgtaa

SEQ ID NO: 145081 - DNA, 705 bp, Enterobacter cloacae
atgtcctcgaattatgaaaaatctcagctgacgaaaatccttatttcgtcgctgccaacgaccagagacgcaatggaagccgccgtctatctcgatctgagctgcactctcaaagaagcgcagttcaccggcgggcaaaaacaggatattgacgtcaccacgctatgctccactgagcaggagaacgtcaatggtctcccggccccttcggagatttcactgtcaggtaacttttaccgtaatgctgcgcaggatgcgttgcgtgatgcgtatgacaacgacacggtttatggcttccagatcatcttcccgtctggcaatggctttaagttccttgccgaagttcgtcagcacacctggtcttccggtactaacggcgtggtagcggcaacgttctccctgcgtctgaaagggaagccggtaccgattgacccgggacttaaactgaccactgatttgcccgccgcacaatctttagcggttggggcgccgatcagtatggcggtcgccgccgctggcggtaaacttccctacagctatgcctggaagaaaggtggtgtcaccatcagtgggcaaacatctgacacattcaataaatccagcgctgtttcgggtgatgcgggagattacacctgcgtggtcactgattcttctgtcccggttaagacaattacatcatcaacttgtatcctcaccgtcaattaa

SEQ ID NO: 145082 - DNA, 330 bp, Enterobacter cloacae
atgaccgaatctgatatctatctccgactccgtgcgctggcaggcggaaacgtttttccgtacgttgcgccgcagggtaccacggcgccgtgggtgatttatctgctcccgggttcagtcagcgaggatgttttctgcggtccggcagaaacagcaagcacggttcaggttgatgcctgggcctcgtcgattgatgacgcccgggcgctgcgtgatcaggttaaagctgctctggccgatctgcatcctgtcgggctgaacgagatcaacggctacgagcctgacaccggactttaccgggccacgcttgaagttcagatctggcaataa

SEQ ID NO: 145083 - DNA, 450 bp, Enterobacter cloacae
gtgatttcaacgagtcttgatttttccggtctggccgatatcgcgaaggatctggagacgctcagcagggctgaaaataataaggttctgcgtgatgccacgcgtgctggtgcagaagttctgcgacaggaggtagaagatcgcgcgcccgtccttaccgggaaactgaaaaaaaacgtggtggtggtgacccagaaggggcgccgtcgcggcgaaatcgcttccggcgtgcatatccggggcgttaacccggacaccggcaacagcgacaacaaaatgaaggccagcaatccgcgcaacgctttttactggcgcttcgttgaactcggtacatcgaatatgcctgcgcaccccttcgttcgcccggcattcgatacccggcaggaagaggctacgcaggcagcgctggcccgcatgaatcaggccattgatgaggtgctgtcgaaatga

SEQ ID NO: 145084 - DNA, 342 bp, Enterobacter cloacae
atgaaagcgggacgtctgcggcacagggtaacccttcagaaaccagcaaccgggcgattaccgtccggacagcctgcaaccggctgggtggatgttgcttcggttcgggcagaagtcgcggatgtatcgggccgggagatgatggacggcggcgcagagctgagcagcaccacaacccggatctggatgcgccgttatccaggcattcccgtaaccacgggatggcgagccgttcatctgccgcctaccggaggcggtgagatatatgacatcaagtcggctatctcagcagagaacggcaccaggctcgaattgctttgcgagaagggggtgaaacagtga

SEQ ID NO: 145085 - DNA, 327 bp, Enterobacter cloacae
atgctgactaaagagcaggtgaagcatcactgcaatatcgaacaggacttcacggaagacgacgcctggatcgatacgggcataaaagctgcggaacgctacgttgaaaaatggacccgccgtcggctttatgaaaaggctgatgatccgctttatatggccgatcccgacgcgctgctttatggcgaggatgtcaaaatggctatgttgatgctgattgcccactggtacaccaaccgtgaaacggtcagcaccggcagcacgacatctgcgctggctttctctactgaagcactccttcaaccctaccggatttatggcctatga

SEQ ID NO: 145086 - DNA, 186 bp, Enterobacter cloacae
atgaagctgatcgctatcaagcccatttactttgaaggtaacgtgcttaccgaaggcaccgagttcgagacgctggagcagcatggtcgcgagctggtggcacgcggttatgcctcagagcccggtgccaaaaaaccgggaccggataaagaccccgatccaaaaggaaagggcaaaagtaagtaa

SEQ ID NO: 145087 - DNA, 855 bp, Enterobacter cloacae
atgacaattaaaaaccttccgcgggcgccggaggggcgaccttttgcgcgcgaaaaacctgacctgccggcagcggcaatggagcgctggaacggcggcatccgtgctgctcgcgacggtgacaacagcatttctgtcttcgacgtgatcggcgctgattactggggggaaggcgtgacggccagccgcattgccggggcgcttcgctcccttaatggcgctgacgtgacggttaacatcaacagccccggcggcgacatgttcgaggggctggccatttacaacctgctgcgagaatacgacggcaaagtaaccgtgaaggtgctgggactggcggcgtcggcggcatcgattatcgcgatggcaggtgacgacgtgcagatcgggcgcggtgcattcctgatgatccacaactgctgggtttacgcgatgggcaaccgtcacgatctggcgcagatcgccgctgacatggagccgtttgataacgcgatgagcgatatctaccaggcgcgcagcggtcttgatgccgacactatcggcaagatgatggatggcgaaacctatataggcggcagtgacgcggtagcgaagggctttgctgacagccttctttccgctgatgaaattgccgacgacgatgacagtccggcggcggcgctgcgcaagcttgacgcgctgctggccaaaaccgatacgccacgatctgaacgtcgaaaacttcttaaagccctatccgggagcaagccaggcgctgcttctgaccaaaaaggcacgccgagcgctgccaccatcgaaaatgaaaccattgaccgactggaagccgcactcagcggcctgaaagcggctgcccagtaa

SEQ ID NO: 145088 - DNA, 1332 bp, Enterobacter cloacae
atgaagaaaaataagcagccgggcaaggtaaaaagcgccttgctcaactggctgggcgtgcccatcagcctgactaccggaacgttctggcaggagtggtacggcacgagcagcagcggcaaggtcgtcacggcagatcgggcgatccagctttcggcagtctgggcctgcgtccggcttctgagcgagtcggtgtccacgctgccacttaaaatttatgtgcgccaggctgatggctcacgcaagctggcgcagaaccatccggtttaccaggtgctttgtcgccgtcccaatctggaaatgacgccgtcgcgctttatgctcatggtggtggccagcatctgtctgcgcggtaatgcctttgtcgagaagctgtttatcggcaataagctggtgtcgctggtgccactgctgccccagaacatggtggtgaagcggcttgataccgggcggctggaatacacctacaccgaggacggcaagaaacgcgttatctccgaaaagaacctgatgcacatccgggggtttggccttgatggtgtctgcggcatgatgccaatgatgacgggtcgtgacgtgatcggtgcggcgatggccgtcgaagagtccgctgcaaagattttcgaaaatggcctgcaaagctcggggtttctttcagctgacgcggcgcttgataaggatcaaagagagcgacttcggggctatatgcaggcctttaccggctctaaaaacgccgggaaaattatggttcttgagggtgggctgaaatatcagaacgtcaccatgaacccggaagccgcgcagatgcttgagtctcggtcgttcagcatcgaggaaatctgccgctggttccgcgtgccgccgtttatggtcgggcatacctcgaagcaaagcagctgggcgtcaaccctggaaggaatgaatctccagttcctgacccacacgctgcgcccgctgctggtgaatattgagcaggagatctcccgttgtttgctgaatggtgaagaggacctctttgccgagttttcggtagaaggcctgctgcgcgccgacagtgctggccgggcggcgtactacaccagtgcgctgcagaacggctggatgtcccgtaacgacgtgcgccgcctggagaacatgccaccgattgatggcggggatatttacaccgttcagctgaatctcacgcctctcgaacaactcggcaaagacggcggaagcaacggtgaaaaggtaaggtcggcgcttgagggatggctcttcccggagcgagacaaccgcccacacaattcaactgacgcgcaggcgtcacactcccccgaaacgcaggattaa

SEQ ID NO: 145089 - DNA, 1731 bp, Enterobacter cloacae
atgacacgcaaagcctaccccaacgtgaacgccgcaaatcagtatgcccgcgacatcgtccggggaaaaactgtggcgtgccgctacgtcatcgatgcgtgccagcggcaccttgatgatctggcgaaagagaaaacgaaaaagtttctctaccggttcgataaagacctggcggaaaaggcggctaagttcatccagctcctgccgcacacgaaaggcgaatgggccttcaaacgcatgcccatcaccctggagccctggcagctgtttatcgtctgctcggcgttcggctgggtgcggaaagggacaaagctgcggcgcttccgtgaggtctacaccgagatcccgcgtaagaatggtaagtcggcgatctctgccggtgtggcactgttctgcttcacctgtgatgacgagttcggcgcggaggtttactccggcgccacgacagaaaagcaggcgtgggaagtgttccgcccggcgcgactgatgtgtaagcgcaccccggcgctttgtgacgcgtttggcgtggaggttaatgcctccaacatgaaccggccggaagatggtgcccgtcttgaaccgctgatcggcaaccctggcgatggtgcttctccgagctgcgccattgtggacgaataccacgaacacgataccgacgcgctctacaccaccatgttgacaggtatgggcgcccggcgtcagccgctgatgtgggccattaccacagcgggctacaacattgagggaccgtgctacgacaagcgccgggaagtcattgaaatgctgaatggcacggtacctaacgatgagctcttcggggtgatttacaccgttgatgagggtgatgactggaccgatccggcggtgctgcgcaaggcgaaccccaacatgggtatttcggtctatagcgatttcctgctgagccagcagaaacgggccatgaacaatgcccgccaggccaacgtcttcaaaaccaagcacctgaacatctgggtatcagcccgggcggcttatttcaacctggtcagctggcgcaactgcgaggatgagacgctgacgatcgagcagttcgagggccagccttgctatctctcgttcgacctggcgcgaaagctcgacatgaacagcatggtgcggatcttcacccgtgatattgatggcaggaggcactattactgtatagcgcctaagttctgggtgccctatgacacggtatacagcaccgacaccgatcatcagcgtactgctgaacgcttccagaagtgggtgaactccggccacctggaggtaactgaaggtgcagagatcgactaccgcgtcatcctggaggaagcgaaggcggtaaaccgacagaacccggtagaggaatctgccatcgaccctcacggcgccactaacctgtcccaccatctggccgatgaggggctcagcccgataaccatcgtccagaactacaccaatatgtcggatccgatgaaagagcttgaggcggcgatagaggccggacgcttccaccatgacggccatcccatactgacatggtgtatctctaacgtggtgggcaagcacctccccggtaacgatgacgtggtgcggcccattaaagagcacagcgagaacaaaatcgacggggccactgccctgatcatggatataggccgggccatgctgccagagacccgacaggatcttaacggcttctttgaaaatcccatcatggtaggtttctga

SEQ ID NO: 145090 - DNA, 471 bp, Enterobacter cloacae
atggctggagcgacgggccgatccggacgccgcgccaagccgactgcccggaagttgctggcaggtaatccgggtaagcgcgccctcaataaagaagaaccctccttcacacccataaccggcgttgacccgcccgagtggctcagcgaatccgctgcgacaatgtggagaatggtctccaatgagctgtgcgcgcaggaggttttgtgcgccacggatttacacaacctcgaaatgttttgtgtggcctatgccaacgcccgcgctgcgcaggtggacgttgctaaaaacggaatcaccgtaaccggcgcaatgggcggtgtgatcaaaaacccggcgctgaccgtgctgaatgaagcaatgcggcagatggcctccttcggcggcatgctcgggctggaccccagcagcaggcagcgcctgattggggctaataaaaaacagtcggataatccctttaaaaatctatga

SEQ ID NO: 145091 - DNA, 201 bp, Enterobacter cloacae
atgagctatgcgcgttgcacctactgcggctcgacgctgcacaccgtagcgaattgcccaaagacatggggaggctcagcccgccgtgcgaacctgcgctgcggttactgcggtcagtcaggccataactccagcgcctgcccgcacaatgccagcagcgcgcggcgccgcaacctcagcgatgacttccatctcgactga

SEQ ID NO: 145092 - DNA, 351 bp, Enterobacter cloacae
atgccagcagctatccctcgagcctgccgtaagcgtggatgttccggcaccaccacagaccgttccggctactgcgaaacccaccgtaatgaaggatggcagcagcatcagcgcggactgagccgccaccagcgtggctacggcagtaagtgggacatcatccgcgcccgcatccttaagcgtgatcgacacatctgccagcagtgcctgcgcaacggcaggccacgccctgcggaaacggtcgaccacatcatcccgaaagctcacggcggcacagacgaagacagcaatctcgaatcgctgtgctggccatgccataagcgcaagaccgcgacggagagaacccgatga

SEQ ID NO: 145093 - DNA, 285 bp, Enterobacter cloacae
atgagcgaagcaaaaccgcaggacggcagcactgttaagggataccgcaccctgaccgccgacgatatcgcgcaaatgaatgatctgaaagatattagccgtactttttgcgaaaatctcgacattgaacgcacgcacctctctctgaatgttgtagagagtggtagtcaggctgaaacagagcgtgcagaagctctgcgttgcctggctatcgcccgcaccaaaatgcaggaagcctgcatgtgggcctgccgtgcagtggcccgtcctgacgctgattgctaa

SEQ ID NO: 145094 - DNA, 366 bp, Enterobacter cloacae
atgacctttagccttcggacacttctgctactcgctctcgcggtgatcttgcttggtattggctatggcgagctacgttaccgcaatggctggtacgcccacgccgaccacatcaacgctctggccgccggtaagcgcgccaaagctgagaaggccattcagtctgttgagcagaaggcagcgcaggccagcgacgaaggccggataatctaccgaaccataacccgtgacgtggtgaaatatgtccaggatcctaatcgtaccgtttgtgtttttgacgatgagtctgtccggttgcgtcagcgtgctatcgacgctgccaactccatcagcggatttgatgcagcccccgtgcagggcaagtga

SEQ ID NO: 145095 - DNA, 504 bp, Enterobacter cloacae
atgccactgaccagcagcctgcgtaacaaattgatcgccgctgcaggtggcggcgccatgcttattgccaccatcttccttggcgggcgcgacggtgtggaaggaagaaagtacgaagcttataaggatgttgccggagtctggactgtatgcgacgggcatacgggccgcgacattgtacacggcaagaaatacaccgatcgcgaatgtgaccagttgctgtggaaagacctgcagcctgccaaaaaaacggtagatagcctggtcaaagtgccgctgaacgagtaccagcgtgccgcgctctacagcttcgttttcaacgttggatctgacgctttcgctaaatcaactctacttcgcaaactgaaccgtggtgaccaggaaggagcatgcgaagagatgcgccgctgggtttacgctggtggtatgcgctggaaagggctgcagaaccggcgcgaaatggaacgtagcttgtgccttgcggagagcaaacatgacctttag

SEQ ID NO: 145096 - DNA, 240 bp, Enterobacter cloacae
atgtcccatatgagcaaactcgtaaccggtgtcgcgctcggcacttccggcggcaccatcctgaacggtgttctgacaaaactgagccctgatgaatggagtgccgtcggtgtgctggctggtatcgcgggcattatcataaccgggcttattaactggtacttcaaacgcaaggtcgccaatgcgcaggttaaggcgctggagaagtacggcccggccgtaaaaggtggagatgactga

SEQ ID NO: 145097 - DNA, 312 bp, Enterobacter cloacae
atgaatcgtgctcatgaaattctctggccccgaccgtcggtaagcgtaattgatgaggcaattcgcaaggatgacaccgactttatagagcaaagcgtcttgctggcgctggatttaaatgacccggtctatctggtgggtctccagtattacactacacgaaaaaaaatctcagatatcacccgtgagctgcaggtcattgcgccgtggcttactgcagatgaggccagaaaacgtgtccgctggtgtctggaaatattcagggcaaaggtatttctgtctgcccgaaaacttctgctagaaaatgaatga

SEQ ID NO: 145098 - DNA, 1029 bp, Enterobacter cloacae
atgacacgcgcgctgctgaaaccggacattgcccgcgaaatgggggtagtactgctgcgtccaggccgcgaactgatgcacattttcaccaacggccgcgtgctggtggagagtcagcctgccaatatggctgaattgccatctggtctggtaccgccagcgcatcagtccctgggtaatgattcagcactgtcgccgttcttcacccaccagcaggtcatcaatgctgccgggggtatcaatgggcttgaatactggctgcgccgccggggtggagcctgccagtggccgcactcgaattatcaccacaccgagttggtaacacatcgtcacgctggcagcgccgcgctgctttgttggcattgcgacaaccagctgcgagaggccagtccccgaagtctggatcaaatcgtagcggagaacgccgcaacctggattttgcgcgctattcgcggtgagctgcactttgccgacgatcacgaagtaactctgccagaactttgctggtgggcggttcgccgggaagtcgttggcgccatgccggaaggcgtagcccgccgggcgttgggatggcccgttgatgaactgccgtctgtcatgcgtgaatccgatattgtcccatcgctaccggccgccagcgtattggcggagaaagtgaaaaaggcggcgctgccccaaccaccagccaagaagtcgattgtttctgtcgtggttgatcctgtcgcgccgcagacgctttatgcacggccaaaacgcatacgttgggaaaatccaaaattcctcgcatgggtgaagacccaaccgtgcacctgctgcggtgctcctgccgatgatgctcaccatctgattggctgggggcaggggggcatggcaactaaagcacatgacgcgttcacaatcccgctctgtagaaaacatcataccgagttgcacaacggacctgctgcgtttgagcagcagcacggcacgcagccggagctcattatcaaattgctggaccgtgcctttgcgctcggcgttctggcgtaa

SEQ ID NO: 145099 - DNA, 360 bp, Enterobacter cloacae
atggagaaaatttacccaatcttgccaatgggcaaacccagacaaacccgcgccgataagtggaaacagcgccccgcggttatgcgttaccgggcgttctgcgatgaggtgagattgcatggcgttaatctgcctgaatctggtgcacatgtgatattcgtcctgcccatgcctgcaagctggagcaaaaagaaacgtcaggagcataacgggaagcctcaccaacaaaagccggactgggacaacatggctaaagcactgcaggacgccatttatcatgatgacgccagagtgtggaattgccaggtgaccaagttgtggggcgacgtcgggcaaataattatccgggagacggcatga

SEQ ID NO: 145100 - DNA, 201 bp, Enterobacter cloacae
atgaaaaaaggctggttcacgcataccgacctcactgccgaacaagccaccgagctggtggctcgctatacggcaaagcacgtcaaaaccgaaaaaagccttgctcctgactataatagctggattgtcagcgcccgcttgcctgagtcgaacaagccgccgcgcactgataaaacctaccagtggaggcactgggagtga

SEQ ID NO: 145101 - DNA, 303 bp, Enterobacter cloacae
gtgttttatgcgccatggtattcctccgtggcgcagcagactgccagttgttcaggctggctatgtgactatatcagaatgtgggacgggcgtgtaaccagctcgttcgagcatttgcataaacatgttgggagtgccgattatttcgccaggcagcataggcctgaaactgaatttatccccctgccgatacagcagcgctttacagcgggcgggcatgtcgaacgtcagcaccactacgccgtcatcgcggcgaaccagatcatacctggtcaaatcatcactatccacactatccactaa

SEQ ID NO: 145102 - DNA, 999 bp, Enterobacter cloacae
atgcctggttggggtgacatattaaatgaaatacaagcaatgtcagcaaagcgcggtgacgcttgtgatgttgttcgtaaacagtaccttgtgaagttgcatcaaaaaacgaaccgagctgtaatttcatattcatcatcatgggtacaaccttcgcagggcgtagatccattcgtactctcactgaacatcgctgatgtgcaaggattaatggaggtgatgaagggggtcaatgaagatgcagtggatttgattatacatagtccgggaggagcgttagacgcgactgaaccgtttgtaacctatatccgctcgaaatttaaacatgtgagggctattatccctcatgctgcaatgtctgccgcgactatgatttcatgcgctgcagacgaaatcgtaatgggcaagcattcatttttgggaccaattgatccgcaacttggaatccaaactgctgtaggtccaagaatggtagcggcgcaagcaatcctggaacaattcaagcttgcccaagatgaaatagcgcaagatcaggcaaaacttgcatcatggatgactatgcttaatcaatatggccctgatttattgatttcatgtaaaaatgcatcagaattgtcaaaggaactcgtccagtcttggctggaaaagtacatgttccgggatgataaacctactgcgcaaaggatagctagctggttgtccactcattcgaatttcaagacacatagccgctacttgagccgagatgtgctggaaggtcaggggttgaaaatatctaagctcgaagatgatcaggaactacaggatttagttttgtctatacaccacgctacaacgattactttttcagctactcccgcagcaaaaattattgaaaaccacatgggccgcgcgtttattaatcaggccaacatgtcccaaatgcacatgatgaatatgcctgcaatggtactgcaagggcatatgcctcaaccattgccaattactggtccgcagtag

SEQ ID NO: 145103 - DNA, 747 bp, Enterobacter cloacae
atgactgagcaaaccattctcgacatgtgctgcggcagccgtatgttctggttcgataagcaggatgaacgagccgtgttcagcgacattcgcgccgaggaacacaccctctgtgacggacgccatctggtaatcagtccggatgtgatcgccgacttccgtgcgctgccgttcgctgacaacactttccctttggtggtgttcgacccgccacatcttgaacgtgttggggacgatgcctggatggggaagaaatacgggaggctgaacaaggacacatggcgcgatgacctgcgcgccgggttcgctgaggcgttccgggtcttgcggccacacggcgttctcatcttcaaatggaacgaaacgcagatcccggttagtcacgttctggcactgacagacgtaaagccaatcataggtcagcgcaccggtaagaacgataagacccactggatttctttcgtcaaagacggtgcgcagcagcaaaaatctgaccctcaattgcgttacgcaacaaagcggatcgtcgaactggaatgcctgctgctggtggaagttcccgagactgtctggcctgccgaggttgtgctggtctactcacaagttgaaaacgccggggatctcccggcgcttcaccagcgccgcctgaagcatcacatcaaccgcatgtggctggagaaaatgccggtaccgaccatcgtgaccgcggcccggtcgttggctgccgctatggaggaatacgcgtga

SEQ ID NO: 145104 - DNA, 261 bp, Enterobacter cloacae
atgagcacatatggcgattacctccacgccgatagcgggctcaccttcggtgaatggttggttggcgagcgcttaccggagttcgaacatagagagacggggtttctgtctggtaaatacgaataccgcatgtttcggcgagtaacgcgctggtttggtgctgagcgtgatgttcaaggagagtggtgcccgacgatgaaagcagcaaaggccagctacaaatcggcgttgcgtaagtcaaaacaggagagcgcagcatga

SEQ ID NO: 145105 - DNA, 471 bp, Enterobacter cloacae
atgaccaatacaaacaaaaaccttgtcagagtgggccacgaattagcggcaaccatgacggctgacacgccaattatcgaaatagcaaaactggtaacacgcctggctacggccctggatgtgcaaaccgcgctggtagctcaactgactgagcagcgcgacgcagtggtggcggataatgccggattgaaatcagcactcaccgcgattttacaaccgggagaggcgacgctttctcgcgaacatcgagcggctgcagttacggcaatcgaaaccccggcaacatccgccatcctcaattccctgcgagcagaaggggtggagatgtttgccgccgaaatgtctgcccagcatcaaaaattacagtctggagggtatttcgacaggcaggttgttatctacgctaagttgtctgaaccttcgtcttcattcgcccgccagcttcgcgagagcaaaggagcgcagaaatga

SEQ ID NO: 145106 - DNA, 489 bp, Enterobacter cloacae
atgtggatagcgcagatcggctcaatgactgagaagcaaatcacccaggtatgcaatcagtgcatggagcgttgtgccgctggcaacacatggccgccagatctcgctgagtttgtctcgctcgtttcagagagcggtgccaaccatttcggcctgacctcagatgctgtgatggctgaatacaagcgctggcgtaacgagtcataccgctattccggcagcgataaatatccatggcctcagcccgtgatgtaccacatctgcattgaaatgcgccgcactggcgtggaacggcggatgactgaaaacgagctgcagcgcctggcagaaaagttactgaccaaatggaccaagcacgttcaaaacggattttccattcctccagtgctgcgtcagctggccgggccaaaagcaccggctgggccaactccggcgcaactgctgatggaagagtaccgccgtcgcaaagcggcaggcttaatcaactaa

SEQ ID NO: 145107 - DNA, 1005 bp, Enterobacter cloacae
atgagcattgatgcaatgcgatgggccaaaaaagttaagacgggcagatcatcagccaaagctgttttgacctggcttgccgatatgtgcggggcagatctctgtgctttcccgtccatcccggcactggcggaagccacagagctggataagaaaacggttcagtcgagcctgcaatatctcgtttccatagggctgattgaggataccggagagcggcgtggcaggacgaaacaaatacccgtttatcgcttgattggcgttgaagaaagcatcgcggaaaccgaacacacccaaaaacgggaacattaccaaaaacgggatcgtttaaacgcacccgaaaacggacttgtttcaggaaagccacccgaaaacgggtgcgttaaaaaagaccaaacgatcccgttttttccgtcaaacgatcccaaaaacgggatccggaatctaccagaggaacctaaagaactaaaccccacacatagcgatctggtcgaaccagttttaccggactacccgaatcagcctgggacaagttttgggactccccagccattcggaaaatttcccatctgccagggctgggaaccatcgccggattttaaccgtctggccacgctctggggaatgcctgtgaagtcggggataaacctgcctgcagagctgagcagtttcatcgcctactggcaggcggaaggaaaagtttttcatcaggtgcaatgggagcaaaaatttgcccgccatctgagccgggcatccagtcagtcaacgccagcaagcggaggtagtgaccatgcgagaacacaaacagagtcaacagcatccagagctgttcagcagatacgaaacgcccgggagcggtgggagcgagagaacggacttgcaggcgacgcggacggcatggcgcctgtgggaagtcatgggggaggtattttcgaaccgctggacgcagaaaaacgggacggaaccttcggctatgtggatagcgcagatcggctcaatgactga

SEQ ID NO: 145108 - DNA, 555 bp, Enterobacter cloacae
atgcaaacgatcgctataacccatcctaatcaatgtgccaccgtttcgctgaaatcgaaaaatcagattggaccgcgtcgccgggacaacctgaaacgactggctatcaataccgccgtcagcgaatgggaaaaaacgttaccgggtcaggctcaggaacagatagcgcggctggtggcggaagaatggaaacggactggcggcaaggggatcacagtcaacaagctgaacttgttccgctacctgcgcaacgaaaacggatccgaaaaatacaaccgttacgtcatgcaattggccccggcgatttctgccgttctgcccatcgaaatagcgcgcgccaatggtctgcgttccggcaagaccgaagccgagctggtggcgagcgccatcaaagaatgcggcgaagcgcaccaggctaagctgctgggtgcgcccctgcaacgtctggaaaaagagatttgggaggcggccacgtcgctttacgcgatgctcccgaaagaggtttcagagccagcgctggcgctgctcagcactctggcgccgcagtgtttttaa

SEQ ID NO: 145109 - DNA, 213 bp, Enterobacter cloacae
atgaacaatattgccaaagagcgccaggcactcggactaacccaggagcagttggccaagctgtttggttggcgtcaatccagaatatccaattacgaaaatggtactcggaatcctggattaccagagtgccgtatgatcgttcagaagctaaatgagctcggtcgttcttgcactttagacagcgtatttccacccatcagcgggggttag

SEQ ID NO: 145110 - DNA, 381 bp, Enterobacter cloacae
atgaacataaacacctcaatagccgcaaggctgaaacagatccgcgagcaaaaagggatctcgcaagcgaagctcgctgaactatgtgggtgggtgcagtcgcgcattggcaactatgaggcgggccgccgcaacataggcgttgacgacgcaatgacgatttcagatgctttaggtattaatccgtccgttcttatttttggaaatgaccatgctgatacctggttaactcccaagcatcaaaagctgattgcgctctttgaccagttgccagaagcagaacaggaccgaatgattgacacattccagatacgcttaaaagaaattgatgagtacgtcgaaaagtatctgcgtgggcgcttcaaagctggcgacgaatag

SEQ ID NO: 145111 - DNA, 123 bp, Enterobacter cloacae
atgacagatttcgcacgtgtggcttcagggcagcaagcggtccgcctccactggttcaccgcattgatccgcaagttctgctatttcctggcccagaaaggaaacccggagatcaacgcttga

SEQ ID NO: 145112 - DNA, 294 bp, Enterobacter cloacae
atgtcagcaaacgaattagctctgcgctacagcaccgcccccgcagagcagctcatcggcatattgccggtgcgcgaagtgaaagaagccctctggcatgaagtcgaagatgaggtgctggatgaagtatttcatgaacatgagttcgagttggaagccgtagcagtagtagctgaatcattcggcaccgctatcaagctggctatgaaacagccaccagcagaagcgatgcaaacactgagaatggttatcgaaaataaccctggctacggtcaggaaccggttgaaggataa

SEQ ID NO: 145113 - DNA, 351 bp, Enterobacter cloacae
atggaatttggaatgaaacgtatcattgcctcagtccgcgtcgtcgctgcaatgaaaaagctttataccggctcaccagtcaccgttgcgaccatcagtcgcgaattgaagctgtccccttcatacgtcgagcagatcgtttcaaagcttggcaagtccaaaattgtacgcggtcaaaaaggtccgggcggcggttatcacctctgcaaacccgagtccgaaaccagcgttgccgaagtgatccgcgctgtaaccctgattccgcccagcagtattttcgatccggttctggttgcgctagacaatgttctggtctcgcagctgtccgaagcaaaaatcagtaccccataa

SEQ ID NO: 145114 - DNA, 2883 bp, Enterobacter cloacae
atgcagacatacgcgtttttgattaaagcgaaagccaaagcgactgacgccaaacaccttttttgctggttatctgccaaatcagattcccgcgccgagcgcgaaatagccaatattctcgaagatgccgacatcgaaaccggacgcggtgcaccttacctgcagccggttcgaactgactggtttgttgtggacgacttgccagaagaaggcgtgctggatactacctggtgcgaccgctacgaactcaacgaagatggccgttcgtggaagcggatacccgcgccagcatcagcgccggaaccggaagtagccaacagcccgacaacgcccaaattagcaccagtcgccaaagggagcctggcatcgacaaatgacgaagcgaatgtttcggtggaaaaccgcggccttgctgttcgcgtcgccattcatctgctgaacgataaataccagacccatatcagcaatgagcaaatgattgctgccatgaccatgtccatggacgatgaaaatagctatatgcagaacctgctgcaggccaaaaataatgttcctgatatgagcgaactcagccttcacgctgaatggaaactggtgcaggccgtcaaatccgttttcccgcaggacaaagaacacgatcccgcgttgctggctgaattcatgtcgacctgggttaatgcagaagccgacgcccgtaaccagctggtcgaggaatggctcagcggaaagctgccagcaaaaaccgtaagcgcaaaagtaactggtgatgcgaatagtgctgcccgggatgagcatggcctgataattagtgagaacgacgacgaaaaaacgttttacccgatttgcagtctgcctttccgcaaacagttgctgtctcaatttaccgcggacaaactccgccaccacatcacccgcgcagagcatgctgagattgccgcgctggaaatggatacggataacagctacgtccagaacctgctgctggcggcagaaaactgcgaagaagttaagggttacgaccttaaagacctctggcgctataccgatgccattcgcaaagttttcagccaggacaaacgtcacgagctcgctttagttctccgtttcaccagaatgtgggcggcgactgattatattgaccgcggcatcctgacgcgcgaatgggccgccggcaaccgtaccagcaacgtgcagcgcactgatggaggtgctaatgccgatggcgggtacgtaaccgaccgcggcgctggcacacatcacaccctggataccctcgatctggagatcgcctgtgccctgttgcccatggatttcaaccatctggaaatcccgggcagcatccttcgccgcgcgaaagagattgtcgagaaaaaagaggagccatggaaatcgtggagcaaaattctgcgcaaccagcccggcgttctggcggttaaccgcgccgctattttcaatctggtgcgcatcgcaccggaaaatatccacctgacgcctgttgctcacctcgagttcgttaaccagaccatgacagctgagtttaacgctgccgttgagttgctaacgctgcctgcgccagctgctgaacctgagatgccggaagaacagccgggcgtcggtggaaataccgatcgcaatcctgactacaaacacgattttgacggtctcgatactgaaattgcactggcaacactgtcaacggatttcaatatttatgacatcccaacagatgcttacagccgagcaaaagatatcgtcgcagctaaagacagtccgtttaaagaatggtcagctgcgctgcgtaaggttcctggcattctggactattcacgcgctgccattttcgcgcttatcaggagcgctcacccagcgtattacctgaatccagctcgtcttgccggatacatcaacgcgaacctgagcgaaactgaccacgaaaatcctacagcggaaacgctggcggcggcacgccacaccccagaggtcaattgggacagcgaagttaacgagcagattgaagcggaaaaatcagctttaggtgaccagccgcaggttgctaacctcggcggcggcatgttctccatcgataacctgatgggacagcaatccgccaccagcacagccacacaacaaaacgaggctaccgataatgtgccgatggaagaaactggccgtgatgaaacccagactggtgctgcggtactgccgggcgaggcaacaaatgtgtcagatgagagcagtgctacaactggttcacaaaaacttgccatagaaaacaatattgataccgggcatcaaataggcgatgacgattcataccccctgatgacacatgttatggctgaccttgaaaccatgggaaacaatccagaagcaccgattatcgccattggtgcagtgtttttcgacccggaaacaggcaaaacgggtgaggagttctatcaggttgtcagcctcgaatccgcaatggagttcggtgctaaacctgacgctgcaacgataatttggtggatgaaacagtcatcagaagcgcgtgcggcgattactggcggtgatgctatttcgctgatggaggccattgacaacctggacgaatttattcactcgaattccgccagcggcatcaagaatgttcagctctggggtaatggcagttccttcgacaatgtcattttgcgccgggcatacggacaggttggcgctgacctgtccgtgccgttctggaatgaccgcgacgtgcgcaccattgtcgaactgggcaaggctgtcggtatggacccgcgtcaccaaatcccattcgagggcgacatgcataacgcgctggccgacgcccgccaccaggtcaaatacgtttcggctatctggcagcgtctgacagcaatctga

SEQ ID NO: 145115 - DNA, 246 bp, Enterobacter cloacae
atgatccagatgttaactctcgaagaatgggccgctgaaaaatacagaagcaaccctccaagcgtgtcaacacttcgacgatatgcgaaacagaatcagttctctcctccagcaatgaagcagggccgcttatggcgcgttcgtgaggatgctgagcttgtgggagaactggccgcaccggttgttaagaagaacgactccatattgctgcaaaggattttgaacgatggcggccagaccacgtaa

SEQ ID NO: 145116 - DNA, 1128 bp, Enterobacter cloacae
atggcggccagaccacgtaaaaacaatgtctctgttccgaacctttaccctctctatagtaggaaggtgaataaggtttactggcgctataagcatccagttacaggtaagttccacgcgcttggcactgatgaggcagaagctattgcgattgctattgaagctaacgagcgcctggcggaacaacggacccgtcaaatcctcgctatcagcgacaggattgccaccagcaaaggaaaagcgatcacggtatcaacatggctcgatcggtactggaaaattcaggaagagcggctggcttcaggagatatcaaattaaacacattcaaacagaaacataagccagtttctttattgcgcgaacgcgctggtatgaaactgctgccatcagttgacgttcgcgatattgcccagattctggatgagtatattgccgcaggccaatcaaggatggctcaggtaattagaaccgttctggttgatatattcaaagaggcgcaacatgcaggtgaagttccccctggttacgatcctgcgtcagctactaaaaagcccaggcgtaagatcacccggcagcgacttagccttaaggaatggcagcggatattcgagattgcagacgccaaccaccaatatatgggtaacgctatgttgctggctttggtaaccggccaacgcctgggtgatatttcgaggatgaagtttagcgatgtctgggatgatcagctgcacattattcaggagaaaacaggaagcaaaatcgcgatcccgttatcgctccgtctgaacgcgattaactggagtttgcgggacgttatatcgcgctgtcgggattacgcgtttagcccttacctcgtccattttttcagggccacgtcgcaagcagagcgtggtgcccaggttaaagcgaacacgctcaccatgaattttagtaaggctcgggataaggcaggaatcgactggaggcaaggaacgccggcgactttccatgaacagcgatcgctatcagagcgtctgtataaggaacagggaattgacactaaaaagttgctcggccacaagtctcagcagcagaccgatcgctacaacgacgatcgcgggaaggactggacgacgattgcaatatag

SEQ ID NO: 145117 - DNA, 540 bp, Enterobacter cloacae
atgcaaattgatctaactaaatgggtatccaaaagaagtttaccctctaaagaaaagatctttctcgagggcatttatgatagtaaagattgggaacagttacgacgtgaggtaaagaatcagacgacgttaatcacaccagaattgcgagaggctttccatctactatggattgagaaggggcattttattaggcagcaccttggttgtgatgatgttgtacttgatatccttcgtacttttttgccgccatacactggggatgggcaatatttgtttcgcggtgaaaatgttgaccgattcaagtgctcaacaatcggtttttgctggacacaatgtgagaaaaaggcccgtcaatttgccagtggattaaacgcctgcggtagcggaggcctgctattgaaagcatgggttccggcaacatcaattcttgcagatgtgcacccacatagtatttatctcggagagtatgaagttactgtagatagtgcgggtgttgaacagcttgaagtcatagaacaatacccgccatcacattag

SEQ ID NO: 145118 - DNA, 351 bp, Enterobacter cloacae
atgacaaatcaggcgcagatatggccagagggagagacattcacccgcgaagttctcattcctacaaaatacgagccgttgccggtggaaatcacttacattgttccagcattcgaagtggttgtggataattgtcataacaaagacccggcgaaaggctacgctctgtttcgccagtttatagttgactgggatcagcaggataagctgacagatgatgtgctgatgtcatttctgttggcttaccccggtactgatgaggcaattttagctggatggtgcgagcacatgaaaaaggtgttggcgaccaataaaaaacagttctctacattgagccagacgattaattga

SEQ ID NO: 145119 - DNA, 786 bp, Enterobacter cloacae
atgactacagcttttgggaaaacatgtagcttttgggcggttgactctcgttggtcatacaagctggataacacaccagatgacactcatcccacgcaaaaatttgttgttgcagactctgagataacaatttttgctggtgatgaaaacccgattctggtagaacaggcagtgatccttgagctcattacccatgagcaatactttcagctgatagccaatctgaccggtgaatcgctagaatccattactgtttctgaggctgatggttcgatcatagatttcagtggcagccatttttatggtgaagagaagcaacagccgcaaaagcaaacgcatttacattacattgggagtggaggatcacatgcttgtgattatttctactactcttgtaagaagaaaaaatttttgagctctcaaggttgtaacgtacttggcgcgatgagttacgcttcgtacaaagatagagctactggtggtgcaaccaaagttaagatttggactccatcgaataactacgggaacgtcgagcggtacgatcaaatcgctaccggcgacatacccgcatatcattcatacgtttctgaaaaggtacatagcatgcttactcagctcaatcatcagaatgatttgcagttgagcgctgacagctccattccaagtgctcgctgctcttcaagcacgcaagaaaacgggaatcttcgtaaagtttctttcgcatctgctgttcgtcgacagcaaaaccgcgatgagcgtaagcgagcgcgtgctgaagaacgttga

SEQ ID NO: 145120 - DNA, 237 bp, Enterobacter cloacae
atgcctattacgattcgtgaaataaaggaacattacgattattatgggcttcatgatatgagctctatgtcaacggcagagtaccaacagatactagctaatggtgccctgttctggatagaccatcatggttttttgaggagtacgttttctgatgagatcttagcgactaatcgtgtacagtttgatgttcttctcagccatctgcaagagttgaggggcaaggttgactcctaa

SEQ ID NO: 145121 - DNA, 630 bp, Enterobacter cloacae
atgctcaagctcgaagagatcaagaaagatgctcaggtccgcggcattgtcgaagggcaagtggttcgcgtggtgacagtggagcagatcggtgagcacgctctgactgtttactacaaagacagtaagggcgtattggcagaacgcatgttgtttcgaagtgatgagatggcgcttgagctcgcgacagtgggccgagcatgggcttttgatgctgacggaggcgatttcaaactggggctggaagcatatcggatatcacaggcagctctgtttgatccgatgatggctgtcaacatggccaatgttgaccccttgccgcaccaaatttcagctgtttacgaatatatgctacctaagcagccgctgcgctatgtcttggccgatgatcctggcgcgggcaaaacgattatggctggcttgttcatttctgagctgctgctgcgagctgatgccagacggattatggtggtatcgcctggctcactgaccgaacaatggcaagacgaactatttgaaaagtttggcctgcaatttgaaatcttcagcaaagaaaagcaggagcagtgtgcaacgggcaatttttttaccgaaaccgatcgcctgatttgccgtctggatcagcggtaa

SEQ ID NO: 145122 - DNA, 240 bp, Enterobacter cloacae
gtgtctgaacaagagatctatcagcagatcaagcatgccttgtcagttgcacctcgcaaccaatatacagtcgagctacatctgcaaatgctcaaatatgcagatgagcttaaacacgtgacttcgcgggagttttgtgaaggggttgggctcaaagagagccttggtaccgaattcagcaagatgcgtaatctgactactcgactaaagcttgctgggctcgatacctacaagctctaa

SEQ ID NO: 145123 - DNA, 291 bp, Enterobacter cloacae
atgaccagaacatcaggaaacaccgacaacgcaggcgttatctctgcgttgatccgggcagaaacgctgattttatttctgtcagcacagggagttcaggtgaaaagtgtatccctgcgcaacacacagcctgtcattcgtatcgtgcgccatgcatggtgcgagcggatgaaaaaagagggtctggctcggtttgatatcacaggcaatgaccgccacgggcgctttcgccagggcgtttatcaggatgaaagcggatgtcgggtggtctggtctgaatcacttcattaa

SEQ ID NO: 145124 - DNA, 222 bp, Enterobacter cloacae
atgccgcgcatcgtggctggggtgttccagatgaaagctaaagaattcaatgccctttaccctaaaggcagttcatttatctatcagccagccacaggtttacgcggtggccgtgtagtcagaacggtagatgtggcaaatgacctttataaggtcacggtcgtggaaataaatcaggagccttatttcgcgaatattaaatcgctgaaacccgtgaactga

SEQ ID NO: 145125 - DNA, 534 bp, Enterobacter cloacae
atggaaaataaagagaaatatatccagagaattaaaaagctgctcgcgatggcgcgtaataactccagcgccgaagaagccgcacttgccctccgccgcgctcagcgtctgatggaaacccacaagctgactgaggctgatgctgatttgatggatatcaatgaagcttctacccagaaggccccctctcatgctgagaagatgccggaatatatggcaatactggcagagatggtcgcccgcgtttttggtgtgaagttttataccagccatggcactgagcagtggggcaagccagcaaaacgcaccatgcactattacggccccgacgaacgccctcagatagcggctattcattcgaagttctgggtaagcaactggcgaaagcccgccgtgattacctctccacattacgcaagaacatcaaacaggccaccaaagttgcccgcgcagatatcttctgctccgcctgggtcaacggtgcttatgccgttgtcagtgatttcgccgtcacggatgcggagacaacgctga

SEQ ID NO: 145126 - DNA, 261 bp, Enterobacter cloacae
atgacgatcaccgaaattctgaataccggactcgccttcacgggttggctattcatcatggttcagaccggtaagtggtttacctctgctgttctgaaatcgtgggataaacaccgcaagtcatcacgtcgtcagaaggctattgatgagttatacgacgctttcgaactgcagagcattgagcctggtacaaccgttcgtcttgccacaaagggcgctctgacaatcatgatgtttcgctctgaggaggctgccaaatga

SEQ ID NO: 145127 - DNA, 171 bp, Enterobacter cloacae
atgacaaaccgcaaagcaagaagactgctgcgcatgcctttcaaattcagtaaccgtaaagcgatgacaggatggccggcaacgataccccagcctggcaacgagtggtgcgacaagaagaaacgcagcgctgcacagaaccgctggaaaaatcatgtgaggtatctctga

SEQ ID NO: 145128 - DNA, 480 bp, Enterobacter cloacae
atgaaatatttgattgctgccggttttattttaattagctttaacagcatggctaacaacgaccaattaaaaaaaccaaatattcctgagcaagcacaggaatcgattaagactgagaatgatttcattaacgcggcgattaaagatggctatcagacacagaggaatttagcttttgcatatcagacaggcagttctaaaacgggcggatttgatttcataaagaaggacgaaacaaaatcttgcgcgtggaggaaaattttattggtttccaatcctgataaaatgaactcaacagaccctatgaatgagaggcaatcatgccgtaatcttgactttaaacaagatgaagaggtatggaaaattgtctatagatatcttccattgattgatgaagccaaagcaaagggtgaatacatggtgaaaaaagatgttgaaccagaatcgaatgaacccataataatagatgtgacggaataa

SEQ ID NO: 145129 - DNA, 207 bp, Enterobacter cloacae
atggctgaccagttaatccgggttaacagtgaaaactatgtgatggccagtgacgtgctgggcgtccggttcgcgggcggcaaaaacgtaaccgtcgcgacgtcgacaggctgctacagcctcgatgttgaacgagataaaaccggcatcgagtcgatgaaccgcttcatcagcgaggttaataaagccctccgcaatcaccattaa

SEQ ID NO: 145130 - DNA, 135 bp, Enterobacter cloacae
atgacccgaacggaactcgacggctacaccgaagcgcttgcccggttacatggaaagaaaaccgggcaaaccaccacccgcacaacccgcactgtcaaatcgcaacgccggaagaaagtcggcaaacggagatag

SEQ ID NO: 145131 - DNA, 2157 bp, Enterobacter cloacae
atggcgcgtaacttacaactggcgctgcagctgcttgcccgtgataccagctccaaagtgcttaagcaggcactgcagggtatcagccgtgataccaaagcggcgcaaaagaccgatgatgagctggcgaaatcccgtcagcagaactcaaccacagcgattcgtgcctcccgttctctgattgaggaataccgtcgcgccagttcggcgcgagcaactcttggcattcgctcagagcgcgaaatacagcgcgaaatacagcagaccatggcggcctataatcgccttacccgcacaggtatgctgtccgcaaatgagcagagccgggctttcagggccatgactgacagggtcaaaacgctgcgaactgagcttggcggcgtgaatgactcaatgacgcgtatgcagcgattccgcgctgcaggttcaaccgtggcagcagtagccggtgggttaaccgctgcgggtatgattataaaagaccctgttcagcgtcagatggcttacgaacggcgtaatgctgagattgcaaataccgcttataacaatctctccgcaccagaccgtattaagaaaatacctgagatcaataatgcaatccgtggggctgtccgttatggcggtggaacgccagaggccgcacaggaaaccattaattcacttttcgcaggtggtcttgatgataaaacggcattaaaaatattgcctgatattactcgttacgctactgcttcaggcgcaaatccgaatgaccttgcgcgtattgctattggtgcaattaagaactttgatataaaggctgaggatttaccagcggtatttgataaaaccatcaggtctggtgagaacggtaaatatgaactcgctgatatggctggctcattaccattaaccatgacaaaagcaaactctgtaggtatgtcagggttaaaagatttggatgtcattctcgcgatgttacaggctaacgctgaaacagcaggtgataatagcgccgcatcgactaacgttaataaccttcttgataaatacaccagtgctgacactcagaatgcactaaaaaactaccgtttcaaaggaaagaatggcgaagcgttaaaatatactgattatcttgcgcagcaaagacttgatggggtaaatacttctgacgcattcactaatgctgtatcaggcatcgtttccgctgactcgcgagtgcagaaattacgggcacaggcggctaaattcaaagggacagacaaagaaaaagatattcttgcctcgctggatatcgtggtttcatctattacctcaaaaataattgccgaccagcaggccagtactgcattaaaaaccagtatcatgaagaaagactttataaaagaacagatttcaggaacgcgtgattctgtcggtgctggtgcagcttcatatgatgtgatgtcatcaaccaatgattttaagtcacaacaatttgagtcagagaaaatgttttctgaacaggatgcaatgaaacctgttgccgatttatacggtgatttgacgtcaaaactcaccgattacgctaaagaatatcctgagctaaccacggctatttctggtgccactactggcattaaagccatgacagcggcggcggtagcttttgcaggactaaacttcctgactggtggtggaattaatttacctggtcgtaatcctggtggcggcatcccacccgtgggtggtggttctcgtcttggtgggatattcaaaaatcttcttcgctatggaggccgtattggcggccctctggcagcagcatatgcagcctatgacttgaattcgacctatgacgaagccagagacagcgctgataaaagtggtatggggactggtgagtatctctttaaaaagattaaagagcgggaagcaaacaaaaaaccgctattcgatgttgatgttgggaaggcagtcagctcctggtggagttcaccttcagcaatcggccagcaaaattatcagactgcaggtgggtattccattccttcgttcatgctgccaccgcagcaacaaaaatcacagcccattaacctcaccacaaagctgatactggacggtcgtgaaattgcatcagcggtcaatgaatacaacggcgaacaatccgttcgcggctcaacaggaggcccgcagtga

SEQ ID NO: 145132 - DNA, 567 bp, Enterobacter cloacae
atgaatgacgtgaaaggaaaagattttgcttttgaagatgaccgaaaagaaaaattagtcggcaggataaggcaactggcagagaggcataagagccttcgcgcggcagcgcgtgattgggggttgtctttttcgacgctaaataattatctcaacagaggaactgagccttcattttttgtgatgcatgatatctctattaaggagaatgtgagcatggactggcttgcatatggatcacatgatccatttgagttcaataaggtgatcattgagctacaaagaacgcagtcaatcccaggaagagatacgtggtgtatgattttcgacaatcttgaaaacgaagacaggaagatgctaatcaacttttgcttgaaggaaggtgcgccaagtctggcaagactagtgagccacgctagcccgttggacaaggagtttttggtactttcaacatcggataaagagcgcctggttagactttatgagcaactgaaaaaagggacatctgaggctgatagcggcgtaggtcaacaagacctagctagcgatgacaagaaggccggttaa

SEQ ID NO: 145133 - DNA, 225 bp, Enterobacter cloacae
atgcaaagaaatgaagtgccttgtgactggcatcgtatcgatatcgttgcagctctccacaagcgtggactgacgatgcgcggcctgtcgctcagcgtggggcttaaaccagacacgttgaaaaatgcgctcgccagagcctatccaaagggggagcgcatcatcgctgatgctctcaatgtagaaccttcgtcaatttggccgagccgctataacaaggattag

SEQ ID NO: 145134 - DNA, 645 bp, Enterobacter cloacae
atgacagaggtaaaaggaaacaaacttgctattgagggggaaggaatagcaaacattcaagagcgtttgaagcaactctttaaaggcaggtcgttacgacaggcatctatggattgggggttgccgtactctactttgaataactatttctccaaaggagcaacacctggtctagatgtagttattcgcatagctcagcttgagggagttcctatcagttggttggcttcaggtaaaaatgatgtgattgattttggcgagtcccatcgtggcacaagcgattctaagatgagtaatactattgccgaacctatcccggaatatggcagttcgctgcaaatcgcctttactggagctcctgtttgcagcgatgcagcactggctacaacatgggagacgatttttcaatccttgagccttagcgaacgctcagcccttgttagctctttcgtcaagattggggcaaagggtattttgcaggcacttaaccaagtcaatgatgcagactcaagctggatgtctttaagctacgaagaaaaagaacgactgattcgattgaatgagcaactgaaaaaagggacatctgagactgatagcggcgtaggccaacaagacctagctagcactgacaagaaggccggttaa

SEQ ID NO: 145135 - DNA, 225 bp, Enterobacter cloacae
atgcaaagaaatgaagtgtcgtgtgactggcatcgcatcgacatcgttgccgcgctccataagcgtgggctgacgatgcgcggcctctcggtcagtgtggggctcaaaccggacacgctgaaaaatgcgttacacagagcctatcccaaaggagagcgcatcatcgccgatgctctcaatgtagatccttcatcaatttggccgagccgctacaacaaggattag

SEQ ID NO: 145136 - DNA, 474 bp, Enterobacter cloacae
ttgtttaccattgagactgcacgtgaagaggcgaataggtttcgaaagatactcgaaacatgtgatccgtcaacaacctaccttgtacctcacggcttcccggtaatgagttgcaagctttgctcaatgttactttccttccactttctgcaattatggcccgaactggaattgaaaggggtcactggagtcaccggtaaaaatggcgcaataactcacttctggctggaagtggaagattacgttattgatatcaccggagatcaatacaacatcatcaacgcccgtaaactaaacgaaaatatcgtaagaaacaggccctttatgcctgttcacgtcgctaaccaaaaggatagctatctctataatttatttgaaattaaagggaaagagcatttgagctatggctttccgacaatcggtgatgatttcatcgatgagatggaatgtgattatcgccagcttgtcaggtga

SEQ ID NO: 145137 - DNA, 1842 bp, Enterobacter cloacae
gtggcacatgcatttgcaaaactgatgtacgacgtctgtcagattttgggagtattcagggaagggagtaaacagcgggatatacgagcatatggaagtttttggcgtcatcaggcgttttttaatcagcgctataatgagataatcggaataattgataaagaaagggtattcagtgaagaagaacgtcgtagtttgttctacaaatacgaaatgttttataatcaaatcatgtcttatcccgtgttcagcactctgacccggagccaagtattcgaacgttatattcagctcggggtttcttcatgcttagcacttgatatacacaaaacttttaacaccactaataacggcggattctactttcatatacatagttttttgttgagtgagcattgcccaacactggaaaataatggaagggatatcctacaaggagtgaaaaactatttaagggatcttatcaagtcacctgacgggagttataaaaaagttctcagcccactgtctgaatatataagaaatatcagaaaaaacagcacacctataaaatcatggatgaatagtaccatcgatgaatgcatcgaatattcccaaataacattagacgaggatgagtttaacaaaattaaaggtcagctggatgattttaaagtagcttactcttcgcttcgagtcctgctggctttggaacgaaagattgggttgactgaacacctttccagtttttaccgaaccctttatcaggtagagggtctgaatgacagctattatttggcattacatcaatatctttatgaatcgaaaaacttcgatgagcggttgctgaaatctgtaatagaagagtttcagaaaaaagcgaccaaaccttattcgatagagataaacgaagatacatggttggatatcaaggtcatttggcatcttgttttcagttctcttaaaggtgacgtgttttctgaattagatctgttagagttggctatcaaccttaaaaattctccagactcagttgtcctgacaccttatctgacgctatctaaaataatacataacatttgtatagacgatttaaacgaggcaaataaaaaagctaatgcaatgtcaattaatgagctacctccaggttttatctcagcggctattagtactatcaagttagctcttaacatcaaattaaatggaaatacgataaaaaatggagagttactttcagatataaatacaattttaacgtatcgcggcgtttttactgatcatgtcaatatcgttcgcaaatttaaacaacccgatttgatattagtaatgtgcgccaataacttgataataatgagtgcgataaaacagtataataacatggttcagatgacaagtttctacaacgagcttgaactttctgccatccacccacagtctattacaggtattctggatgaagttgaatttgcattgggcaaaataaataaacggcttgatgaaaccgagaaagttattaatagcgaagaactggccaagttaattatagatgagaaaatattaaccgttcgggagtgcagacaaaatctcgtaagctatttgaatgaatttacattgtataactgcattcttaacctaaattatattaaaccttacctgacactgcctggggagaagttggtgcatatttacggacttgtcggtaattcagatgagcgtgtaattaagcgagaatttttagctgaagctatcagaattgttaatgagagagaaggtcaaattaagcctttagctgaaggtgaaaaagctcaaaaaatggcgctaatacacgacctgagcagtgagcttttcaaatatgatgagtga

SEQ ID NO: 145138 - DNA, 2790 bp, Enterobacter cloacae
atgccaatggagagctgtacgcaaatgaacgccgtagaaattgaacaagccatcacggatcttgcggagcaaccctttgatcccattgagtttccttatgctttccttgaagcctttggtaataaggaaacgactatcaaacgcttgcgcgccggagcatcgaataagtccgatttgggcggagttcttcagaccaataacattcacattttggctagtgaagaagggcaagtaacacaaatgctggcttcactcaaggccagcccggcaacaggaaaggccaaggccaaattcatcctcgccacagacggaaaagacttcgaagctgaagacctcatcagcggccagactgtcgcttgtgtctttaaagactttcctgatcacttcggtttctttttgccactggcaggtatcagcactgttcgacagatcagcgaagacgcctttgacatccgggctaccagccgcctgaaccgcctttatgttgaactgctgaaagacaaccctgaatggggtactgcggagcgtcgtcatgacatgaataagtttatggcgcgtctaatattctgttttttcgccgaagacactgagatatttataggcaaggggcgctttactgacaccattgcacaaatgagtgagcgcgatgcttctaatatgcatgaggtcattgccacactgtttcgtgctatgaacaccccacgagaagagcgaactgtagttggtattccgcgctgggctaccgagtttccttacgttaatggtgctttgttctcggggagtgtcgaggtgccgcgttttagccgcatcgcgcgctcctacctgctacacgttggcaatttggattggaccagaatcaacccggacatatttggctcgatgattcaggccattaccgaagacgaagagcgtggtgagttgggcatgcattacactagtgtccccaatatactcaaggtgcttaaccctctattcctcgacgaactgcgggcgaaacttgatgaagccggtgaaaatccgcgcatgctgctcaatctgcgcaagcgtatggcgcgaatccgcgtatttgacccagcatgtggatctgggaacttcttagtcattgcgtacaaggaaatgcgcgccatcgaggccgagattaatcgacgacgtggcgaggtggataatgcatctgacatccctcttaccaactttcgcgggatcgaaatacgagactttccagcggagattgcccgtctcgcgctagttatcgctgagtatcagtgcgatgtggtataccgaggactaaaacttgcgctggccgagtttcttcctctgcgtaatgataattggattacatgtggcaatgcactgcggattgattggttgagcgtttgccctccgtccggaattggtgtgaagttgcaggcagataacctctttgagacgcctctcggtcaagcagagattgactttcagaacgaaggtggggagacatacatctgtggcaacccgccttacaaaggtagccaaacgcagactaaagagcagaaggaggatttggcttcggtatttgaaccttatggtatttcgtccaagcaaatcgattatgttggtggttggttcatgaaagcagctgcctacgcgcaagccacaccgacggattcggctttcgttagcactaactctatctgccaaggtcgaattgttcctatcctgtggccagcaattttcaaatgtggttcccacattcgcttcgcgcactccagcttcaaatggacgaaccttgctgcgcacaacgcgggtgtaacagtcgctatcgttggcctttctacagatgcgagtaagacgaggctactttacgacttggaccgcaatggccaaactacagtgcgcgaggcgacaaatatcacaccctatctgagtgttggtgaggatgttgtagtcgaaggccagcgcaagagcatatcaggcctgcccgatatgtctttcggtaacatgcctgtcgatggaggaaatcttttgttatcggcggatgacgcggcttcgctcggtttgagcaagcagaatgaagagacatttcttcggcgtatctatggctctgccgagtttattcgaggagttgtacgtaagtgtctctggattcctgatgtaaaattgccgcaagctttggagattgcgtctattcgtgttcgcattgatggcgttagggaaatgcggctcaaaagtaaagatgctggtacgaatgagttggcatcacgggctcatcagtttcgcgagatgtaccatggtagcaagcacacgctaattctgccgggtgtttcatcggaagggcgagagtatcttcctgttggactgattgataatcattcggtagttagcaacctcgcctttgctctctacgacgccccgctttggaaccttgcgctcattgcatctcgtttgcatttggtctggattgccaccgtctgcggcaagctgaaaacagattttcggtactccaatactttggggtggaatacgttcccagtacccactctaaccgagaaaaataaggctgacctcacgcgctgcgcagaggacatacttctggtgcgtgagcatcattttcctgcaaccatcgcgcaactatacgatcccgctaacatgcctgccgatctacggggggcgcacgagcgtaacgacgaagtgcttgagcgcatttacattggccgccgatttaagaatgacacagagcggcttgagaagttgttcgacctctatactaagatagccgcttcaaccgcaccggctaaaagcaagaagcgttaa

SEQ ID NO: 145139 - DNA, 864 bp, Enterobacter cloacae
atgcaaaaatctgacggcctacaggcttttgaaaaaccgctggcgtcactgccacacacgcttcgctaccttatccttgagcgttttcgcagtctcacgcagtacgagccggtaatcggcattatgggtaaaaccggggcgggaaaatcgtcgttgtgcaataccctgtttgccagtgaggtttcacccgttagcgatgtggttgcctgcacacgcgaacccttgcaatttagcctacaagtgggcgagcgcgttatgacccttgttgatctaccaggtatgggggaaagtagcttacacgatgctgaatacgccgccctatatcgcgaacatcttcctcggttggacctggtgctatggctgattaaggccgatgaccgggcactggcggtggatgaacatttttaccggcaggtgattggtgaaacataccggcataaggtgttgtttgttatcagtcagtccgacaaggttgaacccacttgcggtggtgaaaagctgtctacagtgcagaaacaaaatatcagccgaaaaatctgtctgctgcatgagctgttccaacctgtaaaccctgtctgcgcggtgtcggtacgtttgcagtgggggctgcgggtgatggcggagcggatgattcgttgccttccgcgtgaggccagtagcccggtagcgatacagctcagtgcgccacttcgtaccgatgccgttaataaaaaagcctgcgacgattttggtgagacggttggctcggtgttggacacggtaagcagcatgcccctgatatcggctccggttcggactattatcaaggctgtacgtgacacagtggtatcgatcgctcgtgctgcctggagttttttcttctga

SEQ ID NO: 145140 - DNA, 237 bp, Enterobacter cloacae
atgtctgaatctcatatgttgccaccgggaccgttcacccgacagcaggctgaagcggttaccagccggtataaaaatatcgctattgaagatgaccagcgcagccacttccgcctggtggttcgagactctgaaggtcgaatggtctggcgggcgtggtgctttgaacctgatgccggtgaagggcttaaccgttatatccgcaagtcaggcatcctcagagcatcctcctcctga

SEQ ID NO: 145141 - DNA, 330 bp, Enterobacter cloacae
atgaaaactctacctactacaatttcgcgggcgacgaagccctgtctgtcgcccgtggctgtctggcaaatgttactgacacacctgctggaacaacactatggcctgacgctaaacgacacgccgttcagtgataaaacagttattcaggaacatattaatgctggagtatcgctaagcgatgcggtgaacttccttgtcgaaaagtacgaactggttcgtatcgaccgaaaggggttttcgtggcaagaacaaaccccgtatatttccgtagtggatattctacgagcaaggcgctctaccggcttgctaaaaactaatgtgaaataa

SEQ ID NO: 145142 - DNA, 405 bp, Enterobacter cloacae
atgaacacacagaacgtcaacgtcaaaaccgccaccaaagaatcttccgaaagatggggttcagacccgaaagcgcgtctggcctgtgttatcgcggagcaaaagtcatatctggctgagctttgcggcgtgtgcaatctccagctgagccagcacgatgaggctgaggaaatcctgcgtcttctcagcctgatgagcgacaacattcacagggaaggtgtgctgtgctgggaacgttcatatccgctggtttcgtttcatgtcgtgcagccatggttgcaggcaaaagatcatgtcatccgcttatacggcattatcgggcgtaaggcgtgggagaacgcgcataaggacctttgcaataacattaatcttgcacagtctctgttgcgcctggaagctcgttaa

SEQ ID NO: 145143 - DNA, 309 bp, Enterobacter cloacae
atgtttgaattcacaggcgtctgcgtcagtattacacatatggaggaaaaagatgtcaggatcctccatatactttcctttaataaccagaccatcgaaagctataacgagtggatccatgacacgtcatatggcgtgatcatcaggatgtatgattttaagcgccatcttctggcccttaaaagaggtggcgtatccaggctattgcgcaggaatcttatccgcatgtatcaggaacgtggatatctcatctatcattttgacagcgatgcggatcattaccccgatatagacagtgtggaattctga

SEQ ID NO: 145144 - DNA, 486 bp, Enterobacter cloacae
atgaaaggttgggtactgggcatcgcactgtcagcaatatcgttgtcctccatggcatcggattgttttgatatggcgggaagagattacagaattgatccagatctactccgtgctatttcctggcaggaatcgcattttataattggcgccattggtcgtaatccggtaacaggttacggctccggacttatgcagattgattcgcagcatttcgacgaactgtcacgatatggaataaaatcagaccatctgctcacggatgcctgtctgaatatctacaccggggcgtattatctggcaaaggctttcagaaaatggggcgtgtcatgggatgctgtaggtgcgtataacgcagggtttaaaagaacgccgcttcaggcagccaggcgttatgagtatgcgaaaaaaattaatcggtactacaccgcgataaaagcgagtaaacgtctgccagctaaaacgcagcaaaccgcaatgaactaa

SEQ ID NO: 145145 - DNA, 5256 bp, Enterobacter cloacae
atgatgtcaattggttcagtgaaatccgcgggtaaagccggagattattacaccaaagaagataattattacgttatcggcagcatggatgaacgctggcaggggaaaggtgctgaggcgctgggccttgaaggaaaaaccgtggataaggccctgtttaccgaactgttgaaagggaagctgccggatggcagcgacctgagccggatccaggacggtatgaataaacaccgccctggttatgacctgaccttttccgcgccaaaaagtgtatccgtcatggctatgctgggtggtgacaaacgccttatcgaggcgcataaccaggcggtcactgaagctattcgtcaggttgaaaccctcgcagctaccagggtgatggtggacggaaaatctgaaacagtgctgaccggcaacctgattgtggcgaaatttaaccacgataccaaccgcaaccaggagcctcagattcatactcatgcggtggtgataaatgctacacagaatggcgataaatggcagtcgctgggtaccgatacggtaggaaaaaccggttttatcgaaaacgtgtatgccaaccagattgcgttcggaaaaatataccgtgaagtgctgaaacccctggttgaggggctggggtatgaaacagaggtggtcggcaagcacggtatgtgggagatgaaagacgttcccgttgagcctttctcgacgcgtacccaggaaatcaatgccgctgccggtcccgatgcatcactgaaatctcgggatgtggccactctcgatacccgcaaagcgaaggaaactctcgacccggcacagaaggtgacggagtggctttccactctgaaagagaccgggtttaaccttaaggaatatcgtgaggctgccgatcagcgggcgaaaacacaacgggaagttccttctccggaagcgccagctggaccaaatgttgacgatatagttacgcaggctatttccgggttaagcgatcgtaaagttcagtttacctatacggagttgctggccagaacggtcagccagatggaggcccgcccgggtgtcatcgagacggcaagagccggtattgaagccgccattgggagggaacaacttatcccgcttgaccgggaaaaagggattttcacctccgggatacatgttctcgatgaattatccgtcagagccctgagccaggaagtattacgccagaaccacgtcagtatggtcccggaaaaggcaaccgcgcgtcagacgtcgttcagtgatgcggttaccgttctggctcaggatcgccctgcaatcgggattgtatcgggtcaaggtggggctgcagggcaacgcgaacgagtgactgaaatggccatgatggcacgtgagcagggacgggatgtccatatcatcgcggcagataaccgttccctggagtttctgctgaaagaagaaaaacttgcaggcgaaatcatcactggtaaaagcgctctgcaggacggtactgcctttgttccaggagggacgttgataatcgaccaggctgaaaaactcagcctgaaagaaaccatcaatctgctcgatggcgccatgcgtaataatgttcagatcctgatgtcagacagtggaaaacgaagcggtaccggcagcgcgctgaccgtcatgaaagagagtggtgtgacggcgtataaatggcagggtggaaagcagactacagcatcggttatcagcgagccggacaggaatcaacgctttaccagaatggccagtgactttgttgccagcgtccgggatggtcaggaaagcgtggttcagatacgcggtccccgggagcaggggatcctgacagggctaatccgtgaaaatctcagaaatgaaggcctgataggcagtcatgaggaaaccattacggcgctgacgccggtctggctggacagtaaaaaccggggtatccgcgataattatcgtgagggaatggtgatggagcgctgggatccggaaaaacgcatccatgaccggtttattatcgatcgcgtgaccgctgtcagtaataccctgaccctgaaagatgaaaagggagaatcactgaatctcaaagtctccgccgttgataatacctggacgctgtttcgtcctcagcagttgcctgtggcggaaggagaacggctggccattctggggaaaattccggaaacccggctgaaggggggcgatacggttcaggtgctgaaagcggagaatggtgtcctgaccgtacagcaccccggtcagaagaccacccagaagctggccgccggcaatacgccctttacagggatcaaggtcggtcacggctgggtggaaaacccgggcaggtcagtcagtgaaaccgcaacggtgttcgcctcattgtcacagcgtgaactggacaatgccaccctcaatgccctggcgcagagcggcagccaggttcgactgtactctgcgcagaatgagcaaaaaacggttgagaaactcgggcgccatacagcgttcagtgtggtaaccgaacagctgaaaacccgtgcgggcgagcaggatatcagcgcagcaattgctcaccagaaaagccagctgcatacaccggctgaacaggcaatccatctggcggttccgtcgctggaaagcgataagctcacgtttacccggcctcagttacttgtcgccgctcatgagttttctgacggtaccgttccgttctccgatatcgaaaaaactataggagaacagattaaatcaggcgatctgctgcacgttcatgtcgctgccggccatggcaacgatctgctgatttcccggcagacctgggatgcagagaaaagtttgctcacgatggtgcttgagggtaagaacgccgttacgccgttaatggccaaagtaccaggtacgctgatggaagggctgacatcgggacaacgaaatgccacccgtatgatcctggaaacccgggacaggttcacgctggttcagggttatgccggcgtgggtaaaaccacgcagttccgggcggtgatgtcggcggtgaatttgttgccggaagactcccgtccgaaggtaatcggcctcggtccaacacaccgtgcggtgggagaaatgcagagcgccggtgtggaagcacagaccacagcctctttcctgcatgatacacagcttctgatgcgaagcggccagactccggatttcagcaacacacttttcctggtggatgagagttcgatgctggggctatccgatacggcaaaggccatgagtctgatcgcggccggtggtggtcgtgcggtttccagcggtgatactgatcagctgcagtctattgcccccggtcagcctttccggcttatgcagaagcgcagtgcggccgatgtggccatcatgcaggagatcgtgcgacaggtgcctgaactccgcccggcggtgtacagccttattgaccgggatatacacagtgcactttccaccattgaaagagtcgaacccgcccaggttccccgaaaggagaacgcatgggtacctgaaagctcagtcatggaattcacgccagaacaggagaaagcgattcagaaagccatcggtgaaggcgaagttctgcctagtatctcgcccgtcagtctctatgacgccatcgtaagggactataccggacgcacggaaagtgcacaggcacaaacgttgattattacccacctgaatgatgaccgtcgggtgctgaaccgtatgatccatgatgaaaaaatgcggaacggtgagctcggggaggacagtgtcacgctgccagttctggtgaccagtaatatccgggatggcgaactacgtaaggtttcgacctgggaagcacataaaggtgccatcgcattggtggataaccagtaccaccagatagtgggcgtcagtaaagcagaccagctgattacgcttcgtagtgacgaaggtaccgaacgcctgatttcaccgcgagaggcttctgcagaaggtgtcacgttataccgccaggagagtattaccgtttcgcccggcgacagaatgcgcttcagtaaaagtgataccgaacgtggctacgtggcgaatagtgtgtggcgagtggaaagcatatctggtgacagtgtcacgctgaatgacggaaaaagtacccgaacggtaacgcccgctgcggataaagctgaagcgcatgttgatctggcttatgccatcaccacacacggtgcgcagggggcaagcgagcccttttcaattgaactggaaggtgtgactggcgccagggaacggatggtcagcttcgaatcagcgtatgtagcgctctcccgtatgaaacagcatacgcaggtatatacagatgaccggaaaggatggacggatgcggtaagccgttctcaggagaaagccagcgcgcatgatgttctggagcctcttaacgatcgcgctgttaaaagcgcagagcagatgtttggtcgcgccattcccctgacggagagtccggccggacgtgcagcactgcaacaatcaggtatcgcccgcgggcagtccacagggaaatttatctccccggggaaaaagtatccgttaccgcatgtcgcgttacctgcatttgaccgtaatggaaaatccgccgggatatggctgagcccactgacggataaggatgggcgattgcaggctatcggtggggaagggcgggttatggggaatgaagaggcccgttttgtcgccctgcagggaagcaggaatggggaaagcctgctcgccgggaacatgggagagggcgtcagaattgcccgggataatccggacagtggcgtggtggttcgccttgccggcgacgaccgtccatggaaccctggcgccatcaccggcggcagggtctggggcgatatagacgccgtggttacgggggggagcggtgcaaatattccgctaccacctgacctgcttgctcaaaaaacggcagaagaactgcaacgcaagcagattgaaaagcaggcacaggaaacggctcgtgaactgaccggtgaaaagcgtaaacaagacgaagtgggtgagcagatcaaggacattatcacggatgtggttcgcggtctggaacgacagaaggggcagcatgaacgattccagcttccggatgaaccagaaaaccgtctcagaaatgaggctgttcagaaagtggtagccgataatcagcagcaggacagattgcagcaaattgaacgggatatggtccgggatctgacccgggaaaaaacactcggaggcgactga

SEQ ID NO: 145146 - DNA, 144 bp, Enterobacter cloacae
atgcgtaaagtgattacctttggtacttttgatgttttacatattggacatgtgaatatacttaaaagagcaaaaaaacttggtgactatctgattgtaggtgtgtcatctgatgcactaaggaaggtgcgaacaagttcctga

SEQ ID NO: 145147 - DNA, 672 bp, Enterobacter cloacae
atgattcggattgaaaacctctcaaaatcctatcgaactccgcaaggaaggcactacgtatttaaagatctcaacattgagttgccgactgggaaaagcgtggcgcttattggacgtaacggtgccggaaaatcgacgctattgcgaatgatcggtggtattgatcggcccgatagtgggcgaataattaccaatagtacgatctcctggcctgtcggtttagcggggggatttcaggggagtttaacaggacgagaaaacgtaaagtttgttgcccgcctctatgccgaaaaggatgaacttaaagaaaaagtagcctttgtcgaggagtttgccgagttgggtaaatacttcgatatgccaattaaaacctactcctcgggtatgcgatcgcgactgggattcgggcttagtatggcatttaaatttgactattatttggtggatgaagtaactgctgttggagatgcccgtttcaagaaaaaatgtgcggatttatttaaagaacgacacagagattctagttttctgatggtttctcatagtttgagctctttaaaggaattttgtgacgtagcattgtttgtagccagagataatagggttagctttcttgatgatattgaagaagctattaacctatatcaggacgatgaaaaattaattatctag

SEQ ID NO: 145148 - DNA, 777 bp, Enterobacter cloacae
atggccagaagtgggttagaagtacaacaggccgccgtgaaggcgctgtttctgcgcgagatcaaaacgcgttttggcaagtaccgactagggtacctctgggcgatcctggagccagccgcgcatctgatgatcctgctagctgttttcggtttcatcatgcatcggacgatgccggatatttcgtttccagtgtttttactgaatggcattatcccctattttctttttagcaatattgcggttcgatccgttggggcaatcgccgccaaccaggggttgtttaactatcgaccagtaaaacccatcgacacaattattgcccgtgctttgctagaaacagttatctacgtcgctgtttatatcttactgatgacggtggttggcctggctggtgaacaatttgaaatcaccaacctattatcgttagcctgtacgtggtttttattggttatcttttcttgtggcattgggatgatctttatggtcatgggtaaaacgatccctgaaacagagaaattccttcctatcttcataaaacccctctatttcatttcatgcattatgttcccattacacgcgattccgaaagaatactggccgtatttgctatggaatcctctggtacatgttgtggaattaagccgttcatctgtggttgcaggatatgtaagccagggcgttagtcttaactatctggccttgtgctcgctggttgttttctttatggggctcgcgctctatcgcaaccgtgaagaggctatgttgacatcatga

SEQ ID NO: 145149 - DNA, 267 bp, Enterobacter cloacae
gtggacgacctcaatgaaccgcgcacgctgaatatctttatcgttgatgaaaataatcaggttgtctccggcatggaaacggtttgcttcgatagcgacaatgacgatatggggaaacgtacccgcgatgtgaccatgaaactcatgggcacagcattcaatcgtaaaaacaaatatgtgctgatcctggagaatgcggacagcgccacagagtatggccgctatccgattacaatcgacctggctttccaggatgacttcttttaa

SEQ ID NO: 145150 - DNA, 174 bp, Enterobacter cloacae
atggattcaatatatattacctatcatgacaacaaaccattaactgaactgggctcatcattcatttttactcttgaattaaatacaattaatcagaatgaagttgaggagttcaaaccagcgatagctattaatgtggttttccccttttttcccacaaggattttattttga

SEQ ID NO: 145151 - DNA, 441 bp, Enterobacter cloacae
atggagacacacaaccctgagtccgctgagcaggcagcaattactgcctcggtggtccctgacgagctacgcatcggcttctggccgcagcactttggctccatcccacaatggataacccttgagccccaaatcttcggctggatggatcgcctgtgcgctgattacagcggcggcgtctggagcttttacacactcaacaatagcggcgcatttatggctccggagcctgacggtgagaaatggacgttgttcaacccgatgaatggcaacggcgcggaacttactggagaagcggcagggatagtcgcctgcctgatggcattcagccaccacgcttgccgcaccgagtgtgacgcgatgactgaacactattatcgcttacgcgactacgcgctgaaccatccagagtgcagcgccattatgcatctcatcgactga

SEQ ID NO: 145152 - DNA, 141 bp, Enterobacter cloacae
atgactggtagtaaagacaataatttcaattttttcattagattaaccttacattcaattgtggagaccatctctaatcagtttgtccggattgcccccgactttctgaaggagaaaatgaattcagcgactgctgaataa

SEQ ID NO: 145153 - DNA, 468 bp, Enterobacter cloacae
atgttagtccgtggagacacggttttcgtccgctttttagctcaaaatgatgatggtaattcttttgaagtgcagacaccaacgaggcctgaagagagaattcgcactgggggtggtttgactatcggatacaagctgccagtaaaccagaagctccttttttcggtcgctgagacgttagcccaagaaaatcatcttcaacctgagaaaaaagtagaccgctttcagaataattgcatctccatgttttccattactatagatcacggcaaaactatacaagatgaagtcaacgaggaatgggtcactcgcttctttgagctcttcgatgctcatgaaatttcgacgaatattgtcgaacctagcatggtcgatatttattctgacctatgtgttgaggatggcgaagacgtttatctgagtgatggtatgtacatgcgcccaaacgggacaacttacgaacgttga

SEQ ID NO: 145154 - DNA, 579 bp, Enterobacter cloacae
atgcacacaccttacccttttaaccctagatacacgatgaactggtttctactgtctctgatcaataaccacctgaatcagctactgaaccgatactcgcgaatacaggcactcagactcgacctgttctatcagaaaggtacagagcgttataaacgtcattcatggaatgaaaccgagcaagaggtgcgcatgctggttgaacgcaccgttcaacacacaaatctggcagggtatttctgggtactcgagaactctatagaccacggctgccatgcccatatcgtgttctatctcgacaggcaccttaatcaggctacctacccaatagctgagagagtcggaacaatatggcggaaaatcacgcaacgagaagggtattacaaccgctgcgaatacaaacctacttatgacgtcagtattgataagccggtgaactacgatgataccgaagccatcgataacctgcgctacatcatcagctaccttgccaaagaagagcaaaagcacggtcactatcactatggagccagtgaggtaccgccacccagtggactggggcgtcctcgcacattgtaa

SEQ ID NO: 145155 - DNA, 225 bp, Enterobacter cloacae
atggaagacagcatcatgacaaaacatatttctttaatcgatgaccaactggtggatatgcggttcatcacgaagctaacggggctgacggataaatggttctataagctgattaaagatggtctattcccgaagccaattaagctgggccgcagctcccgctggcgacagagtgaagtcgaagactggctactgcaacgtattgcggactcacgaggcggttga

SEQ ID NO: 145156 - DNA, 1854 bp, Enterobacter cloacae
atgcaagcaggtaaatcaggcatttcgctagccctgtgttgcttacagcgattaagtctctccgagacagatatttgcaatcgtaagcagctaaaagacacactttacctggttacaatgcctgataccgccctcaaagaacaagctgaagaagacctcaagcttgccaagaatgttgtcgtcagtaattttgtgaacttcgaaaaggcattggaaaatgaatttaaaggcaatccacctaagctaattattattgatgaatgtcactatggctcaaatgtcactgctgttcgatacagtaggatcttcgactacctggaacaagagaacgatagttgtaaagtcgtcttcatctctgccacccccttcggtgctctctatggagcagagactgaatatcaagaagctctagaacttcaacaagaagccaagaatgataatgatgcagaactattaactcaagcccgaaatgttgctgaagcggccttaaaagactcaatcttgcgtcgagactttaacacccgcctggtattccacaaaactagcgatgaatactacggcgtccgagagatgctaatgaatagtaaggtcaaaggccttgaggatgaaagtcgtaatttcctttgcaagtccgttcaacgcgatgagtttgttcaacaatttctgagtcataaaggtatgggatggtcactcgtaagggtgcccgctggtttggcgatggaagctaagcagtttctcatatcgcaaggcatcgatgagaatgctgtttacattattggtaattcattagcaggggtaccagaagatgaacattgcagcattgagcaattcaaaaaggagtttgatgatgctcagttgttcgaagaaaaactaatcgctattactgttgctggagctcgagctggtatcaacttcggtgcgatgatgaaaaataatctcatctcgacgtgggatagtacagttgccagtgttgcagcagtggtgcaagccaacattggcagggcgtgtggttaccatgaaaacaactcttcaactcatttcactaacttaaatgcagctgaggcttatgcttgtatccttgaccatcttgaaaacacctgctctgaccaagcagcgtctgatttcgaagggttaaaagagttttttgaagatgtgtgccaggaataccatgtcaacggtttggatgttgggttaacgatcaaatacaaacgtcgtcgcccaatcggtgatgttgaaacgtataaaactgatagctacattgctgtacccgcaaaacttcttgacgatgatgcagagttcaccgagtacacaaaagataagtatcttcttcaggcgatcgatattattcgcaaagagttcacgattaaaggtgcgccaagcgtcaaaggtaatcgagctatgcgaggtaaaggcaagaactggatcaaggcacattgggtaaatggggatagttacaataaccccgagaaggcacgcgctgacggaactcaaaaagaaaaaactaaaacccacacccaacaaattgataatggggaatatttagagtttaaccgcgttgtagcacctggttccggagagttatctgaagataagtttgtggtagctaccatttttagcgtttacaacatttctcgccgaaatgtcgcaaagaaaattatgactcttgaagatgtttgggagatgtgcgactactttggtgttgagcatgatgacactctacttgttatctacaagcgcggtgagtatgaccttgaacgtactcttgctaagaaacagcacaacgaacttcctgagcagtcaggtgagcttagcgatgaatcccatttctctgacaaagtagaatctacttattaa

SEQ ID NO: 145157 - DNA, 339 bp, Enterobacter cloacae
atggatggctaccaccgttttgtgatttgcgtaacagcctggcgcaccatgaagcagtctggaaatccccgggaggaagatccggttaccagtgcgccggataacaaccgcccggtatatggtcttcaggcgtcccttcagctgttgcaacgggcatggaaagatctgcaggaggctctcagctggctcagtcctgcaatgcatactgcgtttctgtcagacggtcatcacctgcgtttcgaggcactggccacacacgacggtttgctgagtttcaccggacgggcacagctgatgcacgacctgaacgtgcggcgcagtaaagagatcagaaaatga

SEQ ID NO: 145158 - DNA, 1236 bp, Enterobacter cloacae
atgcgatatattcctggcaggatccctgtgatacttgctgtcagtaatttgttttttacctgtgccgtgtctgttgacctgaccattgccaccctggtgggctatcagctggcaccgactgatgaactggccacggttccgtttgcacttatcacggtcgccggtgcgttctcgagtctgtttgcggccggcatgattggtcggggaaacgaaaaactcgcgtttattctgggctctttatgcggtagcgcaggcggattactgtctttcctcgctgtgctgaagggcagttttatactcttttgcaccggctgctttctggtgggggtctatcaggctttcagccagtactatcgtctggttgctgccgatcactccccacctgaagtgaaagggcagtcaatctctctggttatgattggcggcgttgtggcagcaatcctcgggccattgctgacgattgttgcacgggatatccccggtctccctcgctttgccggtgtttatctcgttgtggcgggactggggattctgtctgcacttaacctggctctgttcctcgatcgttcaaaaagagacgtctcctccccggactcccgggcgatccagagagtatcgccaaccagccgggagttaatgaaacgtccggattatcgtacggcctggtttcatctggttattggctccttcgtcatgctttttctgatgacggcggcccccctctccgttactcaccaccactcgatgaatgatggtgcactggtcattcagttgcatctgctggggatgtatgtcccttcactgtttaccggtctcctgatacgaaaagtggggctcaccgttctgttgtacgcggggattgcgcttaacctggccgctgttgtgataaacctgacaggggaaacgatgctggcatacggcttaagtctgcttctggtgggggtcggatggaactttatgtttgttggcggctcgacgctgctcagtttgtcctaccgtgataatgagcgaaaaaaagcgcagggtctggccgaaaccagccgtttcattttctccgcgatagccacatccggagtgggcgtgatgctggccttgctgggatggaagctgctgggtctgatgatgataccggctttactggtatgcctggcctccacctggcagtacagtcggaccatacggaaagaaaggactggcacgtcacgccctgctgcagacggttcttcaacccggtaa

SEQ ID NO: 145159 - DNA, 1710 bp, Enterobacter cloacae
atggaacctgtattaaatctttttacgaccagtcatgacgaataccatactgatgaaactgcttcaacatttggcatactgcagacactccctgaacacatcccgtcaaaagaaaaccatattgtccctggtgaaataattgaagagtggataagtaataaatatggtgctctgattaaacaactgacagacaggatctcaaataatgcactccggaatctttcgcgggcaggtcaggacaatccctgtgattttcgcgagattattacagaagtaatgacatcccggctaatcagaagagggaccctcagcgcagaggctcgagcgcaacgagtggcagatattcagactgacccagccggtcgggtgacgttctccatattgttgttacctttccggacaccgtcgccactcaaacatgactctttattaccggacctgggggagtactacaccctgagtgtactctatgcccttgctgccagctgccggcaggtccagctcagtctgtttaatatggctcattccgtctccgaaacacttaaagcacagggaactgatccctggacattgttacggcaagccggagaacgtacatccggtaaacgcggagaagccatgactcttattgaagaggatttgagacttaaatttttcgggaaggaatacatccgccggcgaaaattcatccgctcaatactgcagaatgacacatgtctgaattatgaatgcccggaacatctattctcatttttacttctgctttctgatgctgaaatgtcccctgtacagttcaggcactggatacaggcagatattactccggtacatatttatgctattcaggatgaatatcgctacccgtgcttcgatatgcttgacagaaagatgatacgggactatcgcgacgatctcctggcttttatggataccgtcaatatggacaatcagttactgtcacttatccgttacgaagatatccagaataatttatcatggaaaacccggtattttaatgatcttgaatacaccaccaaacttaatgctttgatggcgtgtgtcagtgattctgaagggttgtaccaggcagaaggaaggggggcttttcttacgactttgcgtgagcaggatccccgccttcagcagttgtttgaaccgcttctctttgcactaccctaccctctccttgaaacgtatgcccgggagcagtcgcttgagtacggcgagttttactgtcatttcatgaataatatctatacccctcagaaagaagatgtcgagttattaagacgggtgatcctgaatcaggtgctgcaggcggttgccagatacgttgcagcctatgaaagcaatactgcaggtaaaaatacgaccgggttcgatgacgtgcgttccctgttccctgaaaccctgcgcatgtcgatacaccgtaaagatgagaaacacgggcattactctgtgcagatatcgccttcctcctcccgggtcccctggcatggtgtggctgttctggaaccaacacaaaacgggtttctgctggatgtccgtctggaaagagaggttcgcgcagccggatataccggagtcagtccgaccggacgtgagcagtgtccccttttttttgtccctcccggcatcagtctggaacagttaacgcagcgtttaaccgatgattctttcgctttactgtcgttgagttcatccctgtag

SEQ ID NO: 145160 - DNA, 429 bp, Enterobacter cloacae
atggctatttcagctcgtaatcagctggtcggaatagtgagttcaacagaacacggtgcagttaacgatgaagtcgaattaacactggcaggtggagcaaagctgattgctattgtcacatctggcagcaaagacgtgctcgggctattgccgggtaaagaagctatcgcgctgataaaggctccttgggttacgctggcgaccgaaagctgtggacttaaattctctgcccgcaatcagtttgcaggtgaggtgagcaaggtaacggaaggtacggtaaatgcgaccgttcatgtaaatgccgatgccggatttgaaatcgtggcagtcatcaccaatgaaagctgcgaagtgttacagctggcagtgggcgtacgtgtgatagcactgatcaaagcctcttctgttcttattgccacacgaatgtaa

SEQ ID NO: 145161 - DNA, 771 bp, Enterobacter cloacae
atgttagaagagacccgccttcaccgtatctgtgcgctgctctccaccctcaaccgggtcagcaccgagcaagttgtccagcatctcggtgtctcccgcgagacggtgcgccgggatgtgctgaagctcgaagcgatgggcgcgctgcggcgggtgcatggcgggatcgcctccatcgctcaggaagccgagccaccgctatcagtgcgcaatactgtacgcgcgaaagagaagcgcgatatcgcaagggcagcagtgcagcagctgataccggggcagacgttgtttatcgacgccggcagcaccaccactctgctggcggacgaactgctgtcgatgcctggcatgatcattatcaccaatagcctcaacgtggctctcaaactcagtggcggagagatgccccttaagcatgaggttatcctgctcgggggccatatgggcccgtcactacaggccaccagtggcgatcggaccatcagcgaaatccaccattaccgcgccgacgtagccctgttgtcgccggtcggagtaaccgcccgcgacggcgccagcagttttgcccatcatgaggcggccatcgccagtgcgatggtgaggtgcgctaaaacacgtattattcttgcggatcacagtaaaatcggcgtcaccagtcgggttatttacgctcagatacctgagatagatctcattattaccgatcctgcaggtgccgaacttgcggagtggcagtatctgcagaaaagcggcccgcagacgctcattgcctga

SEQ ID NO: 145162 - DNA, 1659 bp, Enterobacter cloacae
atgggtgcaggcatgagcagatcacttcttcctccgcaatcagcggctgaccgctggctctcccgcctctgcctttgcctaccgctgctggcgctgctggcctttttcggcggaccaatgctcagcatcctctggcacagcctggtggacgaccgcagcggcgccgtcagccttaataactacgtgacgctgtttgacgctcccggcgtctggcgggcgctcggcaacagcctgctgctgggcatcgcaaccacgattattaccctgctactgggttttatcgtcgcttacggcctgcagtttaccgtgatgcctgcgaagcgctttatcacgttcgctaccgcactgccagtgctggcgccttctctggtactggggctggggcttatttttctgctcggacgcaatggtatcgtcggtaatattctgggagtgaggctggatatttacggctttcacggcctgctgattgccgacgtgctatatgccctgccgcaggctgtgctgataattcaggctgctctgcgccacagcgacgcccgtcagtatgaggcggccggtgtgctgggggccagcggctggcgacagtttctcgatatcaccctaccgggcgtgcgctttggtttgctcagtgccgggttcgtggtgttcacgattaccattaccgattttggcaacgctgtggtgatcggtggcgacttcccggtgctggcgactgagatttacagccaggtcagtgggcagatgaaatttggtatgggagcggtagtcggcattctgctgctgctgccggcggcggcggcaatctggattgagcgggcggcggccaggcggcagaaaatgatcggcactgcttcggctcagccctacgttccgacgccgcagcgcgggcgcgatattctgttctggctgctgaacatgctgatttctctggcaatcgtcgccaccattaccacggtggtgatggccagtctgatccggctttggccctaccggctggacctgaccctcaaacactacaatattgacctagcggggggctacacgccgctgtggacctctgttgggatctcggcactggcggccattgtcggcacgttgctgttgttcctgctcaccttcggcattcgccgccagccagggcgaaccgcagacttcgctacactgctcagcgcgctgccggtgggcgtacccgggctggtactggggctggcctacgtctttacctttaacagtgccgatctgccctggggtatgctctatggcaccgcgttactggtggcgctgtgtaactactaccactaccacacccagggcttcaccaccatgatgatgggcatgcgccacgtgcccggttcgatggaggatgccaccaacgtactcggcggcggggtggtacgtataatgcgcgacgtctacctgccggcgatgcgggtgacgattatctcggtggcgatgttcctgtttatgcgctcaatggtgacgctctcggcggtgattttcctcgtcacgccctcgctgccgctcggcgcagtaacggtgatgcgcctcgacgaagcgggcttcacctcccaggcggcggctttttctacgtgcatcatggggattgtcgctataatggcgctgctcctaaacctgttaaccggcaagcgccgatag

SEQ ID NO: 145163 - DNA, 999 bp, Enterobacter cloacae
atggctttggtaatcgaaaatctctacaaaacttttgacggctacgttgccctggatcgcatcaacctgtcagtcgataaagcggagtttgtctgtctgctcggtcccagcggctgcggcaagacaacactgctacgcattatcgccggtctgctgggagctgacggcggtaaaatcagcctcgacggcagggatctggtcaacgttccggcccgtgatcgcggatttggcatagtctttcaatcctattcgctgtttccgcatatgaccattgcccaaaacatcggttatggcctgaaaatacgcaacacaccgactgctgaaatcgaggctcgggtcagcgatctgcttgaaacggtgaagcttgctggcttcggtcatcgctacccggcccaactttcggggggacagcagcagcgggtggcgatcgcccgtgcgctggcggtcagcccctccctgctgttgctcgacgaaccgctctctgcgctggacgcacgggtgcgggccggactccggcaggagctgcgcgaggtacagcagcacctcggcataccgaccttgatggtaactcacgatcaggaggaggcgatgagcatggcggataaaatcgtctgcatgcagggaggtcgcattatgcaggagggaagcccgcgcgagctatacaccacgccgcacacacgatttgtggccgaatttatgggtcacagcaacctgctgccgcaggcggtggtgcaacactggatgccggacttgctcgcaggcggccagccggaggatgccgagctatttatccgcccggagcgcattggcattcgccaggctccggatgcggaagggatggtggtgagcaccagcttcctcggtagcattcagcgagtgcaggtgctgtggcgatctcagccgctgctggtcgaaaccagcagcgccgtggggctggcggctggggaccgggttactctctcttttgacgcgcaggactgcgcatgggtgcaggcatga

SEQ ID NO: 145164 - DNA, 1017 bp, Enterobacter cloacae
atgaaacgcttttcatttcgccgtaccagcctgatggccacctgtgctctcgcaacgctctccggagcggtgcatgcgggaaccattaccgtgtatacctcgctggaagaggatgagattaaggactacgtcgagagtgcaaaaaaggatatgccggatctgaccatcaacgtactacgcctctctacgggcgatctgggtccgcgcattctcgcggaggctaaaaatccgcagaatgacgttatctggggatgggcgctgaccaacgtgatggacccccgtattgagggcttactggaaccctacatcgcaaaaggtagtgaaaagcttggtgccgcctcccgcgcaccggaccataagtggtttgccaccactggctatatggcggcgttctgcgttaacaccgaagccctgaaggcaaagaacttaccggtaccggagacctggcaggatttgactaatccggtttataaaggcgaggtggtgatgccgaacccggtgtcctccggcactggctatctgcagattgcggccttgcttcagtcgaagggcgatgagaaaggctgggcgttcctgaaatcgctggacggcaatatcgcccagtacaccaagtctggctcccgtccctgcaaagccgcgcgcaccggtgagtacgcaattggtgtctcgttggcctttgccgcgatgcagtccattgaagaaggctatcccgttgagatggtcatcccgaaagacggtgcaggctacgagctggaagcctccggcctgatgaaggcatcgaaaaataaggccgatgctaaacgcttcctcgactggacgctctccggtaacgctgccacccggtacaccaaatacaaggagattgtcaccattccgggtgtaccgcagtcgcaggctgcaaaggctgcgggcctgccggcggacctctctaaagtgctctatccggtggacttcgccaaaagcgccaaagagcgcgataccattctcgccacctggcagaagacaatcggtcgttaa

SEQ ID NO: 145165 - DNA, 1356 bp, Enterobacter cloacae
atggcgacacgttctaccatcatggataccaacagctttcgcgcagagcatgcggatgcgctggatgcccagacgcgaaggctgaccgacagacgcagccaactgctgggcgagtcctaccgtctgttttatcgtaatccggtgcatctggtgcgcggcgaagggcagtatctctgggatgcggcgggagagaagtatctcgacgtctataacaacgtcgccagcatcggccactgccacccggctgtgattgctgccgtgcacgagcaaatgagccagctcaacacccacacacgctatctgcacgagcgtatcctggactacactgccgacctactgaccaccgtgcctgacgccatcaataaggcgatgtatatgtgcaccggctccgaagctaacgacctggcaatccgcattgctaaggcctggagcggcggctcagggatcatcgtcagccaggaggcttatcatggtaccagcgagctgacctctggcgcctccccggcgctcggcagtggtcagccgctggcacccaccacccggctggtgccgccgccggatcgctatcgggtggacgcctccgatctcggcatctggtgggcgcaggagatccagaagcaaatcgatgacatggccgtccacggcatcaagtttgccggacttatggtggactcgattttctcctccgatggtgtactgcctggtccgcagggcttcctgaagccggcactcgacgtggtgcacgctaacggcgggatctttattgctgacgaagtgcagccgggttttgcccgcaccggagagagtttctggggctttggccgccacggcattgtgccggacgtggtgacacttggaaaaccgatgggaaatggtatcccggtctccgggttgctggcaaaagccgacgtactggccgccttcagtgacgatattccttacttcaacaccttcggcggcaaccctgtgtcgatggccgccgcccaggccgtgctgcaggttattcgcgaggagaagttgcaggagcacagcctcagggtcggtgagctgttacgtaacgagctggcgctgctggcagatcgccacccgaacgtcggcgacgtgcgcggcgccgggctgtttaccggcttcgagctggtaagcaatcgtgagagcaaaacgccggacaaagcgctggcgttggatgttatcgaacgcttgcgcaccgagcgagtgttgacctccgtggccgggccttacggtaacgtgctgaagctacgcccgccgatggcgttccagacagaggatatcgactggctggtaggatcgctggataaagtactgatggcttgcacggcgaataaacggcaaagctga

SEQ ID NO: 145166 - DNA, 1176 bp, Enterobacter cloacae
atgcagcgtattcaccccggtttgctggcattgtccgtgacagcgtttgctattggtatggccgaatttattgtggtaggtattctgcctgaaatcgcgacagcactgaccattgatctaccccgtgccggcaaccttgtgggtttgtatgcgctggctctggctgtcgctacaccgttactggtgatggctatcgctggtttcccgccaaaaagagtgctgacagccctgatcattatgtttctggctggaagcctgctttcggcactggcggacagttaccctctttttcttaccgggcgactgataaccgccgtcgcgcatggcagttttttcgccatcggggcaacagtagccgccaggatagcccctgcggggaaagcaggtaaggccatagccgttatgtttgccggactgactctggccatggttattggggtaccgctcggcagcttcattggtcagataatgggctggcgggtgccattaatcatggtgagtttactggctctgcttgcattactggcaacaatgttctggctgcccggcatcagaaatagcggatccgggaatgtaagggaacagttgcaggcgctggcacatccggcaatcatgaccatgatgagcattactgtgctggggtttggggccagctttgctgcatttacgtttgtgatccccattctgacgacactcagcggcttttcttccgaagtcgcaagcttactgttgatagttttcgggggagccacactgacaggtaacctggctggcggtcatttttcatcgacccggggctggtccgtaacgctgggtacacagattgtgttgctggcagtgacattaatcgctctggccctttttcttcagtggaaagcggttgtcattgggttactcttcctgtggggaacccttgcatttggactatctcctgcggtacagcagggcatgttgtcaatggctgaacgctacactccgcgagctgtcggatttgcctctgccctgaatatatctgcttttaacctgggtattttctgtggggaaaatattggaagtgtactcgtgcaccataataatctcgaatacactcccttagccggggcggggatgtgtatgcttgctctgcttcccctctggtttcttgtcagatatatcggctgtcagactacaaaataa

SEQ ID NO: 145167 - DNA, 2034 bp, Enterobacter cloacae
ttgggaagaaatgacctgcttattcgcaccttccttagtcgtgaaaatgttatatcaggaagtctggaaacagctctcttaggtcgcgtcgaaaatcaaatcgagtttagaaagttaaggaatttttattctcagcaaaatagaactcagacaaataacccgatatatcatttaattgccgatgagctaagattggcattttcggattccatactttacttagatgaagattcctttgaaaaatgttatgtttcaacgccagaaactatgcgattcgacagtaaaattaggatgaatattggtaggcgttcaaatgttctgaatggtgaggtattaagagggttaaatgataaagatacaaaaagaataatcgataagttccaagtaaaaggaaagaaaaagatacacatcaaggacagcaaacctttagcaatcttgctactcgggactgtgggggcaggtaaaacaacctttcttcattacatgagaaaggttagaataaaagagattttttcaaataaagaagatatattgaatccacattggcttcatatagatttccttgataatccatcagaaagttcaatagtagattttatctacaaatcaatcctcgaatacatcaacaggcatccaatcttaagtaatcaggagtttgtgtttgatgcatttagagaagacattgaagcaattaagtcggggcctctttttctattgagcgaggagcaaaaaaactctcgaatctccgattttttatatgatcaatataaaaacatcaaaccttatgttgataaaataatcagtcacattacaaaaacaacatcttttttccttgttatagataacgttgatcaaattgagcttgatgatattcagtcccgaatatttacagaatcattttcaatatcgagggcgctttcattaaaccttgtgctctcattgaggcagtctacttttatcaaacataaaaattctccggctatagatgcttttgattttgaagttatacaaatagacccaccaagaattagcagcgtaattgcaaaaagatttgctctagtaaaatatatgaccagtaataaaagtggtaatttcatcgcagaaaatggggctaaagttgccttggatgatatatcacaattagtcgatattatcagtgggtctgtactgggaagtgagatagggacacgtattgaggtacttgcgacggatgatgtgcgattagcattacgaatgactcgtgagttcctagaaaggggttatacgagcccaggtaaggcagtacaaatctttagagaacaaggaagatatcttcttccccgacatgaggcattcagagccattttattgggtactgaattgacatatagcgagtcaacatcgactattgctaacccattcgattcgaatttagcagtgactcaaatgcaattattaagactgtacgttcttaatgttatagtttcgtacgctagcgatcctgcattccgacaaattgatggttcggtaataactgaaaaattaagaatgattggtgtaggcgactcttttacacatcgcgtacttgttgatttatgcaataaaagatttttatttactgtaaatcacggtgagcctacagcttcatcaagtttcataccatctcggttgggtggttatattgcaaaagaacttattagtaatttcacattcatagaatgtatgctttatgatacatatatagctgatgctaaaacatggggaaaattgagagatctgagcgggaaaattgagtctgaaagagatgtaataaaaaggatcacgatgcgtgtaagccgagcgaaaagtttttattatcaaatggaaaagcttatttctccgctttgttctgaggctattattagaggattgccttcacaatggtgttctaatcctcttcgggagcgtttacccgagttaagaaaagagttaggaagggtccttcattctgcgaaaaagacatatcaaccaaaacaggatgatacgtctaagtattttcttgatgaatcggtatga

SEQ ID NO: 145168 - DNA, 762 bp, Enterobacter cloacae
atgaaccatgagcagttagttcagtatggattcaagtttggaaaaaatggacctcatgcagcgcgttgcatgatgatcgaagaattgaagatattgctccaggcacggcctgagaacaccttacaagaagaatatagggtaagcattgtggatgacaatattcttcataaacccagttctagtgccaggaaactaacttatcggcacatggttggtctttatgggatgtctccgcacatacctttgttcaaattttttcgtcaactttgggtgctatctgaagaagctcagcctctactcgcactgcaattggctattgcaagagatccactacttcgagaatctgttggggtcattacggcacttaagcctgggcaaatcttacccagaagcgttatggaagaacacctagcaaaagacgatccagatcgatttagtcaggcatcacttcagtcatttgctcgtaacattagtggcacatggactcaatcaggttatctttcgggtaaggttaaaaaacaacgtactgacccaaaagtaacgtatgtgaacgtggtttttgctctacttcttgggcacttccaggggctttcaggtaaacgtttgtttgatagcttttggatgaaactattaccagttgatgaaacaactttgtacgagcttgcatatagagcaactttgcgcggcctgattaatttcaaacaagccagtgaggtcgttgaagtgtcttttgcacctctgaatctcctagttaaggaataa

SEQ ID NO: 145169 - DNA, 543 bp, Enterobacter cloacae
atgtctgacagattgtcaaaattactgaaaagtttttccagtcacatcagtgtgccatggggtaacaatatctcagctgaagagaaagctatctttgtcgtatatgacaaagaggatgagcttaagcttcgtgctcgcatgactgaatttgagcacgcatgcatcgaaagcgagcacccatggctgttgttggacttgaccaatgagttcccctactggatggccagacaggactacaaagaggcttatttcgaagatcctgagtatctggaaggaagctatgactattttgctgaagagcttgtgtcgaaactccatgagcagattaatgcgcaccaaacacctgaatctgtagtggctcttatgggatgtgggaccatgttcggctttgtatcagtctccgctttagttaaatctttaacgactcaagtacaggggcgcttggtggtatttttccccggagaatatcatgagaataactacaaactgctcgatgccaaagatggctggggatatcaagccactgcgatcaccatagcttaa

SEQ ID NO: 145170 - DNA, 3474 bp, Enterobacter cloacae
atgctgaaccgcgaaatttataaacttgaccctctggaaagcaaattggccaacaacggtgtggctgaggtaaaagatgatctctccaaaggggctcttgaaacattagattatgagctgcggacgtttgtctgtagcggggcttatgccaaaggcatggctgatattcttagcaactacttacgaaacgttaaaagttctggtgaacaacctgcagtttggatttcaggctttttcggttctgggaaatcgcatctagctaaaatgctcagaaccctttgggtgaatcagaaaatggagagcggagcagatgctcgctcattggttgagttacccgatgatgtacgacaatattttgacgaactttcaacattgggaagtcgactgggaggacttcatgccgcgtcaggaactttgggtgcgggagcagaagacaaagttcgattagccttgttggcgatcattttcaaatcagctgggttgtctgagcaatatcatcttgcccaatttgaactttggttaagatctgaaggggtgcttgagcaagtaaaagcttacatccaacagcatgccaaaggtaaagaaggcgaagacctttggaagaaagaactgcgcaatctccatgtttcaccagtcatggcgaatgcgctgttacatgctttaccatctcttggaagtgatgctaaagaagtacgagatatgctgcgtgcgcaatataaaattgttgatgatgtatcaaatacggaaatggttcagtcgattgttgatgcattgtcaaatgaaggcgaaatgcccttaactttggttgttcttgacgaggttcagcagtatatcgctgatgatccagatcgtgctcatcttgtgcaagagaccgttgaaacatgctgtaaagctggtgcacttaagtcgaaattgcttttcgtcgccacagggcaaagtgccttatccgggttgcaaaacctgcaacgccttatggggcgtttccagatttctgttcagcttgaggatactgatgtcgatgcggtaatccggaaagttattctccagaagaaagaaactgccagagctgagatcgaatccgtggtacatcataacctcggtgagattaatcgtcatatgagtggttctgttattgaagctcataaagacgatgaaaaatggatggttgcagactatccgttactgccagtgcgtcgtcgtttctgggagcgagtccttcctgcgctggataaaaccggaaccggatcccaactacgaaatcagttacgtgtagtgcatgaggccacaaaatctacggcgcttaaaccgttgggttcagttgtccctgccgattttatctatgaacaaattgcaatcaacctgctacaaacgggtgttattggtaaagagatctacgaaaagatagctcgcttcaaggctggggacgaagatgaagtcctccagggtagagtgctttcgttgatactactcattagtaaactaccaacagatatcaatcacggtattgcctcaacggaagctttcctcgctgatttgcttctggaacatttaagtgatggtaagcatgaactgagagcaaaattgccacatttaattcaacaactggttgatgacggcgacttactgccaatgaatactagtgcaggtgttgaatacaggttgcaaacacttgaaagccagcagtggcatgatactttcaaacaacaacaaaatgatctacgcggtaacccacagcgtttagaaacgttccgcagcctcgaaataaaaaaccgtgttaacactgccctagggtttggtagcgtgaatcaaggggtcagtaacgaaccccgtaagatcaccgtgtgtttcgatcaggatcttcctgccgatgctaaaaaaaatctctatgctcatgtacttgaatgtaaagaaaaagctttcgaggatgcagtgcgtagtgcgaaccctgatgacgccactattttcattcatgttccatccattcgccgtaatgagctactgagcgcaattgttgattttaaagcggcggaaacaactctggaagtgagtgggataccctctacggatgcgggtaaagacgctcgcgctgcaatggagcaccggaagtatgaagctgagcgcaccaagaaactgatccttaaagaaattattgatggtatccaggtacaaatggctggtgggagcgaagtacttggtgacacgctagttgagcagttccagaatgcaggtaagaaagcatgtgaacggctctatacagagtttaagcaagcagatcaaagaggttgggataaggtatttgagcgtgcaagtaaattcgctgatgccaatgctctggaagctgtaggccataatgatgaagtggaaaagcaccctgtctgtgtcgccattaaacgctatatcggtgttgcaaaaactgggggagagatacgagaaaactttatgtctgctcctttcggctggccgaaagataccgttgacggcgctctttttaccatgttggctgctggtgtattgaaagcaagcgactctcaggaaaaatcagtcgatgcgaaaagtttggagcgcagcaaagtctctcaaaccaactttcggcctgaaaccgttagcttgacgccacggcagttggcaggcattcgaagtttgatccatgcgattggtttgaactgcaccaatggtgaagagcaatccaaattaagagatgcgatagaaaccgccaagcaattggctcgtaaagcgggaggcgacgccccattaccattaccaccaaaagcagaattacttgttgaagttgaaaggctttctggtaatgaacagctaatggctgctttcgaacgacatcgcgatattatcgatgaagtggagagttggaaagggcttgctgaaaaagtgttcgtcagacaagctcgctggggcgaactaaaatcggcgcttaagtattgccaaaatttagttggttttgacgagctcatgaacgaggtgcatgcgattgagcaaaaccgaagtctgttagccgatcctgatccagtacagccgttgctgaagcaggtaattgaaaaaattcgcgttgcgattttgaaaaagtacgaagattttcaaactgaatataacgagtgtctaaaggaattgcatgaagatgcaatctggagccagctttctacagagcagcaggagcgattgctgacaaagcatcatctggataacctggaaatgtcaccgttatctgataacgacagagtgctcgattgtattgaaaatacctcgttagaacagtggagtgataaaacgtctgctttggcaggtcgttttagccgtatgcggcaggatgcggttgatatgttagtgcctaaagcaaaaatcgtacttttaccaaaatcagtcattgaaacagaggctgagctcgattcctggttggcaaaagttagacaagaagttatgtccgcgttaactgaaaatcgtcctgcatcgttgaaataa

SEQ ID NO: 145171 - DNA, 3447 bp, Enterobacter cloacae
atgcgaaagtcactggataaaacgcttagaaatcaactggaaaaagtcgttgtcagggcccgagaactgatagaaaaagctgcatcagaagcattaatacgtttaggggtggagacggcggaagctccggcatacctgaatgatattgagcgtaagctgcgtaaccgcctgcgagcccatgcccgtcagttgggggacaagctgcagtctaatggtgtgcagggaattgaacgcctgcgggcggaggtcagctatgagcactggcatcgtatgttgtttgcccgctttttggagcaaaacaatctgctaatgctggataaatacctcgctgtctcgttgagcgactgtcaggaatatgctgaagaagaaggttgtaaagatggctgggaactggccggcaagcttgctcagagaatgctgcctcaggtatttagggtcgattcccccatatttgagctgcaaattcccgtcgaccgcatccgcgagttagagaatttgattctgacacttcctgcagtagtatttcaggctcaggacagcctggggtggtgttatcagttctggcaaagtaaacgtaaagacgaagtaaatgcggcgggtattccgattggtgcggatgagttaagcccggtcacacagctgtttaccgaaccttatatggtgagtttcctgctggataacagcctgggagcgtggtgggcgaaaaaacagctgacggatgcggatttacgctcggccagtgatgagaaaaccttgcgtcaggctgccgctatcgagggggtgcagctggaatatctgcgttttgttaaaaccagcgatgagcagggggagttgtggcaagccgccggtggctggtttgatggctggccacaggaagttcgtgcactgaaagcgctggatccgtgctgtggttcagggcattttctggttgcattattcctgatgctggtgccaatgcgtatgcagcttgaaggacttgatgccagaagcgctgtagataaggtgcttgctgataaccttcatggccttgaacttgacagccgctgtgtggagattgctgcctttgcgctggcactggaggcctggcgatatcccaatgccggaggttaccgtaccctccctgcactaaatattgcctgctcagggctggatgtcagcgcagctacccaggaatggctggcgcttgctaaacacaatccggatatcagcgaggcacttaattggtttacccgaaccttcaaagatgctccggtgctgggcagcctgattgacgtcaatacggcttattacgaaggaaaaactgaaggcaaagcctccccctggcaggttctcctggatgcgaaagttgcaacagatgatgaagcaaaaacagcccaagtgacagctcagggcttagcaatgacagcaaaattattgtcgggaaaatataatctggtggccaccaacgtcccttatctggctcgaggcaaacagtgtgacatcttaaaagatttttgtgaaaactacttccctgaagcaaaaaccgatctggctacagtgtttcttgaacgttgtcttgaatttagtcctattagtggcacctcttcaatcgtgctaccacagaattggctatttttgtctagctatgaagatttgcgtaaaatattgctagcaaaaatgaattgggggttagttgttaagcttggttcaggtgcttttgatactattagcggtgaggttgttaaggctgtgttgatctctttatcttcggcttctgaacctagtggtgatgacttttgtggtatggatatttcagataatagaggtagtaaagaaaaatcagataaattaaaacacgaggcttttattttattaaataaaaaacagcaaatgaagaacgctgagactagagtgatcattgatgataatgataatgcactgcagactagattaggtgatttcacgacacttcatgaaggtatgtccagaggtgatacatcacgttatgatcgcgctttttgggagttaggaaaagtaactaaagattattcattttttgtaaactcccctactttaacggaagactattctggtcgagagttaataatacattgggaaaaagggcaagggtcattggcaaagagtgatggggctcggattacagggtataaagcatggaactcttatggagtttttgttgcgagaactgggggtttaaaagcaactctgtccgcgggaaatatgcatgcccaaaatggagctgttttactctgtaatgatcaggatcatctaaaagcactatggtgttattgttcaaatgaaatgttcaataaaaacattcgaaaattggattcaaaaattattgtcgcaagtggagcatttctgtcagctcaatttgatctggattattggtctagagtagctgaagaaaaatatccccacggcttgcctaatccctacaccaatgaccccacccaatggctttttcacggacacccttgtggttctgtcgtttgggatgaagataaaaagaggactgtcatttcggataagcgtacccatgagacggtgctacaagttgcagttgctcgtctgttgggttatcgatggccagcagagctggatgacaaaatggagctggctgatgagatgcttcactggcttggtaaatctaatgaactgcttaaactcgtggatgatgatggcatagtctgcctgccagcacttcgcggggaaaaagccgctgcttctcgcctggaagccatgctgcaggctgcctacgaagaggactggtcatccagtgttctcagtgatctgcttgccagcgttggtagtaagagcctggaaaactggctgcgggataaattctttgaacaacattgcaaacttttccagcaccgcccgtttatctggcaaatctgggatggtcttaaagatggattctctgtactggtcaactaccataagctcaattatcagggtttagagcgcctgatttatacctatcttggggactggatccgtactcaggagcatggtttcaaagaaggcattgatggtgcagaaagtcgtttgatggcggctaaaaacctcaaagactcgctggaagccatccttaaaggagatgccatcaccggcaagagtggtctcgacatttttgtgcgctggaaaccgttacacgaacagcctatgggctggaacccggacttaaatgatggtgtgcgccttaatattcgtccgtttatgcaggcaccagatgtggataagaagggggccggtgttttacgcactaagcccaatattaagtggggtaaagaccgcggcaacgacgttgaatcggccccctggtattatctgggcctgcagtatggtgaaaaagagggggcgcgtatcaatgaccaccatatcagtcttgcagataaacaagctgccagagacgaatatgaaaataaggaaaatcacggatga

SEQ ID NO: 145172 - DNA, 1800 bp, Enterobacter cloacae
atgatcaaatcagtattcaactatccggtgtcaaccttgttggatattgaagcaggggtggtatatgccatcccacgttaccaacgggagtacacctggggtaaatggcaatgggatgccttgtttgaggatctattagaaaatgaccttaattactacttgggatcgattatctgtatcaaccaaagtacagatacgctggctctgcagcagttagagttagtggatggccaacagcgaatgaccacattgtcattattgttagctgccatttatgcaagctacaaccagttaggcattgaacttgagatggaacagcagatagagctgtataacctgaagcataaattggtgctgaaaaagaatgcggaccagccccgattagtacctcaggtgcaaaatgccaaccagcaggattacctggcggtgttgaaagaggcaggcattcttaaagaagctgagtgggtttccaatgcaggtaatcgtcgggtatttcgtgcctatcgacattttttaatgcgtattgaacagtatgtcagtgatagcgaaaccccattgcaggcactgaatgcgctacttgataaagtcaatgcatctactctggtaaaaatagaggtggcaagtcattcagatgcttacaccctgtttgagtcacttaacaatcgcggtgtgcctcttaccgcgattgatttaatgaaaaacaagctactggcgaagatcgaacagattgagccgggcagtattgataagtcttttatcagctggaccaaagtgatggaagccctgggggatgattatggggtacaagagcgttttttccgtcagtactacaatgcgttcaagcctgagttaaaagatatcgtcaatgtaccagtagcgacgaaatctaatcttatacaaattttcgaaaaattgattgctcatgatccgcatcaattcctacaagctatgcgcagtcattctgactggtatgcgcagattgtagggaattgcgaagttccggatgaacctaaactaacaaaactgcttaaaagtctggatagaattcaaggcgctccttcttatctcttattgctaatgttgtttgccagacgacaggatttagcgttgagcattgagcacattgaaaaagtggtcactttcctgatcaacttctttgtccgtaggaacaccacagatgtgcccgctactcgggatttaaaccgcatatttatggagttaactgaaattctgcaaagctgccacggtgagcaggttgtcagtgcgattgctaataccctagggtctgtcagtacctctgatgagcatttccgccaagcgcttagtggcggtctatacgaagaaaatagctgggtctgccgctttatcctgtgtgctcttgaagaaagcatgatgaccaaggagaaccaagtagacctatgggcagtggaaggcaagcaatatgtgtggaccattgagcatgttttcccacaaggattaaacatccctgattcttgggtagatatgatagcggatggcgataaaacgttggcggagcaatatcgtcaaagccatgtgcataaacttggtaacttgactatctcgggatacaacagttctttagggaataagtgttttttggaaaaacgcgatcgtacgacccgggataaacgtcctgtaggctacaacaatggtttgtatctaaatcaggagctggctattactgagacttggtcaatagtgcaaattgagcaaagaacaaccgcgatggtagataaggcactaattctgtttagtttaccgggtgtcgtcgggagataa

SEQ ID NO: 145173 - DNA, 2037 bp, Enterobacter cloacae
atgcaagtaattgataaattgatagagcagctacggggtagtgcacattttaatcctgcggtgcaggaggccccagcagcggtgctatggacagatgaagcctgtcaatggcaaagtgccatgccattgattaaacaatttattccagagctgctcgaacttggtgattatcaaccagagcagcggactggtccggctatttggttgaagtgtgccattgctggggtgttggaagatgttatgttacctgaaggtcgtacaccaattatctatcttcccaaaattgggcgaaaagcgttgcgcgctatcgaagattgcccggactatttacgtcctttagcagaattacaatatcgtgggtgttggtgggcctataatacggcaggacgtgattggagtataagttcttttctgacaaacccacgagttgggcttgaattagacgtagcaaaagataaaaacacattagaaattatcccccaaatcttgaaggatcttttagaatcccgtgttgaagaattacaaggaaagcggttagaggctaaagattttcaatcattagtatttaatgatcctattaaagatctacttgggtggctgaataatcccgaagataagcgtaagcagtgggacgacaataaatggtcgcttttcagtaatacttgctcaagtcagtttggttatgaaccaacagatgctaattattctcaaatgctcgcatcccttttatctgcccaaggggcgtggcaagaagtgtggcagcgctttgaagataccgcacataacctatcaggattaatccttgtccttcgtgatgtaacccctgatttagctgctgatttaagtcattatcctattgaaaatactcgcgatgaaaaaagccttgccgatgcgcttgctggccttcctcaacttgatgtaaacaaagttagaggaactatctgttcactatatcaacagaataaagagcgcgaaagctggctttggtatcgattaggggaatctaaatacctcgagattttggcccatctggcaaaagtcgctgaattgacccagcaagtgttcaatcatcagtcaccggaagagatggcagagctatatcaggagtgcttctggcaagtcgatgctgcagcgttgcaggccatggcattggcaaaagaaccgggccaacaggaattagtcgcaaatgtattaaaactaatatattccccttggttgaacgaggtatcgcttaacttccaacagttggttaaaagaaaaggatatcccgggaatactgaaattaaggaagcgacagctacttaccaggttaaagggatggtagtgttttttgtagatggtttgcgttttgattgcgctaaagtattagagcgtaagcttactgcgcgtcatttgattgtcgataccaaaacacaatggagtgctctgccatctttaactgatacagcgaaagctgcggttactcctgttgctgcacttttgaacggtgcttatgacactcaggattttaagccttcagtagtggcaacgggtagtgagtttagtagctatcaattaaaaaaagcattggcacaacaggggtggcaataccttgaaggattggatactggtgagcctaatggcttagcgtggctacaaacaggtgacctggataacctgggacatcagcagcaaagaaaattacctcttggtattgatgatgttcttgaagaaatagctgatagggttagctatttgtttgaagctggatggaagcaaatccgtattgtcacggatcatggttggttatggcttccagatcaattacctaaagcagatcttgaaaaaccattggttcgtaagtacttatcaagatgtgctattctcaaggataatgccagtacgaatttgcctcaggtagagtggtattggaattcctcagtgtcacttgccatggctccaggcatcagtgcatttactgcgggagattactacaatcatggtggcctaagtttgcaagaatgcctgacacctgtaattaaagttactaaggactag

SEQ ID NO: 145174 - DNA, 696 bp, Enterobacter cloacae
atgaaatataatgcgctttctttttttaagaggttgcctttgttaaagtttaatttaggttttggtgctaagttagttgctgagatgccggtctttttgcatcggaatagtaaaattgatgggcctgtttaccttggggcttacacatatcttggcgaaggatgcctttttggagctgcaaggctcggtcgttattgttctgttggaccaaatgttactataggtttaggcgtacacgaagttgggtttgtttctacacatcctttctttttcggttcaaaaaatggttttgatatacctgatggaataggaataccaagggatttttcccaacaaaagtatcgagcctctgtcataggtaatgacgtttggattggggctaatgcgatcattatgcggggggtcactatcggtgatggtgctgtgattgccgcaggggccatagttactaaagatgttaagccatatgaaattgttggaggctcgccagcaagaaagatacgtgacagattctcgccagatatagtacaaaaaatgttagaaattaattggtggcagtttgatatttcccactttgttggtttagattcatctgatcctttaaaattcatcgagcagcttgaaaagatcgaaaataaaaaaatagcatcctacaagcgaatcactaaaaccgctagtggagatacgatctcttag

SEQ ID NO: 145175 - DNA, 1830 bp, Enterobacter cloacae
atgagtttttccagaagaaagcttttaagcttcatcatgcctgcaagcattgtaggcattttgaccaaaactaatgatgttattgcgcaaaatgatgttaaaacttcacatgaaatcaatcataataataactctactacaagtgatgacaatgtcatagtatcaaatcttttcaaaaattctgtggatcagactcaaaatgaaattaaccaacaaagagtctcggtaaaatcgtttggtgcaaaaggagagtatattccaggccaggaaggttctgatgatacaaaagcgttccaacttgctgcagactattgctcagaaaataatggcaggacattaataatacctgctggcaattatttaataactgacaccatctctagcttacccttctatatggaaggagaatctggaagctcgagaatttatatcaaggggatgactggtaaagtagtttttgatatgagtaaaccagcaaactctatcggcagaattattggctgcaaagatattgagtgggttacggagaatagttatattgactctgtgctaaaagggccaactaataacacagaatataataagtcttttttaagatatataatcgtcaacaatttttgtcatggcggcaagcgaaatgataatgcctatagtttttgctggaattatagtgcagccgcatggtttagaatcggtgattgtgttggcgccataatcgaaggcaacaatattcatggtaaatttgatatacaaaaagaacctaattctcaatttgacgaggctgctttcgtactaaatgctgacgatgcaatcatgtctgcaagaatgtctaacaataatattggtccaattaaaactgcaataaaaatcatcaataatgtttttatcactgcgcatgataatgatattttcggaacattagatggaatagcatggtcaggaacaagcaaatttaatgagccaaaattttatgctaacaatatcaattgtcaaagaaatgggattatatgcgaaggagctagttatctcaacttcacaaacaacactatacgcagacatcgtaaaggatggaaaaatgcgagtagcacctggcatggtttgatggtgagcaatgccaccgatataaaaatcactgataacactattcagcctgatgagagcgacggaacttttaaaggtgattgcattgctattaatttagagaacgtgagtatttccagtattaacaataacttcgttgggagtggatgttcaactggaatcaacctaattaattgcgctggcttaaatttaaataacatcatttctgcacaaaataagaaaagcgacactctttttctattatcaaaaaacagccgtttcataagcgtcggtctatactcacttgtatcaacctttgccggtaaaatattaaaaaaagatgaaactattaaagcaccagtaagcatgttcaataataattttgatctgcaaagtaatgcagatgtagtatttaatatgacaagggtaaatgccgaaaatgatatgaagcagtggcgaactactgttggtacaaatcaacttagccgatctatagtaagtgatgatgacaaattatttaactatgaagtaatcacaaggaccgctgataataaaattgaaaaaatcgcattaagagcacaaaaaataaatatcaataatggccctgacctaataactggtcaaggcgatccgaatggaagaattgaagcctctagaggttctttgtatttgcgtactgaccagaatgccaaaaacagcctatatgttaaagaatctcgatctggtaagtttggttggaaaccaaagtga

SEQ ID NO: 145176 - DNA, 987 bp, Enterobacter cloacae
atgtcactacagaatttaacgcgctttccccgcctggagttcatcggcgcgccgacgccgctggagtatctgccgcgattttctgattatttagggcgcgatatttttatcaagcgtgacgacgtgacgccgatggcgatggggggcaataagctgcgcaagctggagtttctggcggctgatgcactgcgcgaaggcgcggatacgctcattaccgccggggctatccagtcaaaccacgttcgtcagacggcggcagtggcggcaaagctcgggctccactgcgtggcattgctggaaaacccgattggcacgcgggcagaaaactatctcaccaacggcaaccgcctgctgctggacctgtttaacgtgcaggtcgaaatggtcgaggcgttgaccgacccgaccgcccagctcgacgagctggcgacgcgtctggaagcgcaggggttccgcccctacgttgtccccgtcggcggttcgaacgcgatgggcgcgctggggtatgtggagagtgcgctggaaatcgcgcagcagtgcgaaggcgcggtaagcctctcctccgtggttgttgcgtccggcagtgccggcacgcatgccgggctggcggtggggctggaacaactgctgccggacgtcgagctgattggcgtgacggtgtcccgcagcgtcgccgagcagaagccgaaagtggtcactttacagcaggcggtagccgagcagctggagctgaaggcaaaggccgacattctgctctgggacgactattttgcgcctggttacggcacgcctaacgaagagggcatggaagcggtgaagctgctggctcgcctcgaggggatactgctcgatccggtctataccggcaaagcgatggccggactgattgatggcattgcgcagaaacgctttaaggatgaagggccgatcttatttgtccataccggcggggcgcctgcgctgtttgcctaccatcctcatgtctaa

SEQ ID NO: 145177 - DNA, 375 bp, Enterobacter cloacae
gtgaaaggcgcggacggtaccgtcggtaacctgaaagtcgacaccgataagctgaaaaaagcgctgaccgacaacccgaacgccgtacagcagtattttgtcggtgacggaaagaaaaccggtatggcgacccagatgaacaacacgctgaccaccatgctcagcaccagtaccggcagcgccggggtgatccagaacgcgaaagacgggatcaacaaaacgctgaaaacgctgggtgaacgttacgatgccatggatgctcaaattgaagccaccatggcgcgttacaaaacccagttcaccagtctggacgtattagtcaccaaaatgaccagtacagccaactacctgacccaacagttctcacaaaagtag

SEQ ID NO: 145178 - DNA, 558 bp, Enterobacter cloacae
atgcttattgggtatgtcagggtgtcaacaaatgaccagaacaccgcattgcagcgaaccgcgctggaatgcgcaggatgtgaactgatatttgaagacaagatcagcggaaaaacctcggagcgtccagggctaaagcgagtgcttaagaccctgggaaagggggatacgcttgtggtatggaaactagatcgccttgggcgcagcatgcggcatcttgtcctgctggtcgaggagttacgggaccgagatatcaattttcgcagcctgaccgacagtatagatacgtcaacgccaatgggacgtttcttctttcacgttatgggggcattggctgagatggagcgtgaattaattgtggaacgcacaagagccggtcttgctgctgctagggctcaaggtagagtgggaggaagacgcccaaagtttacatcggagcagtgggagcagatggggagattaattgcagctggagagtcacgccagcgggttgcgcttatttttgatgctggtttatccaccctttatcgaaggttcccggcttcatcatttgaatga

SEQ ID NO: 145179 - DNA, 231 bp, Enterobacter cloacae
atgagtgatgagtttgaccgggccagtgaaattgaaaccgtcgaccgggaacgggtgttaaacaaccatgtaaaccgggttaaagaggcgccagagcgttacggcttttgtaatgactgcggtggtgacattgaggataagcggctaaacgctaagccggatgtcgccacgtgttttacctgccagagcatcagagaacacagggggcaccgtggactgggaagtcgttaa

SEQ ID NO: 145180 - DNA, 603 bp, Enterobacter cloacae
atggatccgataaccctttccaccgtcgcctcggttctgctcaaagccgggccatctttactgcgcacagtgggtggctggttcggtggtgatgcggcgaagaccgctgactccgttgccggtgtggttgaaaacgtggggaatgctatcaatccggcagaccagcagcgcgtccttgagcagaagctggcgcagctcccgcccgagcagttcgtccagcttgagtccctcaaggttcagctcgaacagttccagctcgaacgtgacaaggcaacgctggctgaccagcaggccgcgcaccatgagcagcaggagaccatccgtaacggcgataacgcgacggacgaatatgtccgccagactcgtccgctgctggcccgtctctccctctacagcagcattctttacgtcatgttgctgtcactcggccagcagatgggcgcagtcgcaggtggttacggccataactttgcgatgcccgcacctgactgggacattgcgttgatgctggcaaccccggcgctgagttatctcggtttccgtacgctggatggctttgcccgttacagcaaatccagcaaacacaaggtgcaggttcaatga

SEQ ID NO: 145181 - DNA, 384 bp, Enterobacter cloacae
atgttcaacacgattaaggcctttcttccgccgttgtttcgttccggctggacgctggttgccctggtggcactctcgctgctgctctgtagtcagcacagtctgcatctctttctggtctggtggctggcctttgcgggtgtggtactcattgcactgagtatggctctcggtgtctgtagcagtcagcgaataacccgacgcgagcaggttctgtactggtgttcgtggctgattttcgtgggcggtatctgctgttttgttgccactaatttattcacgccatcctggcaattgttcctgatgtatgtcctcggctcgttgtgtggatacctgttcagtaactgggtgaaacgtaaggagctaatcgcatggatccgataa

SEQ ID NO: 145182 - DNA, 228 bp, Enterobacter cloacae
atgggtaaaggctgggatgagtcactcaagctggggcggcgtgaccgcctcaaaaaggaggttctccaccgtatggccggggggccaaaacccgaacccattgattacaccggtcatgacggcacccatgccagcttttacatgcgggggtggttgtcggtcgacatacgcgacatcgtctggcagtgccagcgatacaaggaaaaacataatgttcaacacgattaa

SEQ ID NO: 145183 - DNA, 582 bp, Enterobacter cloacae
atgtccttcactgcattctcccctgtatttgctcacgcgctttcattcgtcctcgttcgtgaagggggctatgtcaatgaccccaccgataaaggcggtgagactaactatggtgtttcagacctgcgcgatggtctggccgacggtaaaaccgatattgatggcgacggtaaacctgacgtcaaaattaaagacctgaccaaagaacaggccgggttgatctaccagcgtgattactggcaggccgctaaatgtgatctctggcccgatggtatttccctctttgtttttgattctgccgttcaacacggtgtcaaaaaagctgtccagattttgcaggccgctgtcggtgtttcctctgacggtgttgttggccccaaaaccgtcagcgcagtcaccggtgctgatgctgaatggctcctgacccgttgtttccttcgccgctcccgctattacgccgacatcattaaatccaattcatcccagggcaaatacctcaatggctggtttaaccgccttgatgagctggcgaacgcctgtcaggaggttgtcggcggccagttctctgtcacccggagctaa

SEQ ID NO: 145184 - DNA, 510 bp, Enterobacter cloacae
atgaataaatatctgttattggcagcatttactttttcattgtcagctcaagctgctgataattttgtgcagacggttaaagatgtattcatgaacaatacaagagttgattacaccgactggtataagaaaggtgatactgcatttgctgagtttgatggtatgtatttgacggtttatcagcacctcaaagcggctgtaaatgagcaggaaatcgacattaaaatggagtttacaaaaggagataagcgacctgaatcagaagaatttatgcaagcatcaacgattttatgcaagcagatattcggcaagatagtcctaccacaacggttgcctcaaaaagcatccagttgggatgaggaatctgagaaagatgatgagcttagctttatggatgcagcaaatttacaaaaagtaggtaatgaaactcagcgtaagattgttaatggatgggatgttagtattaggcgatcagtgctcctgacatcttgttccgctagaaaaatatga

SEQ ID NO: 145185 - DNA, 393 bp, Enterobacter cloacae
atgaataataacggcgaattgtttaatgatttccaggacgacagcatccttgatcatgttgatgaacagatggaaagctctcgtttcccctcattgctggctgagctgaatgcactcttgcgtcacgagctggagcgcttgggggcagacccgaagcattccatagaacttgtggcagcgattagtggcaaaattggcgggatgcaggtttactttccacgcggtcagagcctggaattcttgatccgcgatatgaaaatttggcgggatttcaccggtcacaatgtccctgagctagtggagcgctaccacgtcacctataaaacggtgtataaagccatcaagaggatgcgtcgtttagagcatcgcaaacatcagatgccattattctga

SEQ ID NO: 145186 - DNA, 552 bp, Enterobacter cloacae
atgagccgtaaaggtgtgattcagcttatccatatcgcccgaacgcagctggcactggatgatgaaacttaccgctcgatgctggatagcgttgttcccggaaaaaccagttgccgcgagatgactgataacgagctggaaaaggttatcaaagtgctggaggggaaaggcttcaaacgctcgcccgcgcgttctcccacacgtagggctaagccaaccgacatcagcaacaaaatccgcattgtctggcggttcatgttcaaagatggctttctggaggacggcagcgacgttgctctcgaccattgggtgcagcgcatcaccagtctaaagaatggcggcgaaggtgtcgccagcctttcctggctgcgcggggatatggtcatctccgtgcttgaaagcctgaaacagtggcatctgcgcgtaatgcgcgaatcaatgactgagcgtggaattatgatgccagtcagtccggtcaatggtcgcgagttacgggactatgattctgttcgttcagcattcgtggcaacccgaacgggggaggctaaatga

SEQ ID NO: 145187 - DNA, 156 bp, Enterobacter cloacae
atgacaccgcaagcactgaaatgtcgccgttgtcggaaaatttactcgcgtgacgagcaggttccagtgaaaaaggaccgttacggaatgacgactatgggttgtccaaattgtggggcctcggtgtttactctggttgaagggaaaaaatcatga

SEQ ID NO: 145188 - DNA, 198 bp, Enterobacter cloacae
atgacctctaagtcactgcccccacgactctctgaaaaggaaatggcaaaactggcacatacgacaattcaggatttcgttaatgcctgcaactgcaagtcgaaggacgacattctgctggctctgagctacatcctgagcatcgggctggccgctggagaaacggttaaatacggtaaagcggaggtactgcaatga

SEQ ID NO: 145189 - DNA, 594 bp, Enterobacter cloacae
atggctcgtactctcctggtcgtcatggggcaaaaacctgttgcttataccgacgaagctgaactgacttttcctcatgcgacatcagatatgtggcctgctccctttaactttggaaaagatgttgctcttttccgtcatccttcatcaggacagatagtgctgaatgagaaagctgcctttgaggcatggctggaagcggactattcacctgaccgcagtggtgcaaccagcgatatggatgaacagttttttctcgccttgtgctggcatatctggttggctcgggcagctctgaccgaaccggctaaagagcaacagtgttctcccgccgtcagcgatgtcattgccgaacgtctgcgtcagcaatctgttaaagggtttactactcagcaggatgattcctacataggcggagaactggccgcagcggccatatgttatatcgagcctatggaggctgaatcctactggcctgccgactggtttgatgacagtttcaagccatcagattatcgccgcaatctggtgaaagcaggtgctcttctgattgctgaaatcgagcgttttgatcgccagcaggaggctctatga

SEQ ID NO: 145190 - DNA, 618 bp, Enterobacter cloacae
atgaatagtcaaaataacgtgccagccggttatcgaattaacgctcaggggcatttagtgcctgagtcgcaaattaagccgctggacacattacgtgatgaaacagtgatgactatcgtcactgcggcccgccagctgcgtcaggcgatggcagagtttaaagttgcttccatgcagcagattggcgactttaccgacctttcggcggcggagtatggcgtggagttcggcggcactaagggcaacgtctcgctggtcagctttgatggtcgctacaaaatccttcgcgccattggcgagcatcgcgtttttgatgagcgtatccaggctgcgaaaaagttgattgatgactgcatcagcgaatggtctgccggtgccgatgccagaattatggcgatggtagaccatgcgttccgcgtcaataaacagggccagattgatattaatcaggtgctggggttgcgctctctgaatattgatgacgtcaaatggaatgaagcgatggacgcagcggctgatgccattaaggttaccggaaccagtcagtatctgcgtatttatgagcgtcagggtgacgggagctataaacaaatatcgctcgacatggcaaaactctga

SEQ ID NO: 145191 - DNA, 255 bp, Enterobacter cloacae
atggcaaagattactgcttatgcatgggcctctggcctgattgaattcggcgctcaagtcccggagggtgcgttacctattatctctggcgaagaggtgcgtgtcagggaattgattgatgtttgggcacggcattctcgcacgacagaccaactgctcgtccctggtgtacccgaggccgccagccagcatgaaggttgtaatgcgctgatgaaatttactgacctcgtcacccgcgaatatctcgaaaaataa

SEQ ID NO: 145192 - DNA, 258 bp, Enterobacter cloacae
atggcaaaagtcactattgaatttaaacgcaattttgctaagcgcgttgataacaaggttatggaaggtattacgactgatatccatattgaatttcaggatgaccaggacactcctgccggtgctctggctttgattatggcgtcagatcgggaagaatttatccggctggcaatgaataaactcgttcaaaagatgcaggccatgggggacgacgcccagggcgaaatttatcaacccaccagctccaaacattaa

SEQ ID NO: 145193 - DNA, 240 bp, Enterobacter cloacae
atgattaccgaacgtatcgcagaacacatcagcatggcagaagcggcgcaggcatggttgcgcgcgcggggtagtcgcgtgactggcgttcgggttttcatgcgtcgtccgttgcttgagattgcctgcccgcccgcagagctggttaacagcgctgaccgtattgttgaacgttgtgacactggcactcgctctgtctggattgccagccttgaaggttgccggattatctggcgttaa

SEQ ID NO: 145194 - DNA, 939 bp, Enterobacter cloacae
atgacgcaaattaaccatgatgttctccgtactactgtaaaagagcttatcgacagcaaagaaacctctggtgcagcgcttgctcgtgaaaccggtctttctacggcggtcatctccacgttcattaacggtaagtacaaaggggataacgatgcggtcgccatcagcctgaacacctggcttgaatcacgtaatgcgacactgaacactcttccggtgcggcctgactatgtcgtgacgcctacctccgaaaacattacttctgctctgacctgggcacaaatgacgcacaccattgcgctgatttatggcaatccgggcgtcggcaaatccgaggcactgaaagagtacacccgcaacgggaataacgtctggcgcatcacggcgagcaaaagccgcaccaatgagctggaaacaatgtatgaactggcgctggaaatgggtatctccgacgcgccttatcagcgtggtgcactgtcccgtctgttgcgccgacgcctgcgtgacaccggcgcgttaatcattatcgacgaggccgactggctgaactatgacgctattgaggaactgcgcattctccaggaggaatgcaacatcgggctggcctttacgggaaaccataaggtttatgaccgtctgacaggtggaacgcgcagcgtcgactttgcccgtctgttttcccgcgtggcaaaaaaggtcgtaatcaacaatatcaaagccggtgacgtcgacgcgttctgcgatgcgtggcacgtgcccggcaaagacgaacgccagctactgcgagccattgctaaacgtcctggtgcgctgcgttcgctctctcacatcctgcctctggcgcatatctatgccgctggcaagaacgaaaccctgaacaccggtcacatccatagcgcgatgatcgaactcggccacgccgaaatcaccgaggaataa

SEQ ID NO: 145195 - DNA, 309 bp, Enterobacter cloacae
atggcggaatgccgctccgcagtggcctttggcgataccgaaaaaggtcgcgaacacagccgtcagcgcaaacagatgatgacgcacaccaaacgtgctgcccgtgcacaacgccggatgagcgctattgaggttaatgatttgctgccgaaggtggcaccacctgagccgccacaacgccatgttgtcgagcgggtatttactgacggcaatgcgctgaaaaaagcgatggaaatacaggaggagcagaacgaaaacgaggtgattttccaggcactgatgaaatcagtaagtaaggcgaaaaaataa

SEQ ID NO: 145196 - DNA, 384 bp, Enterobacter cloacae
atgttcaacatgattaaggcatacctgccgccgttgtttcgttccggctggacgctggttgccctgattgcgctctcgctgctgttctgtagtcagcacagcccgcatctttttctggtctggtggctggcctttgcgggtgcggtgctcatcgcactgagtatggtgcttggcgtcttttgcagtccgcgtgaaacctgccgtgagcgggtgctctactggtgttcctggccggttttcgtgggcggtattgtctgcttcgttgccaccaatttattcaccccatccggggcactgttgctgatgtatgtcctcggctcattgtgtggatacctgttcagtaactgggcgaaacgtaaggagctgttcgcatggatccgataa

SEQ ID NO: 145197 - DNA, 228 bp, Enterobacter cloacae
atgggcaaaggatgggatgcgtcactgaaacaggggcggcgtgaccgcctccagaaggaggtgctccaccgcatggccggggggccaaaacccgaacctaccgactacacaggccatgacggcactcatgccagcttttatatgcgggggtggttgtctgtcgatacacgcgacatcgtctggcagtgccagcgatataaggaaaaacataatgttcaacatgattaa

SEQ ID NO: 145198 - DNA, 582 bp, Enterobacter cloacae
atgtcctccactgcattccctcccgtatttgctcacgcactttcattcgtcctcgttcgtgaaggtggttatgtcaatgaccccaccgacaaaggaggcgaaaccaatctcggtatttcagacctgcgtgatggtctggccgacggcaaaaccgatgttgatggtgacggtaagcctgacgtcaaaattaaagacctgaccaaagaacaggccggattgatttaccagcgcgactactggcaggccgcaaaatgtgacctctggcccgatggtatctccctcttcgttttcgattccgccgtccagcatggtgcaaaaaaagccatccagcttttgcaggatgcggtcggcgttacttctgatggtgtcgctggccccaaaaccgtcagtgctgtcactggcgcggatgccgaatggcttctgactcgttgcttccttcgccgttcccgctactacgccgacatcattaagacgaatacctcccagggaaaatacctcaatggctggtttaaccgccttgatgagctggcgaacgcctgtcaggaggttgtcggcggtcagttctctgtcacccggagctga

SEQ ID NO: 145199 - DNA, 321 bp, Enterobacter cloacae
atgattggcgggattattataaatatggtgattgtcatttgttctttttgggtttttatcgatgcgacaaaccataacattggaacgtattccgtctacgaaaagggctgttggcgcaagaagggttttcctcccattgtttggggcgttggctcgctatttttgttacctttttttatctacattttcgatagaaaaaaactaattgatacggccaataatactcctgtcaaaactgacaagagtttaggtttcctccttttcttcctgattacatcaggtctaatgatgtttaattttagtgacgtcttgttctactag

SEQ ID NO: 145200 - DNA, 399 bp, Enterobacter cloacae
atgaataacaatggcgaattgtttgatgatttccaggacgacagcatccttgatcatgttgatgaacagatggaaaactctcgtttcccctcattgctggctgagctaaatgcactcttgcgtcacgaactggagcgcctgggggcagacccgaagctatccattgaacttgtggcagcgattagtggcaaaattggcgggatgcaggtttactttccgcgcggtcagagcctggagttcttgatccgcgatatgaaaatttggcgggatttcactggtcacaatgttcctgagttagtggagcactaccacgtcacttacaaaacggtgtataaagcgatcaaacgaatgcgtaggattgagactgcaaaaaaacagctttcattgaaaatggagtga

SEQ ID NO: 145201 - DNA, 552 bp, Enterobacter cloacae
atgagtcgaaagggcgtgattcagcttatccatatcgccaggacgcaactggcactggatgatgcaacctaccgctcgatgctggacagcgttgtccccggcaaaaccagttgccgggatatgaccgataacgagctggaaaaggtaatcaaagtactggaaggcaaaggctttaaacgttcgcccacgcgtgctccagcacgtagagcaaagccaaccgacatcagcaacaaaatccgcattgtctggcgatttatgctcagtgacggttttctggaggatggcagcgacgttgctctcgaccactgggtgcagcgcatcaccagtcaaaagaatggcggcgaaggcgtcgccagcctttcctggctgcgcggagacatggttgtctccgtgcttgaaagcctgaaacagtggcatctgcgagtgatgcgtgaatctatggccgggcgcggcattatgatgccagctaacccggtcaatggccgtgagctacgcgattatgattccgttcgcgcagcattccttgcgacccgtaagcgaggtactcaatga

SEQ ID NO: 145202 - DNA, 471 bp, Enterobacter cloacae
atgatgaatactcaaattgaattgcttattcagcagattcgcaccgatattgaacgcagaaaaaacatgccgaaatttggtgtcagccctgatgcttcaatggttcgcattaacacgattaactccactcagcgcagcttcactgtcgaaacaattgaactgttactggctgagctggacaagatgcaacagcgctccaccgccatcagcgatgtcattgccgaacgtctgcgccagcagtccgttaaagggtttactacacagcaggatgatacctacatcggtggcgaactggccgcagcggccatctgttatatcgagccaatggaagccgaatcctactggcctgccgactggttagatgacagtttcaaaccatcatgtgatcgccgtgacctggtgaaagcatgtgcgcttctgattgctgaaatcgagcgtattgatcgccagcagcagggagaaactgcatga

SEQ ID NO: 145203 - DNA, 618 bp, Enterobacter cloacae
atgaatagtgaaaataacgtaccagccggttatcgaattaacgctcaggggcatttagtgcctgagtcgcaaattaaaccgctggacacattacgtgatgaaacagtgatgagcatcgtcactgcggcccgccagctgcgtcaggcgatggcagagttcaaggttgcttccatgcagcagattggcgattttacggacctgtcggcggcggagtatggcgtcgagttcggtgggacaaagggtaatgtctcgctggtcagctttgacggatgctacaaaattcttcgtgccattggcgaccatcgcgtctttgatgagcgcatccaggcggcgaaaaagctgattgatgactgcatcagtgagtggtcgggtggtgcggatgagaaaatcatcgcgctggttgatcatgcctttcgcgtgaataagcaggggcgcatcgatattaatcaggtgctctcgttgcgccagttgaatatcgacgatgacaaatggaatgaggcaatggacgctgctgctgacgctattcaggtcaccggcacgagccagtatttgcgcatttacgaacgccagactgacgggagttaccgacaaatatcactggatatggcaaagctctga

SEQ ID NO: 145204 - DNA, 255 bp, Enterobacter cloacae
atggcgaaaattaccgcttatgtatgggcttccgggctgattgagtttggtcatccgttgccggatggcgcattacccattatttccggcgaagagaatcgggtccgtgagctgattgatatctgggcccgtcattcccgcaccggtgaccagttgctggtgccgggcgtacccgaggcactcggccagcgtgaaggttgcgatgcgctgatgaaatttaccgatcacatcactcgcgaatatcttgaaaaataa

SEQ ID NO: 145205 - DNA, 258 bp, Enterobacter cloacae
atggcgaaaattacttttgagttcaaacgcgactttgcaaagcgcgttgaaaacggcgtcatggaaggtatcaccacggatattcatgttgagtttgaggatgataaaagcactcctgccggggcgcttgtggtggtgatgtccaacaatcgtgaggaatttgtcaatctggcgatgaataagctagtggacgctatacgggctatgggggaccacgccgaaggtagcgtctttcagcattccggcgctaaacattaa

SEQ ID NO: 145206 - DNA, 240 bp, Enterobacter cloacae
atgattaccgaacgtatcgcagaacatatcagcatggcagaagcggcgcaggcctggttgcgtgcgcggggtagtcgcgtgactgacgttcgggttttcatgcgccgtccgttgcttgaaattgcctgcccgcccgcagatctgattaaaagcgctgaccgtattgttgaacgttgtggcactggcacccgctctgtatggattgccagcctcgaaggttgccggattatctggcgttaa

SEQ ID NO: 145207 - DNA, 939 bp, Enterobacter cloacae
atgacgcaaattaaccatgaagctatccgcgctaccgtaaaagaacttatcgacagtaaagagacttccggcgcagcgcttgcccgtgaaactggcctgtcgacagcggtcatttccacgttcatgaacggcaaatacaaaggggataacgatgcggtcgctatcagcctgaacacctggcttgaatcgcgtaatgcaacgcagaacacccttccggtacggcctgactacgttgtgacgccaacctccgagagcatcacttctgcgctgacctgggcacaactgacccacaccattgcgctgatttatggcaatccgggcgtcggtaagtccgaggcactgaaacagtacacccgtaacgggaataacgtctggcgcatcacggcgagcaaaagccgtaccaatgaactggagaccatgtatgagctggcgctggaaatgggtatctctgacgcgccttatcagcgtggtgccttatcccgtctgttgcgccgacgcctgcgtgacaccggcgcgttaatcattatcgacgaggccgactggctgaactacgacgccattgaagaactgcgcattctccaggaggaatgcaacatcgggctggcctttaccggcaaccataaggtttatgaccgtctgactgggggaacgcgcagtgtcgactttgcccgtctgttttcccgcgtagcgaaaaaagtcgttatcaacaacatcaaagccggtgacgtcgacgcgttctgcgatgcgtggcacgtacccggtaaagacgaacgccagctactgaaagccattgctaaacgtcctggcgcactgcgctcgctctcccacatcctgccgctggcgcatatctatgccagtggcaagaacgaaacgatgaacacgggtcacatccacagcgcgatgatcgaactcggccacgccgaaatcaccgaggaataa

SEQ ID NO: 145208 - DNA, 345 bp, Enterobacter cloacae
gtggcctgctatgacctggacgggcgtttcctctgcatggcggaatgccgctcagcagtggccttcggcgataccgaaaaaggccgtgaacacagccgtcagcgcaaacagatgatgacgcataccaaacgtgcggcccgtgcacagcgccggatgagcgctattgaggtcaatgatttgctgccgaaggtggcaccacctgaaccgccacagcgccatgttgtcgagcgggtatttactgacggcaatgcgctgaaaaaagcaatggagatacaggaggaacagaacgaaaacgacgtgattttccaggcactgatgaagtcagtcagcaaggcgaaaaaataa

SEQ ID NO: 145209 - DNA, 840 bp, Enterobacter cloacae
atggctaaacccgacattatcccccaggaagcgctggcctggctgaaagccaaaaaactgactccgggttttgatttccgtgacgtctggcgcgatgagcacagcatcgggtttaccgttgccaaaatgacaaacctcgatctcctttcagatgtgaagtctctggttgaagaggcgctggctgaggggcagtcgttcgctcaattccgtgaagtgcttaagccccttctggtcaaacgcgggtggtggggccagcaggagatgaacgatcccctcacaaaagaatcccgcgtcgtgcagctgggcagcgaccgtcgcattcgaaccatctatgaaaccaatatgcgcaccgcccgtagcgccggtcagtgggagcgtattgagcgcacccgccgcgccatgccgtatctgctctatacgctggggccatcacgtgaacaccgggcagaacacctgaaatgggcagacctctgcctgccggtggatgatccgttctggcagacacatatcggccccaacggctggggctgtaaatgcggcgttcgtcaggtcagcaagtatgaatatgagcaaatgcagaagaacggcgtcacccgcaacgtgcagcagctcgatgacaacggcttacccaccggacaggtgacgcgggaaacggttcccctgcgaaccactgcgccagaggtcaaacgggtgaagtgggtgaacaagcgaacgggtgaagaagagatggtgccggaagggattgatccgggctgggactacaatccgggcatggcgcgtaaggctgaactggagcgtcagctcagccagaagcaagccgcgtttgacagtgacaactga

SEQ ID NO: 145210 - DNA, 441 bp, Enterobacter cloacae
atgcctgattcgattagcaaggaacaatgggaaaccatcagggctgagctgcaaagccctttctgctgcgtcagattccgctatcaggacacggttattacggtgacgcgtgaacgccagtgcgagagccgcacctgtctgatggtgtatttcaacggcaggtgcaatatcggctggggtaattcgcgttgcgataactacaacccacttactgagcatttctggtttacgaagacgcagcgtcttcacagcgctaagcatgttgctgcgacggagaaagccctgggcaaacgctatgcgaaaaagcatatgccatcgttgtaccaacctttcagctatcgaaccccgttgtttgccagttccaccaccctgatacgccagttccgcaaagtggcagagttgacactggtggccgaagagaacgaggtgctgcatggctaa

SEQ ID NO: 145211 - DNA, 1572 bp, Enterobacter cloacae
atgctcaaacaactcagcggtatgatgcgccgcctgttcagctcgactaccggtgaaaccgtcacggtaaacgataacgaacttaacgaaccccgagcccgtggccgtgcgatgagtatccgcagcccgtcggcaggtatcagcgtggcttccaccctgacccccgggaggctggccgccgtcctgcgtggtgctgccgatgggaacccccgcgactactttatccttgccgaagaaatggaggaacgcgacctccattactcatcggtgctgcgtacccgtaagctgaccgtcgccggtattgcgcccacggtcgaggcggccagtgatgatgagcgtgatgtcatgctggcagatgtgattcgcgatctcatcgaacaaccccagatacccgagctgctctttgacctgctcgatggactgggtaaaggcgtgggcgtatgcgaaatcatctggaatacacgaaccagccaatggaaaccgcgcgattatgaatgggttgatcctcgctttctcaaacccgataaagagacgctgcgggagtttcgtcttatcacggatgagcagcccatcgacggtgttccgttgtcggcaggtaagtttattgtccatcagccacgccttaaatccggtctgccgctacgcaacgggctggctcgcctcgtggcggtgatgtacatgctcaaatcgttcaccgtgcgtgactggtgggcgtttgcggagaagttcggtattcctgtcgttgttggccgttatggcaacaatgcgacacaggagcagattaataccctcattgatgccatcgcctctattgcatccgatgcgggctgcgccatccctgacagcatgaaactggatatgcaggagacagccagccgcaacaacggtggcgtgctgtttaaagagatggcgacgtggtgtgatgagcaaaccagcaaagcggtgttgggccagaccatgaccaccgacaacggcagctcgcgcagtcaggcagacgttcataatcaggtgcgtatggatattgcccgctgggatgctatgcaagtgggcaatacgcttaatgagtttctggtgcgaccgtacattgatatgaactacggcccgcaggaagcctacccgcgtgtgatgctccgcatcaccgagccggaagacctcaaagcctttgtggaagcgctgacgccgctgattgatcgtggtcttcgcgtccaggagtcggaggttcgcgaccgcttcgggctggccgaacccgacagcggcgcagtcatcctgtacccggaagccacgcaacccgccatgacgttgcctgcgcttaaccgcgagcagcttgcgcttaaccgcagccaggccgatgagattgatgcgatggtggccgatgcgctgggcggctgggaaaaagtgggcccggccttcaccagcccggtgcttgcactggcgcaaagcgcgaccagctttgaagagtttctgtctcgcctgccagaactgcagaagactcttgagcctgatgcgttcgtcacgcagctggcgatgctcagtttcaaagcccgtgcgctgggggatgcgaaagatgcctga

SEQ ID NO: 145212 - DNA, 1584 bp, Enterobacter cloacae
atgacgaccaggcccccgctcaattcgctcaccagtcagtctgctgcggccattctggcgggcgagtttgatgccgatcaggtgctgctgccgtatcagaagcgatggatagccgataagtctcagttgaaactggctgagaagtcgcgccgtaccggcctcacctgggccgaagctgctgatgcagcgcttaacggttcgatgtctgccagcgccggtggttgcgatacgttctacgtcggcaccaccaaagacatggcccgtgagtttatcgacgcgtgcgccatgtgggcgaaagcgtatgactgggcggcatcggatatcggcgaagaggtgctggcggatgaggataaggacatcctcgtctatgtgatccagttcgccagcggcttcaaaattaaagcactttcctctaacccttcaaacctccgtggtatgcagggcaatgtcattattgatgaggcagcattccagaatgacctcgcagcgtgcctgaaagcggccctggcgctgaccatgtggggttcaaatgtgcgtctcatctccactcacaacggcattgaaaacctgtttaacaccctcatcaccgacagtcgcgccgggaaaaaacgctattccgttcatcgtattgatatcgaaacggctatcaatgaggggctctatcgtcgtatctgtcaggtgaccaaaaagacatggtctcccgaggcagaggctgaatggctggataacctgctgcgtgacacggccacccaggaggatgcacgggaggaatattactgcgagccgaagaacggcggcggcgcgtacatcgcccgttcgttacgtgaacgcgcggccaccggcactggcccggtgttgcgcttcaccggctcgccggaattcaatgccctgtcggaagggctgcggcgtctggatatgcaggagtggctggagtccgttgtccggccagaactggagaagttgccgcagaacctccgccattgcctcggggaggactttgcccgtaacggcgacctgactgttttcgcgccggtcacggtgaatgacgacaccacccgcaccgttcctttcctcgtagagctgagcaacgtcccgttcaagcagcaggaacaggcgctgttttatatctgcgatcgtcttcccaggcgcgacggcataaagctcgatgccaggggtaacggtcagtatctggcagaacaggctgccgaacgctacggcgaggaagtcgaacaggttcagctttccgtaccgtactatcgcgagaacatgccacggttcaaggccgcgtttgaagactgcgaacttgtgacaccgaagcatgaagacatcattaccgacctcggtgccatccagatttatcggggggtgccgggtatagacgattcccgcaccgtcggcactgacggtcgcaagcgccatggggatgccgctattgcgatcttcctcggttatctcgccagccgtgaagaccatcggcgttacgaactccacaaaatcaacaaacccgccgacccgaaagagcgtgacgaacgtcgccagctacgtcggactcgcggtcttaaaaatcaaagagggctgctctga

SEQ ID NO: 145213 - DNA, 579 bp, Enterobacter cloacae
atggcaagtaaacagcgcccgacccgtggccgtccatcaaaaattgacctgttaccggattccatccgcgatcagctccatcagatgctgcgggagaaacgacacacccaggaagagatccgcgaagccatcaatgaactgattgacggccatgacctgcccgaagacatgcagctcagccgtaccggtctgaaccgctatgccagtcgtatggaagagttcggcgcaaagattcgggcgtcccgcgagatggccgaaatctgggcggccaagctgggctcagcgccgacgtctgacgtcggcaagctgttgctggagttcgtgaaaacgctggcctttgagaccagtatgtccctggctgaaaaggacaagaccgtcgaacccaaagcgctgggacaactggcgctggtcgcgcagcggcttgaagcggcggcgatgaccagccacaagcgcgaacaagaaatccgcaaagcctttgccgaggaagcggctgatacagcagagaaaatcacaaaacaggcgggtttgtcggcagagacagcggctgatattcgtcgccagattttggggatcgcgtaa

SEQ ID NO: 145214 - DNA, 279 bp, Enterobacter cloacae
atgccgaagaaactgaaaccactgactaaggccgagcgcaatatcatcagccttatcgccgccgtgatggtatgtgccgacgttgaggctaaggccatcgcgccttctctcacgaaagagaccggcaaaccgtatgactttaaatcgccgacgtcgtacctgaatgtttttctgaacaaaaatcctgaatacaaacgtgctttcagtctgctgatgaaagacaaagccagccatgagaagggattccttgagcaatgccggagggagaatggcaagtaa

SEQ ID NO: 145215 - DNA, 384 bp, Enterobacter cloacae
atggcgcagaccattattcaacttaagcatggttatgtgacggggaaagggacagctgatgagacccgtcacacagaggtcacgctgcgcgagctggactcgcgtgatgtggtggagtcacagcttgccgccgaacgcgtggtgattggtgataacggtaaggccgtggcgtactgctccgaggtgctgatggggcttgagctattacgccggcagattttaaaggtgggtgaaatccccggcccgctgtcccagaagcagctctacagcttccaccccgaagacctggaattgttgtccagcaaggccagtagcctggacgatatgctcgcggggacgacgtcacgggggcgaactgatgccgctggcgacggcagtcaatag

SEQ ID NO: 145216 - DNA, 354 bp, Enterobacter cloacae
atgtcagttctgggtcaagcgtcgattcgtatcaacggtcgcgaaatcaaaaccgaaggcaagtccacccttaatccggggggcgtgtcccgcacggctcacatgggtggcggtaaggtctggggcctgtccgggaagatggccgggccttccatctccctgaccatcgccgcagcggaagacatggacgttgtcgaaattagcggctgggaaggcgtcaccgtcatgttcgaaggcgataacggcctgagctatatgatgaccggcgcggccaccgaaggtccggccacgctggaggaggacggcggcaccatctctgcaacctttattggcaccaaactggtgaaggtgtaa

SEQ ID NO: 145217 - DNA, 1479 bp, Enterobacter cloacae
atgtctttaggcactatccctgatgatatccgcgtcccgctggtgtacatcgagatcgacaattctcaggcactcgacagcgcaccggcgcagtcgcgaaaaattattgtgatcggccagcaactggcgaccggcaccgcgaccgcactaacgcagtaccgaatcaccagcgacggttcggctgagcagttattcggcaaaggctccatgctggccgaaatgctgaaaaccctgcgcaaagccaacagctataccgaagtgtgggcgacaggtcttgcagagcttgctgcgggcacggcggccaacgctgagctggcggttcttggtacggcgaccgctgcgggcacgctggcgttgctggtcaacggggtctcggttcaggtcggtgtggccgcagcggccaccgaggctaccattgccgctgatattgttgcggcgatcaatgcgttgccgggcactcaggtggttgctggtattaaggctaccaccaccgcgacggttgagctgaccacgaactggaaaggcatcaccggcaatgatatggacgtccgtctcaactattacacgggcgagcagacccctgcgggtgtggccgtgaccattaccggttttgccggtggtacaggaacgccggatatttcggcggttgtcgcgtcgctgggtgatgactggtacaccgatatcatttttccctataacgacacccagagtctcaacaccatccgtgacgaactggtgacccgctggggcccgctcaagatgatggaggcacagctctggacggcatttcgcggcacccatgcggcgagcggtacgttcggtaatacccgtaatgactggctgatttcctgcatggggacaaatattgcgccccagccatcatggcagtgggcggcttcctatggcggtgtggccgcgtactatctggcgaatgacccggcgcgaccgctccagactctggtgatgaccggcatcctgccaccggccaaaggtgtgcgctgggatatgactgagcgcaacctgctattgcatgacggcattgccacccattatgtcgatgccagcagcaacgtctgtatcgagcgtgaaatcaccatgtatcgcgttaaccagtacggtgatgctgatacgtcttacctcgatgtgcagtcaccggccacgttgggccgtatccgctacatcatcaaaaaccgtttcaccacccgctacccgcgtcacaagctggcgggtgatgacgtgctggatttgctcgaccccggccaggcagtgatgacgccgaagattgcccgcgctgaactgctggacattgcgctgaccgaactggtgccagcgggtctggtggaagacttcgacgattacaaagacacgctggacgtcactatcgacagcagcgatgccaaccgcctgaacttcattgcgcatcctaacctggtcaatcagttgcgcgttctggctggcctcatccagttcaaactctaa

SEQ ID NO: 145218 - DNA, 201 bp, Enterobacter cloacae
atgatgaaacaaattaaacctgcccgcgaaggcgtccaggttcgtaaagctgacggcacccatctgaatgctgccggtgaaacgttagcaatgagcgcctggtggcatcgtcgtgaagccgaaggcgatgtgatcgtgagcgatatccccggtgaaacggtgacctcaactgcaccggcccgcacggtaaaggagaaataa

SEQ ID NO: 145219 - DNA, 627 bp, Enterobacter cloacae
atgagtgaacgtcccgaactgctgacgatgggtagcaccgtggccgccgctgaaaacgtggtggcctggcttaaaaaatccccctccgacgatgagcctgacaaaggtcttgagggtgacaaccctgaccaggtcaaagtcatcgagcgtcatatcggccagttcaatacgcctgccgaagtcaaaacgtatctgtcagatcgcgatggctgcgtgcgcgttgcggcgcttcgggtacggaacatccgttacagcggcgggctggttggcgatattacctgggcggcttacgttatggcgactgattcgtggggttacgcacgcgatacgcgctgcgaaatccttgtaggcaaactggtgcgccgtatcgccgcaaaagatgcagccagcggtatgaaggccgagcgtgctgcggatgccattagcgccgacaacatttactcaggcgggctgaatgacctgggcctgacaatgtgggcggtgacatgggaacagcagtttcgtctcgatgaaagtattgatctctccacacttcctgattttctccgcctcggtgccaccttctcgcacaacggcggcgcgtcggagattaaggacgtcattaacatccgggagccaaacccatga

SEQ ID NO: 145220 - DNA, 543 bp, Enterobacter cloacae
atgggtatctccgtcgaggtaatgggggcccaaaagctggcacaactgcggctggccgtagaaaaactgtcagacagaacgctccagcaggaactgcttgaatccattggtgcagtcgtcgaatcccagacccgccgtcgtatcagcgatgagaagacctccccggcaggtgagaaatggcaggactggtctgacggttatcgccagacccgcaacggcaaccagagtttgttgcaggctggcggcggtctcctcgacagcattcagtacatcgtcgagcgtggccgcgttcgtgtggggtcaccgctcagttacagtggcgtacatcaggacggcttttccggcaacgtttccatcggggcgcacaaacgccttatcagccaggcgttcgggcgggcgcttcgtcatccggtctggcagtccgtgggagcgcatacccgtgcgatgaacatgccccggcgtgaatatctcggcctttcatctgataacagccaggagctgatgcacgtcatcggtgatttctggaaagaggtgcttccatga

SEQ ID NO: 145221 - DNA, 441 bp, Enterobacter cloacae
atgggcatttacgtaacccgcgatgagttgctggccgtcgacggttcgctggtctggaacatggcgatcaacaaggcgaccggcgaactggatgaggcaaagattgagacggcaattagtgatgcagatgaggaaattaactcctttctctcaaagcgttatcagttgccgctcagccttgacattatcccccgtccgcttcaccgggttgcggtatccatcgcgctttactggctgtccgagcgtgacagccagattaccgagctgattcagaagcgctacgacgatgcactgcgcaccctgaaagagatagccaatggcacccgtgacctcggcctgaccggtacaactccggccccggaaaacgataacggcaaaatcattgtcgtgtcggataacgagcggctcttcacccgtaacaagctgcgcggggtgttgtga

SEQ ID NO: 145222 - DNA, 483 bp, Enterobacter cloacae
gtgagtggaacgaaaacaaaagcaccgggtaagcaaaacgttaaagacggcgctggcccgatttcagcgacgcaagtggcatcgtctgatggcgcagacggcaaaaaacctgaactgtcagtcacactgccggggtatcacattgcactgggttcagtacccgtcagcgtgatgtcagaaaataccgatgccgtcaccgtgccggatgtggctgctgcggctctgcttccggcaacggatgatgttgaagcactggaggttcgtgccgtttcagagcgtggtttctggcgctgcggtcgcttctggtcacgacagccagtcaatgtctttgcgtccgatgatccagcggatgataacgcggccaacaatgcgcacctgggcattcaggcggactgttttatcagccacgaagacgccgcacggttgaaggccgagccccaactggttgtaaaagtcctggaaactaaggtggagcaaggctga

SEQ ID NO: 145223 - DNA, 903 bp, Enterobacter cloacae
atgcctgcaccgtcatccgaaattttacattctctcacgactgcgctcagtgccgcctttacccgtggtctggccggggtcaaaccgcagtacctgcgtattgcgaccgaagtcccgagcagctcagcatccaacacgtacggctggctctctgacctgccgtcgattaaggagtggatcagcgaccgccagtttgcccagctcgaccagtatggttacaccatcactaacaagacctgggaaaactccattaaggtcaaacgtgaaaacattgaagatgatcagattggtcagtacagcatcatcgcccagtcgttcggtcagcaggtgtctgagttcccggacacgctgagcttcccgttgctgaccgctggtttcacaaccgcgtgctttgacggtcagaacttctttgataccgaccacccgatggccgggggaacgtacagcaatatcgtcggtgacattgccaccgacaccggtgaaccctggttcctgattgatgaaactcaggtattaaaaccgatcctgtatcagaatcgccgcccgttcgatttccatgcactggacgatctgaacagtgagcacaccgtgaagaacaacgaattcctttatggcgttgatggtcgttgcaacgtgggcttcggcttctggcagacggcgtgtggttcacgcgctccgctgacgatggcgaactacgaaaaagcggtgaaagtccttcagggcatgaaacgtgcctccggtacgcctctcggtatcaacccgacgacgctggttgtaggcccgaataatcgtgcagcggcaaaacgcattatcgacgccatgctggtcgatggcggtgattccaacatctattacaaggatgtcgacatcgtaaacagcccgttcattaccacccctgcgtaa

SEQ ID NO: 145224 - DNA, 672 bp, Enterobacter cloacae
atgtctaatgacccaaaggatgactttcaaaactttgtacagtctgatctcggttggcgaaaaagagaaatgtctactataaaaggttttgtcttttcgtctacagggcttaatcagcatacgtatgtgagggctgggattgctttgctatattctcactgggaagggcatatcaagcagtgctcatgcgaatatataaactaccttaataagctgggcgttaagttaagctctttgtctgagaataatattacttcttacatgtactataaattctcactccttaatggctcaaagcaaataacatcatatactgatatatataactctatatctaacaacctaaccgcagaggtttttaatataccacctaagtctatcatcagaacagaaagtaatcttaaggttagacggctagaagatatacttcacgtcattgggatagacaattctgcttttatggcgtgcaaaactcagatcgatagccagctgcttcaccatcggaatggtatatcccatggcgaaagaactgacgggttgcaatcgaccacactgagcacagcatcatatagcactcttcatgataaaattatcgaactgataggactattttcagacgcgataatagaccatgtaataaacgataagtatatgaagcagactaacccttaa

SEQ ID NO: 145225 - DNA, 1113 bp, Enterobacter cloacae
atgggcgatcttgttagtcaaattgagaaaagaagaaaggaaatttttactgattcttatcctatgtcgataggtgagttagtcaacctctataaagaaggtgagatagatataaatccatcattccaacgatttttcagatggtctcacaaacaaaaagtaagtcttattgagtcaatattactaggaatacctatcccatctattttcgttgctcaaagagatgatggtgtttgggatcttgttgatggtcttcaacgggtgtcaacaattttaggattgatgggggagttaaaaaatgatgctggagaaacgttggagccacttttactcaaagaaaccagttatcttcctgcgttggaaggtaaggtttggaacggtgacgaaagtaacgagctagataagtctataaaaatggcgtttaagagagagaagattgaaataaagataataaaaaaagaaagcgatgtaaacactaagttcgagttattccaaaggttaaatacaggtggtagtgagctttctgagcaagaggtaaggaactgcttgcttattatgttagataaaaacgcttatgataacttagatagtttatctaagtatcaacaatttgttgattctatatctataacggaaaggttgtttgaagagcgttatgatatggagctggcgctgaggatgttcgttctcggtaatgctgccggtgatgaccttaaaggtatagaagaagtatctgatttcctcaccacaaaagtaactgactttacttgcgataaattcgattgggacgaggaatctaaattattcaggaagtcattcgatattatatatgaatctttaggtgataactcatttaaaaagtatgatttagttaaaggtggctacagagggggatttcatctttctgcttatgaggttttatccaccggggtttataaagcattgaaggccgccgctcttagtgatgaccagataaaagaaattgttgtagaacattccagaaatattttttctgacgaagttttcataaaacacagcggttctggagcaaaggcaaattatagatggcctcgattccaagatttaataaaaaggatctttttagatgtctaa

SEQ ID NO: 145226 - DNA, 942 bp, Enterobacter cloacae
ttgcataacgccgcactcgaactcttcaacgaacgcttaccgcacaagccgtacttttcggacgatctgcactttggtgtacgcattgccggtaaggaacgcgccattctggcgaaatacattcagttcaatcagcctcacgctatgttttggctgggcttcgacgtcgatcgcgccggtgccgccatcgactggagcgaccgtaacgcccccgcgcctactctgaccatcaccaatcccgaaaacggacacgcgcacctgctgtatgcactgaaaacctcgatacgcactgcgccggacggaaaaatgaagccgctgcgctacgccgccgccgtggagaacgcgctacgtaaaaaattggaggctgacgcagggtattcggggctaatctgcaaaaatccgaaccatggccactggaaaattgccgtatggcagccagaactctacacactggactggctggctgactttctcgacctgaacgccgcgaacgacaaagaaatcgttgccgactacggcttaggccgtaactgcacgttgttcgacaaaacccgcaagtgggcataccgcgccatccgtcagggctggcctgagtacgaccagtggctaaaagcctgctacgaacgtgccagcgcctataacctgcaattcgcagcgcctcttgatgaaaatgaagtaattgggatagctaaaagcatagctaagtggacaagtagccattttaatgaaacttcttttaaagagtatgtaaaacgaacgcacactaaaattatgcaatcctctagagggaaaaaaagccatggtggagggagaaaaaaaatatgttctgataaagtattggagataaagaaaatgatatcagatggaaattcttaccgatacgtctctggaaaatgctcagtttctattggtttcataagtaaagtaataaaggaaaattaa

SEQ ID NO: 145227 - DNA, 234 bp, Enterobacter cloacae
atgaccgagatggaaaaacagcttctgagcgccttagagagcttacagacaggctacgagcaacagcagcaggcgtggcagaacagctacagcagcttgcagcacatgttcgaggctacctcgcaggcgctgacgcacagcgaccaggtgtgtcagcacttgagcagtcaggtagagagcttgcgcgcgcaggtcgagagcttgagcaggaacgtcagccgcttgatgcgctga

SEQ ID NO: 145228 - DNA, 486 bp, Enterobacter cloacae
atgagcgagattttaaatttggcgaagggcttcgaggagaaatcgaagcagcaggcgcaggataccgagcagagcgtgaagcgcgagttcgcgaggctggagacgtctatcagcgcggaactgcaatcaagctcgcagagcatcagcaacgctatccgcgagcagaacggcaggctgacgggcatgatcagaacctccgtttcaacggcgatggcgtgggtattcctctgcttcgccctgctgatcggcatcctgagcgggataatctggtttcagggcacgatcatcacctcacgcctgagcgaaatggacagctacagccagcagctggcgagcctgaaagcgaaaagcggcgcgggggtgacgatttacagcgacgacacgcgccggaacacctacctggtggtgctgccgaagcaggctcacggtgtggaaacctacacgtcgacgaccgacaacaccgtggtgaaatacacggcaaaataa

SEQ ID NO: 145229 - DNA, 327 bp, Enterobacter cloacae
atggaaaagcgaacgaaagaaatcaaaatccggctcaccgaaaccgagcatcagcgactgcttgatcgctgcgaccggactcaccttgcggagtggctgcgtcagcttggtctgggtgaacacacttcacgcaggcgccgtgtgcccgatgtggcgcccgaactgctgcgacaggtcagtgggatcggtaacaacctgaaccagatcgcccgccgtctgaaccagactgacaccctgacgcctgctgaacgtgcctcgctgcttgtcgtactgaccagccttgaccgtcagcttggagacctgctggagcagaaccgtgatcgttaa

SEQ ID NO: 145230 - DNA, 384 bp, Enterobacter cloacae
atggcgcagacgactattcctcttaaacacggctttgtgacgggtaaaggaacggcagacgaaacccgtcatatagaggttacgctgcgcgagctggactcccgcgatgtggtggagtcacagctggccgctgagcgtgttgtcatcggtgataacggtaaggccgtggcgtactgttccgaggtacttatggggctggagctgttacgccgacagattttaaaggtgggggaaattcccggccctctgtccatcaagcagctctacagcttccaccccgaagacctggaattgctgtccagcaaggccagcagcctggatgacatgctggtggggacgtccactcgggggcgaactgatgccgctggcgacggcagtcaatag

SEQ ID NO: 145231 - DNA, 354 bp, Enterobacter cloacae
atgacggtattaggacaggcatccattcgcgttaacggtcgcgaaattaaaaccgaaggtaaatccacgctcaatccgggtggtaaaacacgtacggcccacatgggtggcggcaaagtctggggaatgtccggcaagatggccgggccatccatcgcactgaccatcgcggcagcggaggatatggacgttatcgaaatcagtggctgggaaggtgtcacggtcatgttcgaaggtgacaacggcctgagctatatgatgaccggtgcggcgaccgaaagtcctgccacgctggaagaggatggcggcaccatctctgcaacctttattggcaccaaactggtgaaggtataa

SEQ ID NO: 145232 - DNA, 1479 bp, Enterobacter cloacae
atgtctttaggcaatatccctgatgatatccgcgtcccgctggtgtacatcgagatcgacaattctcaggcactcgacagcgccccggcgcagtcccgaaaaatcattgtgatcggccagcaactggcgaccggcacggcgaccgcgctgacacagtaccgtatcaccagcaacgggtcggctgagctgctattcggcaaaggctccatgctggccgaaatgctgaaaaccctgcgaaacgcgaacagctacaccgaagtgtgggcgacgggtctggcagagcttaccgcaggcgcggcggctaaagctgagctggtcgttcttggtacagctaccgcagcaggtacgctggcgctgctggtcaacggcatctcggttcaggttggtgtggccgctgcggctcccgaggccaccattgccgctgatattgttgcggcaatcaatgcgctgcccggtactcaggtcgttgccagtatcaaggagaacacaccggcaacggttgaactgaccacgaactggaaaggcgtcaccggcaatgatatggacgtccgtctcaactactacacgggtgagcagacccctgcgggtgtggccgtgaccattaccggttttgccggtggtactggaacgccggatatttccgccgttgtcgcttcgctgggtgatgactggtacaccgatatcgtctttccctacaacgacacccagagtctgaacactatccgcgacgagctggtgacccgctgggggccgctcaagatgatggaagctcagctctggacggcattccgtggaacccatgctgccagtggcacgttcggtaacacccgtaatgactggctgatttcctgcatcgggacaaacattgcgcctcagccatcatggcagtgggctgcatcctatggcggtgtggctgcgtactatctggcgaacgatccagcgcgaccgctccagactctggtgatgactggcatcctgccaccgactaaaggtgtgcgctgggacatgactgagcgcaacctgctgctgcatgacggcatcgccacgcattatgtagatgccagcagtaacgtctgtatcgagcgcgaaatcaccatgtaccgcgtcaaccagtacggtgatgccgatacgtcctatctcgatgtgcagtcaccggcaacgctgggtcgtatccgctacatcatcaaaagccgtttcaccacacgctatccgcgtcacaagctggcaggcgatgacgtgctggatttgctggagccgggtcagccggtgatgacgccgaagattgcccgcgccgaactgctggacattgcgctcaccgagctggtgccagcgggtctggttgaagacttcgacgattataaagacaccctggacgtcaccatcgacagcaacgatgccaaccgcctgaacttcatcgctcacccgaacctggtcaatcagctgcgcgttctggcgggtcttatccagttcaaactctaa

SEQ ID NO: 145233 - DNA, 201 bp, Enterobacter cloacae
atgatgaaacaaattaaacctgcccgtgagggcatccaggttcgcaaggctgacggcacttatctgaatgctgccggtgaaaaattagcaatgagcgcctggtggcatcgccgtgaagccgaaggcgatgtgatcgtgagcgatattcccgaggaaacggcaacctcaactgcaccggcccgcacggtaaaggagaaataa

SEQ ID NO: 145234 - DNA, 600 bp, Enterobacter cloacae
atgagcgaacgtcccgcgctgctgacgatgggcagtaccgtggccgctgctgaaaacatagtggcctggcttaaacccgctctcgaaggtgttaaccctgaccaggtgagcgtgattgagcgtcatatcggccagttcaatacgcccgccgaggtcaaaacgtacctgtctgatcgcgccggttgcatccgtgtcgccgcacttcgggtacgtaatatccgttatagcggtggactggttggcgatatcacctgggcggcgtatgtcatggcaaccgatgcctggggttatccccgcgatatccgctgcgagatcctcgttggcaaactggtgcgctgtatcgccgctaaggaagcggcaaaaggtatgcgggctgaacgtgctgctcattctgtcagtgccgacaacatctactccggtgggttaaatgacctcgggctaacgatgtgggcggtgacgtgggagcaggagttccgtctcgatgaaagcattgacctgtccacactgcctgattttctccgtctcggtgccacgttctcgcataacggcggcgcgtcggaaattcaggacgtcattaacatccgggagccaaacccatga

SEQ ID NO: 145235 - DNA, 543 bp, Enterobacter cloacae
atgggtatctctgttgaggtgatgggcgagcaaaagctggcgcagttgcggctggccgtagagaaactgtcggacaaaacgctccagcaggaactgcttgaatctattggtgcggtcgtcgagtcccagacccgccgtcgtatcagcgatgaaaagacatcacccgcaggcgagaaatggcaggactggtctgacggttatcgcaagacccgtaatggcaatcagagtttgttgcaggctggcggcggtctcctcgacagcattcagtccatcgtggagcgtggccgcgttcgtgtggggtcgccgcttagctacagcggcgtacaccaggacggcttctccggcaatgtatccatcggcgcgcacaagcgtcttattactcaggcgttcggtcatgccctgcgacacccggtgtggcagtcagtaggcgcgcactcacgtgcgatgaacataccccagcgcgaataccttggtctttcatctgataacagccaggagctgatgcatgtcatcggagacttctggaaagaggtgcttccatga

SEQ ID NO: 145236 - DNA, 441 bp, Enterobacter cloacae
atgggcatttacgtcacccgcgatgagctgctggccgtcgacggttcgctggtctggaacatggcgatcaacaaggcgaccggcgagctggatgaggcaaagattgagacggcgattaacgatgctgatgaggaaattaactcctttctctcaaagcgttatcagttaccgctcagtcttgaaatcattccccgcccacttcacagggttgcggtgtccattgccctttactggctgtcagagcgtgacagccagattaccgacctgatccaaaagcgttacgacgatgcactgcgcaccctgaaagagattgccaacggttcccgcgacctcggtctgaccggtacaaccccggccccggaaaacgacaacggcaaaatcatcatcgtctcggataaccagcgtctcttcacccgcaacaagctgcgcggggtgttgtga

SEQ ID NO: 145237 - DNA, 483 bp, Enterobacter cloacae
gtgagtggaacgaaaacaaaaacaacgggtaagcaaaacgttaaagacggcactggcaaggtttcaacgtcgcaagtggcatcgactgatggcgctgacggccaaaaacctgaactgtcagtcacactgccggggtatcacattgcactgggttcagtacccatcagcgtgatgccagaacataccgatgccgttaccgtgccagatgtggctgcgggggctctgcttccggcgacagatgatgtggaggcgctggaagttcgtgccatttcagagtgtggcttctggcgttgtggtcgcttctggccgcgccagccagtccatgtttttgcatccgatgatccagagggcgataacgccgccaacaatgagcatctcggtattcaggctgactgctttatcagccatgccgatgcggcacgtttaaaggctgaccctcaactggttgttatcgttattgaaacagtgacggagccagactga

SEQ ID NO: 145238 - DNA, 903 bp, Enterobacter cloacae
atgcccgcaccgtcatccgaaattttacattctctcacgactgcactcagtgccgcctttacccgtggtctggccggggtcaaaccgcagtacctgcgtattgcgaccgaagttccgagcagctcagcatccaacacgtacggttggctctccgacttaccggcaattaaagagtggatcagcgaccgccagtttgcccaactcgaccagtatggctacaccatcaccaacaagacttgggaaaactccattagggtcaaacgcgaaaacattgaagacgatcagattggtcagtacagcatcatcgcccagtcgttcggtcagcaggtgtcggagttcccggacacgctgagcttcccgttgctgaccgctggtttcacaaccttgtgctttgacggtcagaacttctttgatactgaccacccgatggctggcgggacctacagcaacatcgtcggtgacattgccaccgacaccggtgagccgtggttcctgattgatgagggacaagtgttgaaaccgatcctgtatcagaatcgtcgcccgttcgatttccatgcactggacgacctgaacagtgaacacaccgtgaagaacaacgaatttctttatggcgttgatggtcgttgtaacgtgggctttggtttctggcagacggcatgtggctcacgcgctccactgacgatggcgaattacgaaaaagcggtgaaagtcctccagggtatgaaacgtgcctccggagcgccgctcggtatcaacccgacgacgctggttgttggccccaataatcgtgctgcggcaaagcgcattatcgacgccatgctggtcgatggcggtgattccaacatctattacaaagatgtcgagatcgttaacagcccgttcattaccacccctgcgtaa

SEQ ID NO: 145239 - DNA, 2055 bp, Enterobacter cloacae
atgtctgcaactgagtctaaggtaaaaactgctccgaaaaccagcaaaaattcccttaaagctgctgaagccgaagcgctgaaagcggctctcgatgccgcaccgatagagtatgtcccggtgacggcactggtgaaatctcccctgaacgtcagaaccatcccttatccggtggagaaagtacggtcaatggcagactccattgatgcgcttggcctgttgcagaatctggtcgttcattctctccctgacgggctgtgtggtgtggctgcaggtggtcgtcgcctgaaagccctgcaattgctgcaggatgagaaccgtatcggtaccggatatctggtgatggtgaaaaaggtgcccgatgaactggccgtcgccgcatcaatggcagagaacgaacagcagatggccatgcatccgtctgaacagatcgccgggttccgcacgctggcagagcaggggaaaacccccgcgcagattggcgatttactggggttcggtacccgtcatgttcagcgcatgctgaagctgaccgaactggctcccgaaattctggacgcgctggcgaaggatgaaatcaccaccgaacactgtcaggcgctggcgctggaaaacgatcagacccggcaggtcgaagtgctggctgccgcgcgtaaacgtggatggaataacgaaccctcggttaccacgatccgtgacctgattaccaccgaagaagtctccaccacgggcaacaaattccgctttgtgggagaggcggctttcagtcctgaagagatccgcgttgacctgttcagcagcgaaacgggcgggtttgtaaaaagtgcctccctcgataccgccctgctggaaaaactgcaggatatcgcggagcacctgcgtgaggcggaaggctgggcatggtgtgatggccgtcttgagccggtttctcactacgggaaggacgctcaactctggcgtctgcagtctgttccgccgattgaatattctgagacagaatcagaacgccttgctgagctggaaacgctggaagcgcagtacgaagacgagaatcccggcgtgagtgatgacgtcgcggcagaagctctggaggcgatctgggaagaacagcagaccatcgcacaccgggcaaaacaccgggcatggacggaggaggataagcagacctccggtgtggtggtttcctggaacggtcaggaagcgacggtgcagcgcggcgttgtgctgcgcgccgatgaaaaaataaaggagaaggagacatccaccgatcagaaacctgaaaaagtcgatccgctggacgctgtcagtgtcccgctgctgacgcgcctttcttctgaacgcacactggcggttcaggcagccctgttacagcagccgcagaaagccgtcgcgctgatggtctggaaaatgtgtaactcggttttccataccacgacgtccgtcaaagagccgttctgcatttccgtgagcgtgtcgcattacgcgctgacccgggaagcgccggacggtgaaaacagtatcgcatttcaggccatccaggcggagaaagaacgccttgaagccctgctgcccgaaaactggcgtaaggatatgacgagcttcttttcgcttgatggcaaaaccctgatggagctgatgacgttctgcacggcctgctccattgacggcgtccagaaaaaagatgaattcggccggaaacatcaaagcccgctggacctgctggaaacggctatccactttgacctgcgcgactggtggaaaccgacagcagacaatctcttctcacatatgacgcagccacacattgtgcagtccatctcagaggccgggctgactggcgcggcactcgatgccgcgaagatgaagaaaaaggatgcggctgaacacgcagagcacttcctgacgcaagtccgctggatccccgactggatgacctgcgccgaaaacgagaagcagttgtccggtaaacctgatctgagtctggctccggaccagtctgaatccgacgttgtgtctgaatctgcccctgaaaacaacccggcacgcgctgcctga

SEQ ID NO: 145240 - DNA, 723 bp, Enterobacter cloacae
atgatcccgtcatcccatgcccttgtcaccctgaaaccagcgcgtcaggctgcgcagcaggccattatgtccgtggaagaagcacgccagcgcggttcccgtctgccatcgatgccacatgtccggacctttctgcggctgctgacaggctccagtcgcatcaacagcactgtggcgcagtgtattccggggctaaaccgtgatcccaaaaaccgcctgtccagcctgaaacaggtggaggaagcgctcgatatcctcatcgaaagccacggtgagaaatgccctctgccactggatatggatgtgcaggcagagttgtttccggaggtccggcatacccggacagaacggaggaagcagcgtgaggatattgccttcagccgcaaaatgcgccgggaaggcagactggaagagaaaggctggaaactgcggcagaatctgctggggcaggcggtgacggagctgaatttccagtcgccggagaccgttctcagctggtatcgccggtgggccgacgagtttgacgcgagcgagctggaaccggcgttctggcagtggcagacgcgattcgcctcactcagcgagcttgtctggctgcgctgcagtgatgccccgttgtacgaggttatgcatgaaatcagctttattgtcaggggatcggctgcgcatattctggaacgtgaacgctggcaggtacccaacaagctgacctgcaggagataa

SEQ ID NO: 145241 - DNA, 309 bp, Enterobacter cloacae
atgacagatattcagtacgcgtttactcattttttaagaatgttcgttgtagtaactgttattgccgttgggtatggatatctgctcggtagtatccttacaacccggaggccggggtttattctgcagttgttgtctcttgttggactcagtgcggtattttcattcctgctgttcaggagcgacagtatgtggtcagggcttccggaggtgtcacaggcgatactcttcggcatgtttactgcgacggtcatgttttacatgttcagcctgcttattcgtgcctttgttcggtttatatcccaatga

SEQ ID NO: 145242 - DNA, 537 bp, Enterobacter cloacae
atgggtaaaacatctatttcggaaatcttatctacttatcatcatttgcaattagaaaacgcaaatgaagccgctacaagactaaaagtgatagatagggtcttaaaggaagtcttgatgtggactgatagtgatatcaaaccagaagaacatgtcactgaggatggtttgacaacctatgctgattatatactaaaaacagccaatattgcgcttgttgtggaagctaaaaaggcaggacctagcttcactgtcacgccaggaaaaaggaaggtaaagcttagtaatagttttttacagtgtgatcttggtgaagcaataatacaagccagagactacgcaagaaaatttggtatagattatgccgtcgctacgaatggaaatgtatgggcatgctttcctgcccagaggcatgataatgtgaaatttaatgattcaatagcgcttgttttctggtcgcttgaagattgtctacatgagaattatcaagaattctatgatttgcttagggaaggtgcgaacaagttcctgatatga

SEQ ID NO: 145243 - DNA, 1662 bp, Enterobacter cloacae
atgtccgttgtcagggcgtcgacggcggcagcgggtcgcgggctggatgctctcggcaatcgctatacggggatgattgcgggttttgcgggtggtgccatgctgagagagtttgctcagactgaccgtcgtatcacgcgtatgggcctcgcggccgagaaaacccggtcagaaatgtcgcagatgttcaacggtatgcaggatgcggcaatcaagttcagggttgatgatagcgaggttattggcgccgtcgaaaaaataggcacagtaaccggtgatatcgactttggtttcaaaaataaagataaccttgctgcttcaatcgcagcatccggtggttccggagagtctatcggtgggctgttcgcgcagttccctaaatatcaggtgacgtcagaaaagcaaaccctggaagcgatggacaccctcaacaagctgggtaaagaaggtgctttcgaattaaaagatattgcagagaaaggtgtcagagcactgtcgatgtattctgctgccggtggtaaaggcgttgcaggaatcaaggacgtgggcgtcgcgcttgagtcagcgatcagcgctaccggtgacagggacacagcggcaactgcagttgaaaaccttattcgtgatttacaagcgccaaaagtagtcaaggagcttggacgtaatggtattgacgtctttggtaaagatgggcggatgcgtgctctgcctaagttaatggaggaaattgccaaacggtcaggcaataaaggtgccaaagaacaaaataaacgtcttgtagaagcaggttttaatcaggacagtatcctgcttctgagcagcgtaacgtctggaaaaggggctgatgacctacgtcggtataacgggattgttgcagacggttcaggaatcttggctgatgcgaaatatgcagcccaggacttcacctctgcgatgtccagcctgaatgtgacctggacgaagtttaccaacaataatcttgctaaacccgttcaggaattagctgacgcattaaattcagtggatcaggagaccgttcagaactggcttgaagtcggcaaaaatattgccatcgcgacggggggcattatcgctgcccgtaaagtctttcaggtcggtaaaggtgcatgggatttattcggcggtggcaaatcaaaaggtattcctaaaggtgtggctgatgtttttggctccggcgtgatgcccgtatatgtcgttaatatgggggccggtggctttggcagcggaccggatgttattccaactggtgcgccacaagggagctggtttactcgcgcattaccctttctgaaaactgccgcaatgggggcgacaataccatttcttgatgcatcccccaatctgagtgatgaacaaaaagcggagatggtgcaatgggcgaaggaccgcgctaacggaccttccgtctggtctcagattgctgatttctttacttctgcaagtagtgacccgcaagttgtcgaccctagaccgtgggcatcttctcaacagtcaccacaatatccttttgtcccgcagcagctgcgtggcgagattcgcgtggtggtggaaggcgatgcccgagtgaaaagcgtctcaactaaccagccgggcgtgaccctgagcgcctctgctggcaaaaccggtgtggggcaaaactga

SEQ ID NO: 145244 - DNA, 1269 bp, Enterobacter cloacae
atggcgaacaattactgggcgtccctgcgcgaggcatcctttcgtaacgcgccgttttacctggtcgatgatgagggggtcagtggtcgtcgtgctatcccccgcgcgtatcccaagaaagaaaccggctggacggaagataacggcgcaatactcacccagcagcagattaacgccaagctggtcggcgatgattttcagagcgcattagacgcccttttaaacgcgcttaatcagccaggtccaggcgagcttgtacacccgtggtatggcatccagaaagtccagattggccgcgtcacgcaccgcctgtcgaccgaagaaggcggcgttgcctacgtcagctttgaggtattcgaagcgggcgaacggctctatccggtatctaaggaaaacaccagtctcaccacgctgtcggcagcggataaggtcaaagcggcgctggaggatggcgactattttgcagccctcgacggccttggcgatatggtggacacatggctcggggatatggagtcgctggtcgcaaacctgccgacaatcccgaccgccatcactgactggattgaccgggccagccgtttcaaagaccttgccagcgtcatcatcgctaaacccggcgagctggcccggcaggttctcagtctgaccagtacagtgcgcgatatcgtcagcgaatcgccctgggcgctccgggtctatgaccagctccgcaaccagtgggcgaatgaccgtgcagagaaagcggccacccgaacccgtgattcagacatggtggtcaccccctcatcgccggaggccggggtctttggtgtggcgaccagcgttcccgcatccaccatcgccatcaccgatgagatgcaggccaacattgatgattttcgccaactggtgacgctggccgcgctggttgcgcaggccgaagcgatagcgaccaccgaatttgaaaccagtgctgacgctctcgatgccggagaccgccttgctggctggttgtctgatgctgcgatcagcgcagttgaggccgggcggcgtgagttgtggcgcacgcttcgtgatctgcgttttgcggtggtcaacgacgtccgcgttcgtggtgctcagttgcctgaccttcgccagctcgtccccacggaaacctcgacagtggcccttctggcctggcgtgaaaccggtgataccgaaaaccgggacgccatcgtactgcgtaaccgtctgcgtgatccgtccttcatcctgccgtcatccaccattgaggttatcgaataa

SEQ ID NO: 145245 - DNA, 1074 bp, Enterobacter cloacae
atggagagcgtcactctgaccgtcgacggtcaggcctgggaaggctggaccgatatgtcgtttacccggtcgctggaagcgattgccggtgagtttgatctcacggtgacaacgcagtggtctgaggcagcgccgcgcgtcatcaaagaggggctggcctgcaccatcagcatcggcagcgaaacgattctgacaggctacatcgacgattttatcccgtcctatgatgccgagaacgtcagtattcgtgtgatgggccgtgacaagaccggtgaccttgtggacagctccgtcgtccataagtccgggcagtggaaaggcgtgaagctggaagcgctggccgcagagattgcacagccctatggcatcaccgtcgttaatgaaacagataccggcgaggcgttcggcagcgttgtgcttgaacagggtgagaccggcttcgagctgctggagcgcctggcgaaacaacgtggcgttctgctgacctcggacgcgcaggggcgactggttattacccgcgcctcgacgcagcgggtcagtgtggcactggtgctgggtgagaacatcctcgcggcgcgtggccgtttcagctggcgtgagcgggccagtgaatacatcgtcaaaggttcggccagtgccggaggtgcgacgtggggggctcagccagttcaggccgttggtggacgagccgccacagtgacggacccgaccatcacccgctaccgcccgaagatactcgtcaacgaggacaacctgaccgttggtggcgcatccatccggggcgactggtataaatccaggatgctgggcgaggccaataccagcgaagtcacggtagcgggctggcgcgagaatggtgataccggcgcgttgtggcagaccaaccggctggcagagattcgggacccgattcagaacctcgacaccacctggctcatcaagagcgtcacttttaccgagggtgacggcggtcgcattaccgtgctggcacttgtgccgcctgaatcccttgacctgccggagacaaaagcgaaatccaagggtaagaaaaaagcggtggcaacatggaattga

SEQ ID NO: 145246 - DNA, 531 bp, Enterobacter cloacae
atgcttgaacaactcgcccgtcgtcttcgcctgcttgttgatcgtgccgtggtacgtatcgtcaccgacagtctgggtcgccagaacttgcaggttcagactctggcggatgcgacgaacgacgatgtcgagcgtttccagcagtacggatttacctctttcccacctgcgggctcagaggcgattgtcctcgcggtcggcggcaggcgtgaaggtatggtggcgattgccgttgaagataagcgctgtcgaccaaccggtcttgatgagggtgacgtctgtctttatcatggcgacggccagtcccgtattattctcaaggcggatggcgtaattcaaataacagggaaaacggtaaattacaccgccagcgaattatttgagattaatacggctcaattaaaaatcgctggccctgctgaattttctgaggacgttactgttcgtggtgatattaacgcgaaaggtaaatccttcattgaacatattcataaggacggcgacggtgaaaacactactgagcccttatga

SEQ ID NO: 145247 - DNA, 1692 bp, Enterobacter cloacae
atgtccgagttcgcccgcaccaatcagcgagccatgtccgttgtcagggcgtctacggcggcagccggtcgcggccttgatgctctcggtaaccgctatacgggaatgattgcgggttttgcgggtggagccatgttgagagagtttgctcagactgaccgtcgcatcacgcgtatgggcctcgcggccgagaaaacccgagcagaaatggcgcagatgttcaacggtatgcaggatgcatctatcaagttcagggttgacgatagcgaggttattggtgccgtcgaaaaaatcggcactgtaactggtgatatcgactttggtttcaaaaataaagataacctcgcggcttcaatcgcagcgtccggtggttctggcgagtctatcggagggctgttcgcgcagttccctaaattccaggtaacgtcagaaaagcaaacactggaagcgatggacaccctcaacaaactgggtaaagagggtgctttcgaattaaaggatattgctgaaaaaggtgttcgggcactgtcaatgtactctgctgctggaggcaaaggtgttggaggcatcaaggatgttggtgttgcactggagtcagcgattgacgccactggcgatggcgctacagcggctaccgcagttgaaaacctgattcgcgatttgcagatccctaaagttgtaaaaaccctcaaaagcaatggcatcaacgtgtttgataaaggggggaaaatgcgctcgttgcctgtcctccttcaagaaatagctaaacgctcaggcgataaaggcgcagaacagcagagtgccaggttgctgggagccggttttaatcaggacagtatcctgttaattagcagcgtaacgtccgggaagggtgcggaaaacttaaaaagataccagtctgttgtcgctgacggtcagggaatcctcgatgacgccgcgtatgcggcccaagattttacctccgcaatccagagtttgaatacgacgtggggaaaatttgcgaatagcaacctggcacaaccggttcaggagttagcggatgctattaattcagtcgaccaggaaaccgtccaaagctggctcgaagtcggtaaaaatattgccattgtaacgggtggagttattgccgcccgtaaagtctttcagattggtaaaggtgcctgggatttatttggcggtggtaaatcaaaaggcatacctgccggtgttgcggatgttttcgggtcgggtgttatgcctgtatatgtcaccaatatgcctgctggtggcttgcctaatggcaacgattcaggtttgcctgatgctcagcctgaaaaaagtgaatatgacaaggggggattggttggtgcagctattaatacatataccgagcttcagaacttaatcccatttcctcaaaacgatgaagaaagagaggcgttatttaagcgccaccgtgatagccagcagcgccgtactcgctgggatgatttaaaggactggtttaactctctggatgatactcccgtcgttgatccgcgcccgtgggtttccccccagcagttctcccaatacccgcttgtcccgccgcagctgcgtggcgagattcgcgtggtggtggaaggtgatgcccgcgtcaaaagcgtcacctctaatcagcccggtgtaacgctgagcgccgccgcaggcacaaccagtgtggtgcaaaactga

SEQ ID NO: 145248 - DNA, 1266 bp, Enterobacter cloacae
atggcgaacaactgggaatccctgcgtgaggcatcattccgcaacgcgccgttttctttagtggataacgaaggggtcagtggccgtcgcgccatcccccgagcgtaccccaaaaaagagatcggctggacagaagataacggcgcgatcctcggtcagcagcagattaatgccaagctggttggcgatgattttcagagcgcattagaagcccttttaaacgcccttaatcaacccggccccggcgaacttgtacacccgtggtacggcatccagaaggtacagattggccgggtcacacaccggttgtcgacagaggaaggcgggattgcttacgtcagctttgaggtgtttgaagcgggcgagcggctttacccggtatccagagagaacaccagtctcaccacgctgtcggcagcggataaggtcaaggctgcgctggagaatggcgattattttgcggccctcgatggcctgggtgacatggtggacacttggctcggggatatggagtcgctggtcgctaacctgccaacaatcccgaccgccgtcactgactggatagaccgcgccagccgcttcaaagaccttgccagcgtcatcatcgctaaacccggtgagctggttcggcaggtgctcaacctgaccagcaccgtgaatgacatcgtcagcgaatcgccctgggcgcttcgggtctatgaccagctccgcaaccagtgggcgaatgaccgcgctgagaaagcggccacacgtacccgtgactcagacctggtggtgacaccctcatcaccggaggccggagtctttggcgtggcgaccagcgtcccggcgtcgactatcgccatcaccgatgagatgcagaccaatattgatgacttccgccagttggtgacgctagccgcgctggtcgcgcaggccgaagcgatagcgaccaccgagtttgaaaccagcgctgatgctcttgatgccggtgaccggcttgcgggctggctgtccgatgcagccgtaggcgcggttgaaggtggacggcgggaattgtggcgcacacttcgcgatctacgttttgccgtggtgaacgacgtccgcgttcgtggggcgcagttgcctgaccttcgccagattacgccgctggaaacctcgacggtggcgcttattgcgtggcgtgagaccggtgacaccgaaaaccgcgatgccatcgttctgcgtaaccggatgcgtgatccgtccttcatccttccttcaaccacgattgaggtcatcgaataa

SEQ ID NO: 145249 - DNA, 1074 bp, Enterobacter cloacae
atggaaaatgtcactctgaccgtctccggtcagtcctgggaaggctggacagaaatgtccttcacacggtcacttgaagccatcgccggtgagtttgatctgacggtcaccacgcagtggtcagaagctgcgccacgtgtcatcaaagaggggctggcctgcaccatcgctatcgccggtgagacaatcctgacggggtatatcgacgattttattccctcctatgatgccgaaaacgtcagtattcgcgtgatgggtcgggacaagaccggtgacctggtcgacagctctgtagttcataagtccgggcagtggaaaggcgtaacgctcgatgccctggcgacggaaatagcacagccctatggcatcacagtcgtcaatgaaaccgacacgggagaggcgtttggcagcgtcgtgcttgagcagggtgagacaggctttgagctgctggagcgtctggcgaaacagcgtggtgtcctgctgacctctgatgcgcaggggcgactggttatcacccgcgcctcgactcaacgggtcagcgtggcgctggtactgggtgagaacattctcgctgcgcgtggccgtttcagctggcgtgaacgggccagcgaatacatcgtcaaaggctctgccagtgccggtggtgcgacatggggcgctcagccagtccagaccattggcggacgtgcggccaccgtgacagacccggccatcaaccgctatcgcccgaagatcctcgtcaacgaggacaacctgaccgttggcggcgcgtctatccggggcgactggtacaaatccagaatgctgggcgaggccaataccagcgaaatcacggtagcgggctggcgtgagaatggtgacaccggtgcgttgtggcagaccaaccggctggccgaaatccgtgaccctatccagaacctcaatacgacctggcttatcaagagcgtcacctttaccgagggggacggcgggcgcatcaccgtgctgacactggtgccgcctgagtcccttgacctgccggagacaaaggcgaaatcgaaaggtaaaaaatcagtggtgacaacatggaaatga

SEQ ID NO: 145250 - DNA, 537 bp, Enterobacter cloacae
atgaggttatttcaacaactggctcgtcgtctccgactcgttgttgatcgtgcagtggtacgcattgttaccgacagtcttggccgtcagaatctccaggtgcagacgctggcggatgcgacgaacgacgatgttgagcgctttcagcagtacggatttacctctttccctcctgagggctcagaggcgattgttctcgcggtcggcggcaggcgcgaaagtatggtcgccattgccgtcgaagataagacctgtcgacctaccggtcttgatgagggtgacgtctgtctttatcatgcagacggccagtcgcgcattattctgaaagcgggtggcgtaattgaaataacagggaaagcggtaaattacaccgccagcgatttatttgagattaatacggctcaattaaaaattgctggccctgctgaatttactgaggatgttactgttcgtggtgatattaacgcgaaaggtaaatccttcattaaccatattcataaggacggcgacggtgaaaatacttctgagcccttatga

SEQ ID NO: 145251 - DNA, 150 bp, Enterobacter cloacae
atgccatctgaatatgatgaacaactggattcgactgatacgcagcttcccggcgaatatgacctttttgatttaatggcgcaggttactgaagagaacctgcatgcccctgtggattccgggccgcctgtcggccgggaagcgttatag

SEQ ID NO: 145252 - DNA, 537 bp, Enterobacter cloacae
atgaaaaaagtatataaagcaatcatattaatagtactcctatgtggtggtgttttatctgccaactatatttttcttcaaaggcacatgaatgaggttctgaaagaagatccaaggaatgatggtattagcgtttgggtttattataagtggtttgtaatctcttccgagattaattatgaccttcgttctgtttctgcagaaaatagttcactggatgttaatagggtgatgctgcaatttgctgaaaaagtgaaagatgatgattttagtaaggtttatcttagttacagagggaaagataagttttacttaaaaggggggtattttaaaactcttgggcaggaatatggtattcaaaaccccgtgtatacattaagaacaattccggaaaatgtgtatatgttaaatggagagagagcttatagtgtttgggagggtgggcttctgggtgtaatgggaaaacagatggaagatcttagtgatttctctaaggcttggtacttagatgatttcattaaaagcatgagcgattaa

SEQ ID NO: 145253 - DNA, 2991 bp, Enterobacter cloacae
atgaaggctttattttatattaatccctttgtagttcgtagtaatccacaattttaccacggtgcattgaaaaataaattgctacgacaagctcagctattgagcacatctggcgtaaaagtaacttttttgctcaatgaatatacttgcgatgttgtaggcaaatctaatccagaatttgatgtgatcgttatacctaataaagaattggatttgctacattttaaatatcacaacatagaatctctgctttatgaagatgatatgaacgttaaggcagaactcgtttctttgttctcgcgctatgttagttcagattttgactacatattagcatgggagacaccagcaaacttctttaaagaaattatacctggagtaaaagttttccatgaaatgcctggtttcctaagtcgtgttccttttcccgaattgataacttttgatgaatatggtctttttaatgacagttctctaaataagagaattcttgacagcattgatgtaaatgaggttggcgaaagcaatattgcgaagttgaagaaatttattagatatgagctcctcgagtttataaatgataaaagcccatataatagaaatgatctcgactctgagaatgagtttgataaattaatattactgcctcttcaagttactgagcaatatgcttttttaagcgattgccgctataaatctcaatatgatcttcttttggatgttattagacaaattccacaaaatatcggtgtagtagtaacccaatataatactggaagtacctctgaagaagtgattaataagcaaaactttgatctttataaacaaatctatcccaatttgatttggcatgagggattctcaaagttagatcatattagccaatatcttttatcagtagtagatgctgttgtcacagtatcttcgtctataggtttgcaagctcttctttgggataaaccactgattagtttaggcaataactatctgaaagatgtggcagattacatctctgtttcagactatctagaaggtaattcaagtggcgtagatgctttatataaagataaatttttatcatggatgcttggttatcaacaaccactggctatagaacttcttaaaaataaagattttctaaatgggttgattgattccaaaaataatccggagccagttagcttttttgacattcatccagattattataacgcgtttgtaaccgcttcaaaagctgacgttgctttacaaaaattgtcagcctcttattctatccctgtaaataatagaacgctggaaaaatttagggaaaaacttaatgtattgaaaccaaaggtagtttcttttgatatatttgatacattggttgatcgcgcgattgaacagccagctcatattttcaaattaatggagcctaaggttgatagaataacagacggtgctattacaaactttcaggtaatcagacaaacagcagaacgtaacgtaagagtttctttgccagaagaaaagcaagaaatgactatggatgaaatatatgacgaaatctgtaggcttacgtctgtttctcgtgaagttctttctgaggttcaaaagctagaaatagaatatgaatttaagaacattcgagctagaaaaattggcttgcaattgtataaagaggctcagaaagcaaataaaaaaataatatttatcagtgatatgtacctgcatgaagacgtaattagaaaattactagtgaattcaggttatacaaataatgataaactttatttgtcctcgaccgtgtttttgagaaagcatgaaggagacttatttgaatatgttaaagagaaagagcaattaaattatgaagaatggctccatgttggtgataatccacatggagatattaaggttccgcaatcttttggtatccatacttatcatattaaaagtgcatttagaaatatcgaaacaaataagaaattaattgaattacttaaaaatgatagacgtaccagaaccatcggagagtcagctgtctatggtttgattcagcgtaaatattttgacgatcaagccaacctgtacccaggcgacacccattttggtggaagtgcttctatacttggctatgctggtttcgcacctatgatgtttgggtttttgcattggcttatgatgcaaagtaaacgtgatggggttgaaaatcttgtattccttgctagagacggcaaagtcctttataaaatggctgggattctcttcccagaaagtgaaggatggccgaaaattacgtatgctcttagctcgcgtcgagctgcacgagttgcttctttatataccaaaagcgacattaataagcttatagactcggcagtttcaaatagtaaattgcacacattcttctcagggaaatttggtattgacataaatgatgttgatacaagcgtattgaatcagttcggctttagccacatcgattgtcagatcaaccacaacgatagagagaatttgaagcaactagcagattacctacaagaacgtatattaaataattcgaaattagaaagagaattgcttgtagagtattatgaaaacttaggggtcagggaaaataacaacgttggtgtggtagatatcggttatgctgggactatgcaagttgcgatggaaagaataactagtgctagtaatataaaaggatactattatataacctttgaaaccgcacttgaacaactagacaaaactggtgtaatgcgtggctatgcaggtgattttgttaaaagaactattcaccctgactcaatttgtcgaaacggattcctctatgaaacacttttctgtagcgcagattcatcttttatttgtctaagaaaagattctaaaggaaaagtgatacctatcttcaatgaaagttatgatgatagcattcgaaaaaatattgttaatcaagttcacaactcttgcgttgcttttgcacgagacttgaaagaagtttattga

SEQ ID NO: 145254 - DNA, 840 bp, Enterobacter cloacae
atggctgagcccgacatcatccctaaagaagcgctggactggctgaaagccaaaaaactgtctccgggttttgattaccgtgacgtctggcgtgatgagcacagtatcgggtttaccgttgccaaaatgacaaacctcgatctcctttcagatgttaagtctctggttgaagaggcgctggctgaggggcagtcgttcgctcagttccgtgaagtgcttaagcctcttctggtcaaacgcgggtggtggggccagcaggagatgaacgatcccctcacaaaagaatcccgcgtcgtgcaactgggcagcgaccgtcgcatccgaaccatctatgaaaccaatatgcgcaccgcccgcagcgccggtcagtgggagcgtatcgaacgtacccgccgcgccatgccgtatctgctttatacgctgggtccatcccgcgagcaccgggcggagcatctgcaatgggctgacctctgcctgccggtggatgatccgttctggcagacacatatcggccccaacggctggggctgtaaatgcggcgttcgtcaggtcagcaagtacgaatacgagcaaatgcagaagaacggcgtcacccgcaacgtgcagcagctcgatgacaacgggttacccaccgggcaggtgacgcgggaaacggttcccctgcgaaccactgcgccagaagttaaacgggtgaagtgggtgaacaagcgaacgggggaagaagagatggtgccggaaggcattgatccgggctgggactataatcccggcatggcgcgtaaggctgaactggagcaacagctcagccagaagcaagctgcgtttgacagtggcaactga

SEQ ID NO: 145255 - DNA, 444 bp, Enterobacter cloacae
atgcctgatgccgccattaccaaagaacagtgggaaaccatcaaagctgagctgcaaagccctttctgctatgtcagattccgctatcaggacacggtgattacggtgacgcgtgagcgacagagcgagagccgcacctgtctgatggtgtatttcgacggcaggtgcaatctcggctgggggaactcgcgttgtgataactacaaccctcttactgagcatttctggtttacgaagacgcagcgtcttcacagcgccaggcaagttgctgagacggagaaagccctgggcaaacgctatgcgaaaaagcatatgccatcgctgtatcaatcattcagctaccgaacgccggtgtttgccagctccaccacgctgatacgccagttccgaaaagcgccaggactgatgctggtaaccgacgaaaaagaggtgctgcatggctga

SEQ ID NO: 145256 - DNA, 894 bp, Enterobacter cloacae
atgctcaaatcgttcaccgtgcgtgactggtgggcgtttgcagagaagttcggtattcccgtggtcgtcggtaaatacggcagcaacgccactcctgagcagattaatacgctcatcgacgccattgcctccattgcatccgatgcgggctgcgccattcccgagagcatgaaactcgatatgcaggaaacggccagtcgcaacaacggcggtgtactttttaaagagatggcgacgtggtgcgacgagcagaccagtaaagcagtgctgggccagaccatgacgaccgacaacggcagctcgcgcagtcaggcagacgtccataatcaggtccgtatggacattgcccgctgggatgccatgcagctcgggaacacgctgaatgagttcctggtgcgaccgtacattgatatgaactacggcccgcaggaagcctatccgcgtgtgatgattcgtatcactgagccggaagacctcaaagccttcgtggaagcgttgacgccgctgattgatcgtggtcttcgcgtccaggagtcggaggttcgtgaccgcttcgggctggccgaacccgacagcggcgcggtcatcctgtacccggaagccacacaacccgccatgacgttgcctgcgcttaaccgtgagcagcttgcgcttaaccgcagccagaccgatgagattgatgcgatggtggccgatgcgctgggcggctgggaaaaagtgggcccggccttcaccagtccggtgctggagctggcgcaaagcgtcgacagctttgaagagtttctggctcagttgcctgagttgcagaagacccttgaacctgatgcgttcgtcgagcagctggcgatgctcagtttcgaagcccgtgcgctgggagatgtgaaagatgcctga

SEQ ID NO: 145257 - DNA, 291 bp, Enterobacter cloacae
gtgaaaaatgacaatgtagtgcaacacaacaaccagactgcttctgaacagacattatccccggacgagagccacgtattgcataaggtgagagatcccgtgtgcgggatggcattcctgcccgacaaggcgcacagcagcattcgataccaggaccatcagctttatttctgctctgccagctgtgagagtaaatttacagcccatcccgaccgttatcttaccgaagatgccagtgaacattcccaccaccacaccacgatcaccacgaagtcagcccagaccagataa

SEQ ID NO: 145258 - DNA, 216 bp, Enterobacter cloacae
atgaaaatgaaagtttttcgtgatgacaccgggcgggtagttaacattggtgaatgggactacctcataagtattgaaatggatgctaacggagaagaaatcgaggttgccagaaaccctatgcctgatggtctgattgagtcagaagaggaagtcgtagtcggattggatggcgggttatatgtggaaggagacccaagagctacccagccttaa

SEQ ID NO: 145259 - DNA, 1950 bp, Enterobacter cloacae
atgtttcatctcgataacagctccggcgtctcagtaatgccgactctgaaaccagaaacgagcagtgagcctttattttttacagaaggtggcgctggtattcctccatcatatcctggtgctgactggttcaatattgtccagagtgagctattgaatattgttcagcaaagtgggatggaaccagataaattcaaactgaatcagctctttgaagcaatgagcgtactctttatgagtaggttagaccctgacattagcgacgaaaaactgaaggtgtctcttccatacactgatgcgattcaacaggttcagcacgatctgaatctggaaaaagtgtatgtaaaaacctttggtgcaaagggcaattacaaccctgtcgatggttccgggcaagatgatactttggcgttccggcgtgctactgcgtattgcggtgcagatgcaagacgcaagctttgtctcggtcatggtacgtttttgatcactgatacggtacttagtaaacctctacttgttgagggggagcatggtaattctcgtattgttgcgaaaaacatgacgggtaaggctgtcttcgatatgacaacccctacagaggatgtggggcgggttattggatcgaaggatattgagtggattgtggaaggtgctgatattgattgcgccgtgctgggtccaaaggatgaaacgcaatactttacgaaatacctgcgttatgtaattagtggcaactattgccatggggctaaccgcaacctggatgcatacagttttgcctgggatcacagcgccagccgttggttcagggttggtgattgtgtcggcgcacttgtcgcatttaactgcatccaggggaagtttgatattcaacaaaatttcgacacacaattcagtgatgtgggggttgagtttgatgctgccgggggcgttttatcggctcgcgtccattacaacaatattggtccaatcaaaacaggtattaaaattttaaataatacctttgcttcaatccatgataacgacttgatcggaacgatggatggcatcgactgggcgggtttagtcccattcaacgaaccgaaagtacatcacaacaacatcaattgccaaaagcagggtatcgttttctcaggtccagataccatgtcatttgtcgataatactgttcgccgtcatgccaggggctggaaaggtagtccgtatgactggtacggattcagaatcagtaatagctttgatatcaagctgataggtaacactgttcagcctgatacgagtctgggtgcctttcccaaaacaaattatggctatgccatgagcacttgctcactcagcacgcttactggtaatcatgttggtgttggttgtaatcaaggtatcagccttgctgattgcaccgggataaatatttcagacaccgtttcaacacaaaacgccacgactgacattttgttccgtcttactcaaaacgcccgaaatatcaatattggattgtattctctcgtgtcctcttacgtcggtacagtcctgtcgaaagactccactatcaccttcccggttagtatgtttaacaaccagtttgacctgcaaagcacgggtaacgttgtttctgaaagaaccagagtcaccgcgcctactgacagtaaaaaatggcgacaaacaattggtaacactcaactgagtaagtcaattgtgaacgatgccggggtcgcgttgaattacgaaattatcaccaggaatactgccgcttcggtagcgctatacgaaatcagagcggagcgaatccgggtgaaccatggccctgacatcatcaccggaacgggaaatcccgaaggtgtagtaaccgccaccaaagcctctcaattctggcgtgttgactcaggggccacggcgtcactttacgttaaagaaacaaccactggaaatacaggatgggtggctaaatga

SEQ ID NO: 145260 - DNA, 225 bp, Enterobacter cloacae
atgatgatctcatatcaggaacttgttcgcaccttccctaacataccagataccgatacccgtagggttatgtatatggaaggctgcgatatgttatcgaaagaaacaatgaacgaaattcgtaatacggtgaagtccccaacagacaatatgaaaatacaccgcaatggcaatcatgttaccaaaatagaattcatggaagaacgaaatgaaatcaccctatga

SEQ ID NO: 145261 - DNA, 183 bp, Enterobacter cloacae
atgaaagccagcatccgtgccagggtggagcacccgtttcgcatcatcaagcggcagttcggcttcgtgaaagccagatacaaggggctgctgaaaaacgataaccaactggcgatgttattcaccctggccaacctgtttcgggtggaccaaatgatacgtcagtgggagagatctcagtaa

SEQ ID NO: 145262 - DNA, 1122 bp, Enterobacter cloacae
atgaacaaagtttacagcattatttggaacgcggcgctcggtatctgggtggtcgtttctgaattaacgaaaggaaagaaaaaaagcagttcgcgtaaaactgtcgccgtactggcagctggcgcattaagcggtgcttcattgctggcttctgcagcccagattaccgcaacgggtgaacacgatattcatgaagacttcaagacaggtatttccgctggggtttatgagggtatccacgactacggcttcttatatgaagataacacaactggtcaggcactgaatatcagtggtgcaatcccaacatttagcccgggtcaaagcggcgttgttgaatcaaccactatccgggaactgctggaaagcggcaaaatcaccctgctggcgaccagccctgaccagagcgtaaaaaccattaccaactctgaagaactggcggaatacctgacttacaaccagtcgtcaacgccttcgcagagcacagaatttgatatcaacgatccggcgtttcccggcgaaaaaacgaccatcaaagtctttgataccaatgagttaaatggttttcttaccgaagcgcaagtcggcgatgcggtattaaacacctttgatgctcagaaatcagaaatctataagcaatttggtatcgcactggcgacaaatggctccattgccaatctgaatattggcaacgacaccctcaatgtgcgtgacaaagccaataccattgaaatgctggcaaaagattcctcgctgctggaagcacaaggtactgcaagccaggtgaactggcagtcagataactatataaaatttaacgcagccccggtgatccctgaaaaaacgttcaccggttcagcgcaaacctccgtgtttggcgatgatgtgacgctgatgacctatggctatgacgaggatggtcaggtcgtcaaaaccggggagcgcacatttaccattaccaacacacaagaactggccgaattcaatgactggctgttgggcaaaagcgacgacgcggcactcaaccctgatggtgaaaaagtcagccaaatccagctgtggatagatgcggaggaagtcacaaccgtcaccgcagcacaggtaatgactccaacttattga

SEQ ID NO: 145263 - DNA, 213 bp, Enterobacter cloacae; identical to SEQ ID NO: 144742

SEQ ID NO: 145264 - DNA, 201 bp, Enterobacter cloacae
gtgcgccagcgcgtcgaggattacgccacgctctccatgcagccgctgctgcgtgaggggtatgcgcgaactgccgcagtgacggccaccatcgccagccgtgagcgtatcaactttaccgtcgtcctgacccgtcctgacaaatccaccctgacgattgaaatcagcaaacgctgggaggctactgccaatgccatttag

SEQ ID NO: 145265 - DNA, 432 bp, Enterobacter cloacae
atgaaaaatatcgtattagcatccttgctgggctttggtttaatttcatcgtcctgggccactgaaaccgtgaatatccatgatcgcgtcaacaatgcacaggctcctgctcaccagatgcagtctgctgcggctcctgtcgggatccaggggactgctcctcgtatgaccggtatggaccagcatgaacaggccattattgctcatgaaaccatgacgaacggctcggcggatgcgcaccagaaaatggtggaaagtcatcagaagatgatgggaaataacacagtatccacgaccgtcccgtcaacgtcttacgcggcgatgaatgagcatgaaagagcagcggttgcccatgaattcatgaataacgggcaatccggcccacatcaggccatggccgaagcgcaccgccgcatgatcaatgcaggctga

SEQ ID NO: 145266 - DNA, 453 bp, Enterobacter cloacae
gtgacccgcgcatgggcttatgactgctggcacggcaccggcacggtcgggctggcttggctctatgatgaccgtgacgacattatcccgaccgatgccgataaggtggcgatggagagctatctcttccgtcacgctgacccggcaaccgggaactacgtcggcaagcccggcggcattgaatgctggcccgtcattatcagcctgcacccggttgatttgtccatcaagctaactcctgacactaccgtgacccgctcagcggtgcaggccagcctgctggcgctccagaagcaaatgtcaccgggtaagaccctgcaaatatcggccttacgcacggccattggttcatcgtccggcgtgaccgactacaccctttcagtcaccgctgatatcaccgttccttcggacgaactcgtcaccattggagtgctcacatggctcacaacgtag

SEQ ID NO: 145267 - DNA, 318 bp, Enterobacter cloacae
atgccacggttcagggcggcatttgaagacggcgagctgattacaccgaagcatgaagacatcattaccgacctcggggccatccagatttatcggggtgtgccgggtatagacgattcccgtactgtcggcaccgacggtcgcaagcgccacggggatgccgctattgcgatcttcctcggttatctcgccagccgtgaagacaatcgccgttacgaacttcacaaaatcaacaaacccgccgacccaaaagagcgtgacgaacgtcgccagcttcgcctgactcgcggtcttaaaaatcaaagagggctgctctga

SEQ ID NO: 145268 - DNA, 285 bp, Enterobacter cloacae
atgcgtgatttactcgaccaggaccagcgcctggtcattcttcgttctctgctcgactgcggtgacagtgctaacgagtctattttgcaggaatgcctgcaagcctacggccaccgcgtttcccgtgatgccgtgcggacgcatctgtcctggctggctgagcagggactggtgcgtgtgactgacgtcagcgggtgctttgttgccgaaatcacggggcgcggcgatgacgttgccagcggtctggcgtccgttccgggcgtcaaaaaaccacgggcacggtga

SEQ ID NO: 145269 - DNA, 669 bp, Enterobacter cloacae
gtgaaggttgcgggggtcgaaacgcacggtaattttgcgctgacggatattcgccagagacggatgccagtagctgttcttacgtccgtacaacgtgccgccggattcgaggaaaaactcgccggtgactttcaccgtgacggcttccgctggcagcatgagctggcgtatttgctcatcgctcaggcgggtgacaatcgagttgctgtagctgcgctcaaaggcctgatcaaaagaaaactcaccacggcacatttcagtttcacgcttggcacgggcgttaaacattgcgatcccctcgctgattgcagtgataaaggtctcaacatcaaccacccggtcaccgtaattgtccggcttgttttgcgtgtttggcccggtgtatgccccggccagagaggggtgtttgtcgatgtagtcgccaaggccacccacaccgaacgcacgttcaatcggtttggcctgaccccagcctttgccgccgataacactggtccagtgcacctggattcccagcattggcaggatacccatcgggtcatcaggcttgaccttgaagcggtagcgattcgggacaccaccactcagccatttgttggcagcggcgcgggtgttatcgatagtgacgtgctcaggcttaccaaaggtggcaatcgcatccatcagtga

SEQ ID NO: 145270 - DNA, 231 bp, Enterobacter cloacae
atgagtgatgaatttgaccgcgccagtgaccttgaaaccaccgaccgtgaacgggtgttaaacaaccatgtaaaccgggttaaagaagcacccgagcgttacggcttctgtaatgactgcggcatcgatattccggctgcacggcttgaggcgcagcccgatgcggtgacctgctttacctgccagcgcatcagagaacacagggggcaccgtggactgggaagtcgttaa

SEQ ID NO: 145271 - DNA, 231 bp, Enterobacter cloacae
atggcccgtctttccctctacagctgcattctttacgtgatgatcatgtcggtgggccagcaggccggtgcggtcgccacggcttttggtcatgtgtttgcgatgcctgcgcctgactgggatatcggtctgatgctcgcgacaccggcgttgagttatctcgggttccgcacgctcgatggcttcgcccgttacagcaaatccagcaaacacaaggtgcaggttcaatga

SEQ ID NO: 145272 - DNA, 351 bp, Enterobacter cloacae
atggacaataaacttacctgccgacaacggaacaccgtcgatgggctgctcatccgtgataagacgaaactcccgcagcgtctctttatcgggcctgaggaagcgaggatcaacccattcataatcgcgcggtttccactggctgtttcgcgtattccagaggatttcgcagacacccacgcctttacccagaccatcgagcagatcaaagagcagctcaggtatctggggttgttcgatgagatcgcgaatcacatctgccagcatgacatcacgctcatcatcactggccgcctcgaccgtgggcgcaataccggcgacggtcagcttacgggtacgcagcaccgatga

SEQ ID NO: 145273 - DNA, 231 bp, Enterobacter cloacae
atgtccctggctgaaaaggacaagaccgtcgaaccgaaggcgctgggacaactggcgctggtcgcgcagcggctggaagcagcggcgatgacctcccacaaacgtgaacaagaaatccgcaaagcctttgctgaggaagcagccgaaacagcggagaaaatcaccaaacaggcaggactgtcggcagagacggctgcggatattcgtcgccagattctggggatcgcgtaa

SEQ ID NO: 145274 - DNA, 654 bp, Enterobacter cloacae
atgaacataactgaagaaatcaaaatagaagacaccgcccttgccacggtctacttatcagagttatattctttggcattctttataaagaaaaaatgccaatcgctatttaataatactaaaagtgaaaatgatggcaattattacatatttgcaaaacctgagattattaatgacatctcatcaattttaacagatgctgcaaatttaaaaaagttgataacatcgccctctccgcagaagaaaggtgaaaaagagataaactttaagtttcgaaaagcacgcgcggcatttttgatgtctcttctaaatgatgttgggataaatgaaatacttaatgtaaaaatacgaaatactttagagcactttgaagagtacttagataacgctaacattgacataacttttaatgatgggaagggattcgatgttgcaatatgcaacatcgccctttccagcaggcttgctatgccaggcaatatatatccattacgcttctacattgcagatgaaaaaatatatcataattttgaatggcaagttgacataggattaatacatgacgaagcatgtaatatcatcgaaaaactatccacacaccaacacttagccagaagcaatgagcctcaatcaagcattataagactaaaataa

SEQ ID NO: 145275 - DNA, 267 bp, Enterobacter cloacae
atgtttgttgagctggtttatgacaagcgaaatgttgaggggctcgaaggagccagagagatcattctggccgagctgacgaagcgggtgcaccagattttccctgatgccgaagtgaaggtgaagccgatgcaggcaaacggactgaatagcgatgctagcaaaagcgatcgggaaaaacttaaccgcatgctggaggaaatgtttgaagagtccgatatgtggctggtttctgagttcccgaccgttcgccaggttggcctgtag

SEQ ID NO: 145276 - DNA, 594 bp, Enterobacter cloacae
atggtttcgccacaagtgaagtttgttgtggttggtcatcattcccggatagggcatgcacaacgtcttgccacgatgttggatgctcatctgctgattgacgatggtaaccatggcgcgaactggaatcatcgacgcgcccttgaatgggcagcagaacaaacatgccgggtaattgttgttgaagatgatgctcagccttcaagcagtcttaatgggttgatgataggtcactggctaaaccgcttccctgattctctggtgagtttctatctcggtacaggccgaccacctcagtaccaaatgcagatagccgagcggctgattgttgctgataaaactcaggctgactacatcactctgccgcgactgatacacggggtgtgctatagcgtacctccgcaacatatcaaccgcgtgctgtctcgatgggataacagtaagcccgctgattatgccgtgggtgatgcctggggtggtgcagtggtctatccgtgttactcgctggtggaccatggagactttgaatcagtcgagtgtcaccctgactcagcaccacgaacagaacgccgcagggcgtggagattagcctga

SEQ ID NO: 145277 - DNA, 669 bp, Enterobacter cloacae
atgaaacatttaccacttaaagccgttatgaccgggctggaaatcatcgaaactgatgagggttatgagctgcacagtccagctggcgaggcgaaatacgatgcatggggtgcccgccgtgaagtaaacggcataccggaatacttcccgtcgtcaatctcaatgaaaaagcgtgtgcctgctgcaacagacgttaaaaagactgagaacattactttatccggtgctgcgatggatgttctgtatgcgctgtttttccgtggcgcgcttcagtctggtgacctgccagctaaatctggtgctgctgagcttcgagaactggggtttgctgaaagtcgctataccgctacaaaatatcatgagaaaaacttcttcacgttcctgaccgctgaagggcaggagtttgccattatgcacctggtgaatacgaactttggcgtgcctgctggtggttacattgatggctctgtaaaaatgcattttggccgtattgagaccgacccacgtaaaggttatgccattaatgttggcatcagccccgaaattaaaaccagcgtaaagctatcccctgagatggaaaaagcgatttctgatgttgtgtcagcggaactgaaaaagaatcttaagcccggcggcacagtctgggaatggttacgacgtggattctga

SEQ ID NO: 145278 - DNA, 327 bp, Enterobacter cloacae
atgaacagtgtaacggtaaacaaccgtctcccgcaactccggggtattcccgttgttggaacctcgtcgtttcggtatgagcggatggtatcaggccgctgggttccatgtaaccacagtagggcaatggcgattgtgggtgtctggcgtcggaaggggagagcgctatgcgagaacttaaccggcgattcagggaccacagaggtattcccgtccacgccatcagatgggagcccgagactcgacgcgttatataccttcgcgaagggtacgatcatgagtgcttcagccctcttgaacaattccagcgtaaatttacagagttaa

SEQ ID NO: 145279 - DNA, 501 bp, Enterobacter cloacae
atggacaacaagtggttgcaggagttactgcgttcaatcctgcgtgacatagacattaggcgtttaatgcatatgctaatcatcttcgtcattctcacggtgcttttgcctgactcagttaagcagtctgttggcgctcacaatccggagtttcttccggcattcagcctgtactatctgatgatcctctgcgtcagcttttttatttcctcgctgaccagtttcactactaaatccgtcttaaactcgcttcacacactggccttgcgcttaaaagtcagcaccctttcagtacctgaaaagcagtgccttctttctttcattaagaccggcaaccacgttgtatacgcaaaaaatcacaatccagtggtggagcagctcgtctataaaggcattcttaggaagacctattcgcttaattgcggacccgacatggaaggctatgtaattgaagacaaatatcatttccatgtgttaagacatctatcttccagcctttga

SEQ ID NO: 145280 - DNA, 516 bp, Enterobacter cloacae
atgattaccgaaaaaaataatgttttttattgcgactgcggattttatttccagagaggtcacagtggatcgcatgactgtgctgatggtctgcgaaataaattggccgagtctgaagccaaattcgcggcgctggcttcggagaatgcggggctgaaggctgcacaccctcaaccattcggacctgtgatgatgaaggctctggatgcgtatgagaagcaccaggatgaaacgcctgaaacaggaatgctcgatgcattctttatcctgcgtgacagcatccgcgttgatacggcggcgaccgacgctttcctggctgaagtgcgggcgcagggtgtggaagctgcaatcgacacagcaaaaaacgtagtggcccaagagtttcagtacaaagacttcgaaacagcgcagcgtgtttgcagcaaatttccggagtctgacctggttggaaaggttgaaatggtcgaatggctggcagacttcgccgcccagcttcgcaaaggagtgcagtcatga

SEQ ID NO: 145281 - DNA, 360 bp, Enterobacter cloacae
atgagcaacatcgacaaacaggcgctgcgggaagcagcagagaaggccatcttagaggaaggtgaaacctggtggaatgaagagcagctggctagcgactatggtcttgcgctgcataggccagacgccaaattcatcgccgcagctaacccctccaccgtgctggcgctgctggatgagctggaagccaaagacaggcggattgctgagctggagttgaaactagaagccgcagacaaattgcaggatagcgcgtttcgtcatggtctccagcatggatttagttacgggcaaacggataatcaggcggggttcgagcaagccatccaggcgtatggtcagcagtggaaaggagagtga

SEQ ID NO: 145282 - DNA, 579 bp, Enterobacter cloacae
atgctcaaaaattcagatagaaattttaatgaagactggttcctggcttcagttcttaatgcacacatcgatgaaatgataaacagatactcatgccttttggcattacgtatggattttttctaccaaaaggaaagtgccaggtattcacacttaaatcaccaaacacttgaacatgacttgcgtgaactaatggagaaaatgacaaaagagaaaggtgtggtgggctatttctgggttgtcgaatggactgaacgacatagataccatgcacatgtcgtattctggctggacagacaaaaaacacagcactcttatccctttgcccttacagcaaatacactttgggaggaaataacgcaccgggacggcgtatcgcaccgatgtgaatatcggccgcagtattctggaaatatcaatatacctgttcggtataacgatccggaaagcattaacaatatccgtcatgttctgagctatctggctaaggaagaacaaaaagaaggtttgtgtgcatacggctgtaatgacgttcctccacgctcagcggcagggcgtccacgtaagccaggcccctga

SEQ ID NO: 145283 - DNA, 573 bp, Enterobacter cloacae
atgaacaattgcaatgaaaatgaagcgttaaagacgaactctgatggtaacaatgtcatgcttattcgtagagttttgcagcaggcgactgatcattacccacgactgtctgcgctggggtttactttacagtatgcgaattgccactcctgcgacaacgaaaaacaaggtaatgcccagttgctacgtttttacgctgaagcctattgcagaattggcgaatattcaaagatacgtattgaagcgggtaaaccgtcgcagcctactcttcttcgctggttgtgggaggcagaaagtacctcgacatgtcggatgatgatgctattcaatttgggtgtttgtagtcatccccgacatgactcttcagcaatggatggaattcaggaggtcatgtcgttgctggtggctgcatggtgtgaagtagaaccgaacggggagttaacggaaataaaggtacatcgggtagagagaacgaatccagcagctttcgataaacgttatgcagagttacgagatgcagcattgcaaatagcctcacctgttgcttttgcccggagctgtttgactatgtaa

SEQ ID NO: 145284 - DNA, 1038 bp, Enterobacter cloacae
gtggctaacgccctcggtgttaccaagcaatttatttcgaaacttgaaagaggctatccgcctgcggatgccatgttgtcgcaacttgctaatgttttgggcgtatatgattcatttttctttacgcctcgcccccatcctctggatggggagcattgtcattttcgcagtaaacgctcaagaactcagacattggcgaatactgtcatggctagggcggagatactggatgaatttattcgcaggttagagattgaagttgagtttccggttctagatttaccagatgtctcagaattgccgttgcagtcaccttctgatattgaacgtatcgctgaggagtgtcgacgttattgggggttgggcttaggcccaattaactcaatgtctaatttcgtcgaaagcataggtattgtaattgctcatgtttcagatgttgatgacagaattgatgcttttaccgttaacaacgttcgtccaatcataattcgtaacaacgcaaaaaagagcatttgtcgttaccggtcagatattgggcatgagttaggccacctagttctgcatgaggggataattactggcgataaagtaaccgagaaccaagctgaccatttttcaagtgctttcatgattccaagggtttcatttatcaatgagtttcccaaaatgcgagggtctcatttggattggaacgctctggaggatttcaaagttcgttggaaaataagcttgcgtatgtccctgtatcgcgcctgtttgttagggttaataacaccagaaaaaatgaggacggggtttattcatctcaactctaaaggttttgtatctacagagaaaggggacgatcgcatcactggggactctccagggatgatacaacaagctatcagtatgcttgatgattattcttgggaagctgtattggaagatgcaatgattaagcccgaatttgtacgtgacaacttcgatattaacaggccgatagttcctcagggcggcaacttggtttcaatttataagtataaaaattttggttaa

SEQ ID NO: 145285 - DNA, 666 bp, Enterobacter cloacae
atgtcagcgtattcgaaaaatttgaagccttgttttgctatcaactctaatttagaccaaatatctgttgatatcttactgtcgaacatcgctgatgtacttgggcaactttgggccaacaagcacaagctcgattcgaattggattacaggctgccgcgcgtatggttgggtaaaagagtatatcgaacaaaatcaccttaatttacctggggttaaggttgtcagtacttctatggattttgtcttttcgcttaatgaggttccattgcagtttgtcactgatagactggatcgtcctagaaagctccaccgccttcttcgcaatgaaaaagaacagcgccagatatccattttcgatgaggaagataccagcaatagtttaatttggcgcgtttatgctgaaaggtttatcgatgatgttacggacaaagatgcacctcctacatggataattactatggttggcttagatgaaacgggccgcaaggtcagtctttatgagcatatatctaaagtaattacgcctatatcttctgcatctgaagatataaattcagatcaaattaatcagcttccagcgcctaatgaaatacctcctactaaactcaaacgtagaagcataaaagacgacaaagaccaaagtggtaaaaatgggactctttga

SEQ ID NO: 145286 - DNA, 1371 bp, Enterobacter cloacae
atggcagaagatttcgcgcttctcaagcaagttcttgaaatctatgatcaaaaaactgtcgcagaatgcttacgctctgtcagcggtaatgattggacaagggaatccattaatcgatggataaatgggaaagtggctcctaagcagctcattgaagttgaaataaaaatgctacgtaacctgctacctcagccgccctcttgtcatcctaattaccaatttcgctttattgatctattcgctggaattggaggtattcgtagcggatttgaatctataggaggacagtgtgtgttcaccagtgaatggaatgagcaagcggtcaggacatacaaagcgaactggtatagtgaccctcaggagcatactttcaactccgatatccgcgaaattacgctgagtgacaagagtgacattccagaacaagaagcttatgagaatattgataaaaatattcctcagcatgatgtgctgcttgcggggtttccttgccaaccatttagtctcgcaggcgttagtaaaaaaaattctttaggaagggctcatggattcgaatgtgagactcaaggtacgctattcttcgatgtagctcgaataatagcagttaaaaaaccatcaatattcgtccttgaaaatgtaaaaaatctaaaaagccatgataaaggtaagacctttaaagtgattcaagaaacattagatgaactgggctacgatatagccgatgtagattgtaccggttctgcagaccctaaaataattgatggtaaacatttccttcctcaacatcgtgagcgaattgttctagttggttttcgaagagaccttgaattagctgagaatttcactttacaaaatataaaaagcttctatcctcaaaataggccaatgtttaaggaactgcttgatgatgatgttgataataagtacgtcctgacagttaaactctgggaatacctttataattacgctaaaaaacatcaagcgaaaggaaatggctttggtttcggtttagtatctccagaagatgaacaggccgtagctagaacgctttctgcccgataccataaagatggctcagaaatcctcattgatagaggatggaataaagctacaggtgaacaaaactttcatgataaagataaccttgttaagagaccacgccgtttaacaccacgcgaatgtgctcggttaatgggatttgaaaaaccaggtgagtgcaaatttcgtatcccagtatctgatacacaagcctatcgccagtttggtaattcagtcgtagttcctgtctttgaggctgtagctaagttactggaaccctacattctaaaagcggtcaacaaaaccgataaaggtctaaaaaaagctggataa

SEQ ID NO: 145287 - DNA, 1236 bp, Enterobacter cloacae
atggatcacaggctaagagatatttttcgagtcgctgcaggcaagcatttaagtgctgttgatgctgatctttctcgatctcatcaacatgagataggagggcttgtaaaagtcggttttggtgatgtgctcggcaggccagggaaagaagaagcatttagatttgcctgtaagatggtttacatcactgatgaaatggaagaaccactgatagaagacgatcatgtcacttggtatgattctcgacgtaaatccccccaccgttctcctgaatacaggctttactatcatgataattctgtcactgaactaatacaagaaggagactttttcctaatcgctcagcaaacaaatggtaatttcttgatgtgttttgcccctgctgacacaagcattgaagctcagctaagaaatctattcggacttactaagcagcttaaagagaaatttcaatcttctaaaattagcgacaagcaacttcttcttctagtacagcttttactggagcaggtaggtataaactttgaactagaacatgaagaaaatgaagttttacttggaactttacttgagctctttccacaaggtttacctaaatcacatgaattttcagaactggcaaggagtcgtcgaccagcaagtccattagcccaccccgatgaagcattaatgacctggttagcagaagaagaacttctatttaggacttatgagctgtatcttgttcgcaatcgattactccagggatttgggcatgatgggggtgatgttgatgcgttcgtcgatttctctttaagcgttcaaaatcgaagaaaatcacgagttggttttgccttcgaaaatcatttaagccatttattcaaattacacggcttaacgtttgaaaaaggttcatcaaaaaatacaactgaaaacaagtcaaaacctgatttcctttttccatcatttaaggcataccatgatatatcttatcctcctgagaaacttattttacttggtgcaaaaacaacatgtaaagatagatggaggcaagttttagctgaaggcgatcgagtgcccaataagcatcttgtaacaatacagccaggcataagttactcacaattatcagaaatgaagagtaaatctcttcaactcgttgttccatatcaattatgggagtcctaccctgaaagcgtaagggatgaactaattagtttaaagcaattcatagctttagttttagccaaaaattaa

SEQ ID NO: 145288 - DNA, 2493 bp, Enterobacter cloacae
atgttaaactttgataaaataggtgttggcaatgtagtaaacacatcatattcaccacgtgagatatttcaagcattacctaaaaaggataatgcaaattttcaatacccaagagatgttcaatcggaagtatggactaaatggcagggcagcagggattcaacgaatactattataaaaatgaatacaggaggtgggaaaacagttgtaggcctaataatcctaaaaagttgcttaaatgaaaaaaaagggcctgctgtctatttagttccagacaattatctagttcaacaagttattaatgaagcaaacaagctaggaatatcagttacaaccgatgagacatctgtaggctttttagccggaaatgatattttagtagcgaacatttataagttagtaaatggaaaaagcaggttcggagttggtagcgaaggaattaagatcccaattggtagtattattattgatgatgcgcatgcatgcctcaacactgttgaatctcaatttacagcccgcataattaaaagagagaaaggtgatttatatcaccaactactatctattttctcacatgacatggcaaatcaaaattatgtaaaatatagggagatactaaatgatgattatgctgcactgcaggaaatttcattttgggcttggcaacaaaaaatagaggaagtcacccagttattagtccagcataataaatgcgaagaccttttattttcattaccactcataaaagaaaaacttagcctttgcaaatgtgtaattagtgctaaaagtatagaaatcactcctcatattgtacctattgatatttttccttctctagagaatgcctaccgaaaaatatatatgacagcaacactcgcagacgatagtatcttatcaacgcatttcggagtggagcctaatgaggtaaagaattgtataactccagaaagagcaggtgatattggtgaacgcctcatcatcttacctcaagtcctcaaccctaaaatatatgataaagatattaaagaaatatgtcagaaaatttcatcaaggcataatgttgtcgttatttgcccttctgaatatagagcaaaagagtgggctgatatttcacaccaaatactgaaaggagaaaatttaaatgatggaatccataaactaaaaactagtcatgttggtttaaccgttttaataaatcgctatgatgggattgatttacctaaagatgcttgccgtttacttgtcgtcgatgggttacctaatgatggaaacaacattgaaaaaattaaaaatggtatattgttaggaagcaaagaaggaagtattagaaccattcagcggattgagcagggtatggggagaggggttagatctaatgatgactattgtgttgtgatgttgttaggaccacaactagctaatttattatatgttaatgatgctaaaaattatttttctcctgccactaaatctcaaattgaattatctgaacaaattgcacagcaattaacatctcctagtccagatgaaataatccaagttatggattattgtttatcacgcaatgaacaatggatagctgcaagtaaaggtgtcctatctaaattaacataccaacagccgctaaacgaaaataactttaataacatgctgtttaaggctttttccttagctagcagaaatagttacccagccgcatgcagaataattgaagactattgtaactcttgttcagataaaaaactaaagggatatgccaaacaaatactagctgaatatactaatttttacgacccaagtgaatcacaaaaaatattaaagtcggctaatgaattaaatcaaagacttcttaaacctattcaaggtatacaattcaataaaatcgatcaagaattacaagttcaagcgttgaaactaaataattacgtacaagagcgatataattcaagcaacaaccttctcattcatttaaattctatattagatgatcttcaattcaaacctagctcatcaaatcgatttgaagctgctatttatgagattggaaagctaatcggttatgaaagtgaaagacctgaagagaaatacaaggaaggccccgataatctttgggcaattaataaaggagagtatctggttattgaatgtaaaaatgaagctactaatgaaaccatttcaaagtattattgtaatcaactgaatggctcaggaatttggtttaaaaataattatgatcattttagtaaaatgactccaatattaatccatccatccataaatatcgagtcagccgcatctttggaaccaaactctagaattatggacgctgaaaaactgagctatttcaaaagcaacatccaatctttctttaatgctcttgtagccaataacgaactcggtaatattgatgcaataagacaaaaactggccttctttaaattgcaatcaacggatcttgttgaacaatatacaaaaccattcaatcaaagatag

SEQ ID NO: 145289 - DNA, 726 bp, Enterobacter cloacae
atgtgcctttcgattgcgctattactttacggtttttcacaagcatggcctgagtggtgcctcgctataggatttattgtaggggtagcaatatctgtttttgcttacatgtacgatcagctaagaaagactactgtgcttttttatgattttgatgatcaaatgatggcatgttaccagcaactccatgatagtggagccaagctcgcaagctgctcaaaagtttggcatatagaagcttctggagccgtttatgatcccaaatatcatgcaggggctggtaacttactacgcagaaaagtaacctctatcagcaaatcaaagcctccctttgttaaaacaaatgttgagacgattgctatcaatgtcggtcgccaaacattacatttttttccagatagagttctcgtttatgaccgtgaaggtgtaggcgctgttggttataaccagctattcgttaatgttgccgacagtcgattcattgaaagcgaaggtgtacctggagatgccatagtcgttggaaggacatggaagtatgtgaacaagtctggaggcccagacagaagatttaaagacaattcagaacttcctatatgcctgtatgaaaatctttcgtttacaagtcattctggactaaatgagttattacaactgtctaaaactggctatggagaaagcttttcacattcaattgaaacacttagcaaaaaagtcatttctgcttag

SEQ ID NO: 145290 - DNA, 129 bp, Enterobacter cloacae
atgatgttgcagtggatctgcgccacgattctgagacatttggtcagtatgtgggtgttcttctttctggcgagaagaataaccaattatacgttcctcccggatttgcccatggattttgtgtattaa

SEQ ID NO: 145291 - DNA, 1368 bp, Enterobacter cloacae
atggatgagattgattattatacagataatgtcaatgagtgtcttacagggtatgtaacaatagatggaggtaattatgtttcagaattgtcaatagatgatgatggaatagaaattcgattgcttgattttaatagtaaaatgaatcgtgcatactcagaagttatggcattgaattcaattttgtttcagaaaggcactcgctattatcttttgtttggtttggaattacatgaaagctcttttatgagaatgggggttgatggaagattcaatacttatacattctccgctcagggtttcttatattcaaaatcaagggtgaatactaactctttatttaccagtgtaagcattcatggagaaaatataaaaaaatggtctggcagtactcgtaagttagataaaataatagaatgtgggcttgggttttcaaataaattacctaatgatgatgattgtgttgagtttgagaaaaatatagacggactcggaaagattggattgtattattcatatcgatacggtggcttaagtggtttgcatacagtaggaatggacgttgaacctcatgttacggtttcctttgaaaagcctgttggacttgataggttaatcgaaaactatattgatttatatatgatattaaggttcttcattggtggttcgctaatgatatcaaatattaaaactaatagtgtttctaactatgggcgagaaaacattcagatttacataaaagaaaaaaaagaagatcataaaactatcaatactggcatgtttttaacctattcgactatatatcacgatgactcagagaaaaattttcctgattctgtttgggagggatattttaatcctgaaaaccacgagatcaaagaactcgttaaaaaatatgtgacttactccatggttcacagcaatgaagaaaagtttcttggtttttataggatgattgaatccatgacgataagaaaatcatgttatgtcgatgaagcgttattatcaaaattgttgaatagatcaaggtgtttattagccaagaaatttccaggcgcaccacttggtgatttcattcgtgcgataaagagaacaaataagagtaagcacaatactgaaagttgcatccatcattttataaaaagccttcctgaatcggttgttattaagttagatcttaaaaaaataagtatcaatgaagtatgtaagtcgcgaaatcaaattatacaccagccattgttttcagaaacaccaagcaaaatctataaacatatgcaggctacggagatacttacaaaactggcactattgattaggcttggcgttcctatgcaaaagatagaagaaataatttgttatcatcgataa

SEQ ID NO: 145292 - DNA, 528 bp, Enterobacter cloacae
atgcaaaaattgtttgatggtaggatcttgcacacatgcagatgcttaactggcgagggtagacttataaacaaattatggcttcatcaacttctaactagactagtagcacaaaggtctaccgattttgtaggaattggggttattgcttatcgaactatcgagaacttgcctgtagttcctttagggtcgcgccttaatgcagataaaggcttacccatttcgggtacagacgacgtctttaaggttcttgcaatgttggcaactcgcggaagcagtatgcatgatggttttcacctcattgaggcaaaaagtggagatctcactcatattgcgcaatttgtatctcctcctctcgatgttgctcttgccaacccattagctgtttggccgcaaggcgctcgtcagatgacagctaaactaatatcaaccttaccgcaagtggaagctgctgctgtaatatccgcagaaggatatatacacatttataaaaatggttttgaagatacaattggtgagatccaatga

SEQ ID NO: 145293 - DNA, 666 bp, Enterobacter cloacae
atgaataaccttagtctaactaccgccgagtttgaacgcctactaaaagtatttggctggctaatggggatactgggcttgctaatttttcttatacaatggtattacttccagcaaccaataccctctgctgcatggaaggcattcagcacatcgcttggtctttgtgttttattcttcggggtattctcaaaattagcctggcggtggcggcatctagccaaatggatgaatcgacctctcgtacatggtgtttgggttggagagctaaggtcagactacggtgctgttgacggaaaccgattggtcattcctatttttttcgtgatacggcaaacctatctaactctatctattcaatcttttaccgaaagacaggaaggagaatcccgacttgaagctcttttaagaagctctaaaacagacgtgactaggctttgctatatgtttgaactaaggaaaattttttcaggcgcgcattcaataacaagcggtgcaggggaattaaagttagcgggagatcaattatctttgaacggaacatattggactaatacaccaacacacggagagataactttaagactcgtcactcgtgactgtaaagggatagcatcgtatcaggaagcagaaaatgtgcaacgtaaagtttccgttaaaaaataa

SEQ ID NO: 145294 - DNA, 228 bp, Enterobacter cloacae
gtgccattcaccgatataattgaagcgtacataatcgtatccagtttctttaaaaaaagcacggagcccaccaatagcatcctcaatacgtctgataaaggatgcaaacgtaccatgacgatgtatggttatttcacgaacgatgaaaacattattcccgatattttcacccataagaataccgccgacttcacgttgaccagcttttcggagcgctgccttcattaa

SEQ ID NO: 145295 - DNA, 915 bp, Enterobacter cloacae
gtgctgcgggaacatcgagttgtcagctctccgaactcagccttaaggctttcggaagaatcacagaagttgagtaaggtccgcataggaattgttgggctgggatccgtaggcagcaaacttgcgatttcacttgctcgttcaggtgttagacagttcttattagtcgatgacgattatctcacgccgggcaacttggtgcgtcatgagttggggtgggcccaagtgggagcgcataaggcatgggctgtaagcaatactttagcgcttatagcggctggagtgaaagtggatgtaaagattattcgtcttgcggggcaagagtcggcggtgacagcagcagctgcactaaaagatctgtctaattgcgatttgttgatcgacgccacagctaatccagaagtctttttgttgttagcagcgactgcccggcgaaatagaatacctatgtgctggggggagatattcgcaggtggttacggaggcatgatcgcgcgagcacgccccaaacacgacccaaatccattagctgtgcgtgacgcttaccattcttatctctcaaccctccccgaagcaccttttaagaatatggctagttacgatgggagtgatgaacaaccacttattgcatacgacagcgacgtggggtttattaccactgcactgacacggctggctgtggatactgctttatgcagagagccaagcgaattcccgtattctttgtacttgcttggtatgcgtcgtgaatggattttcgaggagccgtttgacacacggccagttgaaataagtggagagggctgggaacgtgacgaaaatgctgtgagggatgaagatagggtcgaagttgcaaaggtattgataaatatgtatgaaggaaaacaaagtgctaactctgattctaccgactaa

SEQ ID NO: 145296 - DNA, 1158 bp, Enterobacter cloacae
atgagtaagttgagctatctggaaaaactgctgaatgaggctaaatttgagtggaaaaatttgagtgatgtggctcgtatcaaaaacggcaaggatcacaagtcccttggcgaaggcaagttcccggtttatggttccggtggaatcatgcgatatgcagacaactacgcctataataagtcctcagtcttaattccgagaaagggctcacttggtaatctattctttgtcgatgttccattctggaccgttgataccatcttttatacggaaattgatgaagcgcaaattcgcccaaaatatctttactacttcttgacgacggtaggtcttggcgacatgaaccaagcgggtggcgtgccaagccagacacaatcagttttaaacaagctaaaaatccctgtcccctgcccggataatccggaaaaatcccttgccatccagtctgaaattgttcggattctggataaatttactgcacttaccgctgagcttaccgctgagcttaacatacgtaaaaaacagtacaactactatcgtgataaattgctgagttttgaagaggatgaggttgagtggaagacattggaggaagtctcaacttttgctaatggaaaggggcatgaaaaagacatatcaaaagacggtaaatatattgttgtaaactctaagtttatatctactgatggcgaagtcgccaagttttcgaacaaacagctatgccctctttttaaagacgacattctattagttatgagtgatctgcccaatggcaaggcgctctcaaaaacatttattattgatgaagatcataaatacactttaaaccaacgtattggtggaattacagtaaaaaacagtaatgaattactccctaagtttttgcactattttttaaatagaaccccgcaattgctgaaacatgacaatggtgttgatcaaacaaatttgcgtaaaggtcaaatacttgaagtgaaagtaccaatgatttcactcatcaaacaagttcagatcgttgaaattcttgataaatttgatacttacactaagtcgatttcagaaggcctgcctcgcgaaatcgagctgcgccagaagcagtacgaatactaccgcgatttgcttttcagcttcccgaagccagatacagtcaatcagtga

SEQ ID NO: 145297 - DNA, 264 bp, Enterobacter cloacae
atgaacataaatactatctaccgccacccggctgaactggaagccaatgcgatgctatcccgtgaagaaacgcacccggggagttgctcactggcagggcgtaccgcagaacgcatgacccgtgcccgcaatgggctggctcacgttatgaccgaattagccccacacatggacgcagagcaaacagcagtcgtgcagtgctggctgatgaaggttttggctattgtcgatgccaccctgattgatgcggaggccagcgcatga

SEQ ID NO: 145298 - DNA, 1140 bp, Enterobacter cloacae
atgaaaagatcaattttagcgtgcgttattgctgccactcttctaaccgggtgtggtccaaaggaattaacccctgagcaaaagcaggaagtgagcaatctcaagagcgagctttcgcagacggaaaaagaaatagccgcagcaacagagcagcaggggcagttcacgggtggattaatcaaaaatctcacgacggccaggcttgaagtgctgggaattaataaagctcttttagaacaacgtatcaacgctatcgagtcgggcgctaagattgatttagccattagcggtgttaaaccagacccagaggcggcggcggttttaaaaactgaaattgataagcttgctgtccaaatcagcgatgccaaaaaggaagcaagccaatacagcggtggtcttgtccaggtgctgaaactgtcgactgttgcgactcaggaacagacaatggcgatgctacaacagcggtacctttcggcgatgtatggattggctgagatcaaagtccccactgagcaggctaatacggttgctgctgcaaaacaaacaccacaaccatcggcagcagccactaacgcaccattgttacccccgggcgaaggaccgtttggtttagatgttggtttatctaaaaagaatattgaggatatgaccggcgaagatcttaaacctgtggcaaatagtgctgacctttacacatccgcatcgttgccgaaaaagaatgctgaatttgaggcttatgggcttttaatctccccagatgctggcctatgtcaaataagggcagtggggaaaagcattgatactgatagttttggcattgctttaaaatccaaatatgaggaacttagcgactcactatcatctatctatggtaaagctgataaaaatgatttcttgatatcaggttcaatctggaaagagcctaaatactggatgatgtccttggataaaaaggagcgatttttgtcagcggaatggaaaggaactaaagaaaaaccactgaaaaataacctgatctccgtatctatcgaagctagagcggacggttccgagaaggggtatatttttctacagtataacttcactaataacgatatttgcaaagccgagattgaaggcgcgaaaaaaagctctctttag

SEQ ID NO: 145299 - DNA, 339 bp, Enterobacter cloacae
atgagagccggaaagatgaaacgccgcattacctttcagaagtctgaatctcaccgcgacccgactggtcagattatctatgaatgggctgatcttgccaccgtctgggctgaaattcgagctatcagcgggcgtgagcgcatgtcttccggggcactttactccgaggctaccgtgcgaatctggacgcgctaccgcgacgatataaccaccgcaaaccgcattctgtaccgatctccaaacgtctgggggcaggtttacggcattgtggccgtaattcctgatgtggatcacacccggcttgagctgctgtgcaagggaggcattttcaatgagtga

SEQ ID NO: 145300 - DNA, 1236 bp, Enterobacter cloacae
atgtggaatatctggccgtttggccgtaagtctgaaccctctgagcagcgcagcatgactattgatgaatttctggcgatggcagggattccaaataccggatcaggcgagtatgtgtctgcgggtactgcggaatctctgccggcggtcatgaacgccgtatcagttatcagtgaggctgtggcaacaatgccctgctatctctaccgcgtgcgcaacgataacgggcgagaggcgcgggaatggctgagcaatcacccggtggattttctgctgaacgagcagccgaacgactgccagacaccttaccagttcaaacgcacgatgatgcgccattgtctgctgaatggtaacgcctatgcggtgatccagtggggccgcgacggccagccgcaatccctgcacccgtatgcgccgggggcggttgttcctgagcgtatcggccagcataagtacaaatacaccgttactgaaccgtttaccggggctgtgcgcacctacctgcaggaagagattctgcacctgcgttactccaccgatgatggctttctggggcgttctcctatcaccgtctgccgtgaggcgctggggttaggtctggcccagcagcggcacggtgccagcattatgaaagatggcatgatggcggcgggtgtggtggtcactaaagagtggctcgatagcgtgaagggcaaacaggcgatggatgcactggagcgctacaagggcgccagaaatgccggtaaaacaccgatccttgaaggtggcatggactacaagcagcttggcatgagcaatcaggatgccgaatggctggcctcccgtcgcttcaccattgaagacattgcccgcatgttcaacgtgtcgcccatcttcttgcaggaatacagcaacagcacctacagcaatttcagcgaagcgagccgcgcatttctcaccatgacgatgcgcccgtggctggcaaacttcgaacaacaaatcaaatctgcgctgctggtggcctctccggttccgggaacccgctatcaggtggaatttgactctgctgaccttctccgcgccacgccaaccgaacgttatgccacttatgagcgcggcattaagaacgggatcatgaacccgaacgaagcccgtgaacgtgaggggatgccgccgcgtgaaggtggtgacgaattcagccaggcatggaagcaggaagtgaagatcagcaaagacggcaaggaaggtggcgaatga

SEQ ID NO: 145301 - DNA, 597 bp, Enterobacter cloacae
atgcgcgctaagcgccgcgccttgatggcgcagctcatcgcttgctgctcttggtcggcctacggccgttgggcaccaaaaaaaggtagggcgggcctgccgtcgtcgacgcggttagttccgtcgattacccaccggtcgcagcacctggtcgagccgttgaaaccggcaaaaagacatcaggcaccaaaaagggaagggcagggccaaaacccacataaggcctctaacggcctgcgaaagcgttccagaatccctcccgtatgggtcgtggcggcgttttttcagtgtcggaatggggtttggctatcatgtgtgaaaacttctcacagcgcgatacacgccgtttttgcggtgtgtaatagacggctgcccccactgaccctgtgccccgtgtatcggggttatcttcacaggggcggctgcccctactttgaaacgagtgtcaggcttcgcaggcggcccggagagccgttttcagagggggctagagtttgtggtggcggggaggaccataaaagcgcttacgctgtcattacagccgatttgcgagacgtagggccggatcggccggagcctttcttttggtgcccataa

SEQ ID NO: 145302 - DNA, 189 bp, Enterobacter cloacae
atgaaagacagaccacatagaaaggcgatggccgagcaattccgggccgatccgacttatgcggcggagttgcttgccgaagtccgtcgcgacggcaacccggacgagctggcaattctgttgcggcagatgcatgaggcgttcggggacgattgcacgcgttccggctctgcaacgaggcaactatga

SEQ ID NO: 145303 - DNA, 954 bp, Enterobacter cloacae
atgaccctggctgcggtatccagcagcgatgccgctaaagtccatgccgactggccctccgtgccggttgtctctgagccaaaacaccttttcaacgatccgaatattgatttaatcgttatccccaccccgaacgacacccacttcccactggcaaaggccgcgctggaggctggtaagcacgtggtggtcgataagccctttaccgtcaccctgtctcaggctcgcgaactggatgcgctggcaaagagtctgggcaggctgctgtcggtgttccataaccgacgctgggacagcgactttctgacggtaaaaaggcttctcagtgaaggcacgctaggggagatcctcttttttgaatcgcactttgaccgcttccgtccgcagatacgaaaccgctggcgcgagcaggctggtccgggcagcggcatctggtacgatttagccccgcatctgctggatcaggccgtcaatctttttggtctgccggtgagcatgacggtcgatctggcccagctccggcccggagcgcagacgactgattacttccacgcggtgctcagctacccgcagcggcggattgtgctgcacggcacgatggtcgcggccgcggaatcggcccgctacattattcacggcacgcgcgggagctacgtgaagtttggcctcgatccgcaggaggaccggctgaaaagcggagaacgtttgccgcaggaagactggggctatgatatgcgcgacggcgtgataacgcgggtggaaggtgaggaactggtagaggagaccttgctgacgatcccgggcaactatccggcctattatgcgggcatccgcgatgcgctgaacggcacgggcgaaaatccggttccggccagccaggcgattcaaattatggagctgattgagctgggtattgaatctgccaaacatcgcgccacgctctgtctggcataa

SEQ ID NO: 145304 - DNA, 1002 bp, Enterobacter cloacae
atgattgatacacgcctgcctttaactgatattcatcgtcaccttgacggtaacattcgtgcccaaaccatcctcgatcttggccgccagttcaatttatcgcttcctgcgcagacgcttgagtcgctgatccctcacgtacaggtgacctccagtgaaccggatctggtcagcttcctgagcaaactcgactggggcgtgaagatgctggcctcgctggatgcctgccgccgcgtggcgtttgagaacattgaagatgcggcccgtaacggcctgcattacgtcgagctgcgcttctcgccgggctatatggcgatgacccacagcctgcccgttgcaggcgtggtggaagccgtgattgaaggcgtgcgcgaaggatgtaaaaccttcgacgttcaggcccgtctgattggcattatgagccgtacgttcggtgaagccgcctgcctgcaggagctggaagcgctgctggcccatcgcgatgccatcaccgccgtcgacctcgccggtgacgagctgggcttcccgggcagtctgttcctctcccacttcaaccgcgcgcgcgatgccggctggcacattaccgtgcatgcgggtgaagcggctggcccggaaagcatctggcaggccatccgcgagcttggcgccgagcgtatcggtcacggagtgaaggcggtagaagatcgcgccctgatggatttcctggcggagcagcgtatcgggattgagtcgtgcctgacgtctaacattcagaccagcaccgtggcaacgctggcgcagcatccgctgaaaacgttccttgagcacggcgtgctggcctcgctgaacactgacgatccggctgtacagggcgtggatatcatccacgaatacaacatcgccgcaccacaggcgggtctgagccgcgagcagatccgtcaggcgcagatcaacgggctggagatcgccttcctgacgcctgaagagaagcaggcgcttaaagataaagtggctcgcggttaa

SEQ ID NO: 145305 - DNA, 321 bp, Enterobacter cloacae
atgtcacagacccaaacagaagccgaaatctttgtcctgcagttcccattcaccacggctgcgggtaactccgtttctcaactcactcttaagcgcctgatggttaaagacctcaagctgatcaagaaaacgcataaagacccggctgactgggatgagcctctgatttcccgcagtaccggcctgctcccggaggacctggataatatggaccttgctgattatctggagctgcagaaacgatttcagcaagtcactgggctgggcaaaagcaacaaagaccctgacgcaggcacagggactgctggcgaggtggtttag

SEQ ID NO: 145306 - DNA, 252 bp, Enterobacter cloacae
atgacaacatacctctattccggcccggccagcggcgtcacgctgtcggacggaaccgaaatactgctctggccggggaagaacgtctccctgccagaggagcatgactatgtgaaggtactggaggcgctgaagcatctgaccccggtacctgaagaaatcagccccgccagcaccccggttccgcagttaccaaagcgcaggaacggtggcgacaacgatgtgaaaccggaggactccaatgtcagctaa

SEQ ID NO: 145307 - DNA, 654 bp, Enterobacter cloacae
gtgtggactagcctgctaaaaaaactgccatggcgcggcatgttaatcgcgcttgccttagtcggggcgctgtacggcctgtaccactggggttatcgcggtggtcacaatgatgccaaacgcgacggggatgcggcgctcagcacgctgcagtcagcgttcgacgcgtacaaaacggagcaggtaacgcttgagaacgctgcgctgcgggcctgggcaaagcggtatcaggagcaggtagtcgccgggcagcaggctgaagccagttaccttgagcagattgctcaactggagagccagaacaaacaactacaggggcaaattaatgatgtcacccagcgctggattgatgaaaaaggtaagagccatcccattgagtgcgtgtttactcgcggtttcgtgcgccagtacaacgcagccctcggatatgacaacgcatccgtcgacaccggtcattcagacgcaactgccgccgctggcaccggcactggcgcagcgtccgggcaacctgaaaccgctgacgcctggctacgcgactcaggcgtctcccagcgtgacgtcctcgccaacatcatcgacaacgcgaagcagtgccgcagctggcgcagccagataaacggtctgctggacgaacgggaaggattacagaaatga

SEQ ID NO: 145308 - DNA, 543 bp, Enterobacter cloacae
atgatattagggaaattttctaattatattccttctgaggaaagcaagctttctgatttagaaatgatggaaaaactcaccgggagtagcatcatctttttaaaagatgagaatgatgtggattggtatgacgcgcagaaactatttgccaaagacacacttaaagttgtttttgatggagctaatgtaattcgctctttttcaactgacgcatctatgttaaatcctgttgatatgtcagtcggagaatgtgacacttcagatgttccggcaggccttaatatttttggtgaatggatttttgatggcgggaaaataatagccgcgccagtggattatgtagacgaagcgcagcgcaaaaaactggagctgatgactcaggcaaataacgtcatcgccactatgcaggatgcggttgatctaaacatggcaacagacgaagaaacagcaaatttgcaggagtggaaaaagtaccgagtgcttctgaatcgggtcgatgtaaaaaaaccggtatggccaccattgcctgagactgcgatttga

SEQ ID NO: 145309 - DNA, 561 bp, Enterobacter cloacae
atggcttcgacttggattgatgttactgataatgccgttaaaattggcttagggtcattgatagcactggccagcagttggctcaccctaaaacttgctcagaaccatgaaaataaaaaacaagtgcttgctcaaatcaataaagatattgaagataaaactaaaagatacgttgatttcttaacaacatcgcaatcgttaatgcagaagtatctgtttacacagtgtgatggtagaagcgacgactatcttagttatttaaggctgcataacgaaataagcattacctctgatgattttattcgtaaccatgctttcaaattacaattcgccgtttcatcctttattatttacaacaaaagtggtgatagtgaattaataaataaacttcgagacaacggcaggagtgaggcgtctaaatttcaatacattgccttcgttgaattagaacagttaaagacgaaaacccgagaaaagaaagtggtttctcaaattatcttaagttggtttaaacgacgcattacactttggaaaatcaaaaagatggacgggacttcatag

SEQ ID NO: 145310 - DNA, 1092 bp, Enterobacter cloacae
atgaaacgattaatacttgctgcgactgtaataagtgcaagcctgctgccatttacctgttcggcaaatgccgactcactgggtatcaataaagactgcgataaccatcctgtcagccagtacggcatggacaccattaccgcattcagtcagtacaagacggaatcgaaaaaatttaaagatgcactgactgcgttctgcaataaaggcaaaaccatgggcgacatgggatttgacgctgccaatgctcactctcttgctgaagcaaggaaatggactgactccagtcttcccgggggaaatgaagagcagaaaaaattttcagcagccatggggagcctgctttactatgcaatgctgaatggattctctggttttgactatcccaggccgcccgagcaaaaagaaaaaccagtaagctcatttaatccaaatgaaatatgcgatgacatatcatctaaagcagccaaatattcaacctcgaatctcccccctcaagtacagatttcattagctgagtggaatcaaatcaaaggcgagtttcagatggtgtgttttgcgggaattatggcgggtaacaatcgccagtcggttgactcaaaaatattggctggaatgaatgatattggcaaagaagtgtatttaagtgcttatcgttctggttcggaatacccaaagcttcgcagcaaaaacaacacagaaaaaaatgatgctgcagcaagggagaaagaggctgcaaaggagaaagcagatgcagccagaaaacaaagtgccaccaacaaaacaaagcaggctgacgattataaatccaggagtgttcgccttgactcccccgattttcaacgctttcagtcttcactcagaaatgaatttatgcggcgaattggtgatgcgacgcgtttttcaggaaaagaatgttcaataaatgtctggatgtcacagaaaggtgaggttctgtcagccaggaaggaatccggagatgaagagctttgctctgtggtattgcaggcatcgaagggaatgaggcttagccctatgagtaatgaagtttacggagtgttccgtaatccatccctcaactttaaattctag

SEQ ID NO: 145311 - DNA, 1218 bp, Enterobacter cloacae
atggccagctaccgcaacgtggctgtcctgctcctggattcgcagggaaataccctgttcagctcggcgcaaggggcggcactgcgccctgcgatgaacacggcggattttagcgaacaccgccgcacacgggatgtgtttctctggacggttgaagaccctgccgaaaacatgcacgccgggtccgacatgaaaatggaaacgtaccggattatcgcctcttcaggcacggcgacgctgcagggcaaaacgcagaactacgtgatgctgatcgggctctccattaattttcatctgcactacctggaggcgcttaaaaagaatctcctgatgattgctgcggcgatcagcctgctgattattcttgtcattcgtatcgcagttcgtcagggacatttgcccctgcgtaacgtcagcaacgccatcaaaaatatcacctcagaaaacctggacgcgcggctggagccgtcccgcgtgcctgttgagctggaacaactggtcatctccttcaaccatatgatcgaaaagattgaagatgtctttacccgccaggcgaatttttccgccgatatcgcgcatgaaatcagaacccccatcaccaacctggtgacgcaaacggaaatcgcgctgagccagaaccgctcgcagaaagagctggaagatgttctgtactccagcctggaagagtacaaccggatgacccggatggtcagcgacatgcttttcctggcgcaggcggataataatcagctcatccctgaccgggtggtgtttgatttaagtgctgaggtcatgaaagtctttgatttcttcgaagcctgggcggaagaacgcaacgttacgctgaaatttagcgggatgccctgcctgatagaaggcgatccgcagatgttcagaagagcagtgaataatctgctctccaatgccctgcgctatacgccagcagggaaagcagtgacggtttccatcagagaacaggatgacgacgttgaactgatgatagaaaatcccggtaagccgatccctcaggaacatctggcaaagctgtttgaccgtttctatcgcgtcgacccgtccagacagcgcaaaggcgaaggcagcgggatcgggcttgccatcgtgaagtccatcgtcaccgcgcaccacgggaaagtccgggtagaatcggatgcagtatcgacgcgcttcatcctctccgtgccgggaaaagcggtctga

SEQ ID NO: 145312 - DNA, 2994 bp, Enterobacter cloacae
atggatcgtggcgaagcgcgccccaacgaactgattgaagctaaggtcaatgagcattgcataaatcaacgcagtgtaaatttaaagcaccagtctaatgctcaggctggcaaaaaatcaaaaaaatggatcgatacgaacatgacagacagcgtacagactgaaacgaccgagggaaaaatcatcatcaacttgtttgcgcccaatcttccgggcagtaccaaagaagatgatctcattcagaaatctctgcgtgatcagttggtcgagagtattcggaactcggttacctcccctgactccgataagtctgctgggctaacacggtttattgatgagtccggtcgtaatgtattttttgtggatggtactcgcggtgcgggtaaaaccacttttatcaatagcgtggtcaaatctctgaacagtgacaaaggtgatgtcaatgtcagcatcaagtgtttgccgaccatcgaccctaccaagttgccgcgtcatgaacccattttggtcactgtgactgcccgtctgaataaaatggtgtccgacaagttaaaaggatgctggtcgtcgaatgaccataaaaaacaaaaagaacaatggcagaatcacctcgcgcagctccagcgtggtttacatctgctcacagacaaggaatataagccggaatatttcagtgatgctttgaagctggatgcccagcttgattactctattggtggccaggatttgtcagaaatctttgagaagctggttgaacgtgcatgtgaaattctcggctgcaaggccattttgatctcgtttgatgatattgatactcagtttgaagcggggtgggatgtacttgaatctattcgtaaattctttaatagccagaaattgttggtggtggcgacaggtgacttgcggctatattcgcaattgattcgcggtaagcaatacgaaaattacagcaaaactttgctcgatcaggaaaaagagagcgcccgcttagccgagcggggctatatggttgaacaccttgaacagcaatacttattaaaactttttccggtacaaaagcgtattcaactgaaaactatgttgcaactggtcggcgaaaagggaaaaggcggtaaagagaatatcaaggttaaaactaagcttgacatgcaggatattgctgccatagatgtccggcaagcgattggcgatgctgttagggaaggccttaatttgagagagggctctgatgcagacatgtatgtgaatgaattgctgaagcagccagtgcggttgttgatgcaggtgcttcaggatttctacaccaaaaaatatcatgctacatcggtaaaacatgatggtaaacaaggcagcaatgaaagatctgatgagttatcagttccgaatttacttagaaatgccttatatggttcgatgctaagcagcatttatcgagctgggttaaattatgaacaacatcgatttggtatggattcgctctgtaaggatatatttacctatgtaaagcaggatcgtgattttaacaccggattttatttgcggcctcagtctgaaagtgaagcattaagaaattgctctatttacttagcctctcaggtaagtgaaaactgtcagggtagtctgtctaaatttttacagatgcttttagttggttgtggttccatcagcatattcaatcaatttgtgaccgagttagcacaggctgaaaatgatagagaaaaattcgaccagattgttagtgaatatgtagcttatatgtctgttggtagaattgaaagcgcctcacattgggctaatcgatgttgtgcggtggttgcaaacaaccctaatgatgaaaaggttggcgtttttcttggcatggtgcagttaaatcgtaaatcacgccaaaagatgcccgagggttacaaaaaatttaacattgatactgagaatggtttggcaaaagccgcaatggcggcttccttgagtacggtagcttcaaataaccttatggatttcagtagtgtttttaatctgattggtgccattgcagatatctctgcatgtcgtcgtgaaagacctgccattactaatgcttttaataaagttgtagctcagacaacatgtattgttcccccatggagcgaggctgctgctcgtgcagaaatgaaaggctcaagtaaaagggcggataaagatgctgctgttttggatgttgaccttgatcccatggatgatgacgcaactgatgacagtcaacaggatgacaatcagcaggatggcatatcggaattttctgatgccattacaaaagttgagcaatggcttaataaagtaaatgaaattgagaatgaaattcgtccgtcggcacttttgattggtaaagtatggactcggttctatttcaaccttaataatgtggctgatcagcataaaaccaggctctataaagatgcagagcatggactaatggccagtcaatcaaatgctgcgaaaattatgcgttttaatgttttggcttttcttcatgcggtattggttgaagagagtttttatcattcagttagtaatgggaaatatatcggtgaagggttaagactaaatccagtcacttcggttgatgagtttgagaaaaagataaatgtaatgaatggaaaattgaaagtggataagaaaaaatggaaagatacccatccattgtttttcttattaatcagttgtccaattctacatcctttcatttttcctgtagggggggttaattgttcagccaaagcactgagcaaggaagtaagtttccttaaactgattggtgagattgttggcgataaattactttccaaagaagaatgggattatttatctgaaaatgataatcgaaaaagaaacattaaacagctggcgtctcaaaacaccataacatcgctgaattcttccacaatcgttggagcatcatacgataaagctacaccagccaggaaaactaagttgccttcaataaatgacaacgtataa

SEQ ID NO: 145313 - DNA, 2400 bp, Enterobacter cloacae
atggaaaggtttcttcttaactcggcattgctgttggatcggctgagcaccgtctcgttaaatgaggtatcacttgatgataaggtggagtcatccgtgttccttactcaatacgaacaaatgcgtagtctgcctgatcatgtagccaagtcggcttggtcatccctggaacagcgactcaaacagcgaaatatgaaacttggtccagtagcggccttgcgcctaatcgctgaaaaatttgttaaaaacgagaaagacggccctagaaccgatcttgctttgttctcggaatggcaaacgctgatgagccgagtgtcgtgcctgccaattatggcatgtcatcaggtctttaactctgggcctgccagccaggaatatagttttcgctggcctttatacccatatcacccgacggttgaggactacattacccgtgaacgcctacacgaaactcaccaacatctgaatggcagtaccagtgcggaagagtgttggctggatgcactcaagcacccagaagttagcatcagagattttgataagggctgggcatctcaagagatgaaacaactctgcgcccagattgacccctctctgacgcctgaaatcttcaaggatcgtttgcaaatcgctagcaatattcgcgaaattctttgtcgggtcgctcagggcgttgagttaccagagtggatagcatcaatgcagaatccgcagcagttagcggatagcacaattctgcattatgaccaggagtatgggtttgcgacggtttggccaactgacgacaaatacagtcaggagtctgaattttgctggctaaccgcgttgttggaaaaatggcggtatggtgcgcccgaaggattggaacgactgctttggatttaccttctgattcaaaatcagtacctgaccttactggttcagcgagacgattttttcggttttgatcagttccagaaatacaccatgacagagctgagagaagaaaccgagaaatcttatttgtctcgtttcaaacatgcgcatggtgccggtgtgtattctcaggtgcgttatctggaaggacgttttgctccgaagagcgaccccagcaaaatgcaaaaattgatcttcagtgtgttaagagggtattgggaatacctgagtgctcatatgcctcttgaatgggtgcatgataagccgctgactgtgtcgcaagtactcgataatctcgaacgggttgaaactaatggcaagtgtgcagagctggcgctagtgccgcactttatcaaaagaaagcccaaaaagggagaggtttatccttatgcattactattcaaggacctgaagaatcaagcctctatcttgatggatatgctgaagcatgagccgcgcttaatacgctggattcgaggagtggatgctgctgctaatgagatgcatgctccaccagagttgtttggacctttgttcagagtgctggctaaatcgggtgttgctcattttacctatcatgttggcgaggactttccgcatctgatcagtggtattcgatcaattgatgatgctttgaggtttttgccgttgcggaatggcgaccgtcttggtcactgcactgcgattggcatcacacctggcatctggaaacgctctttgccatcgtctttgtccatgaccaaagaaacgcgactgctcgatttgatatttatctggcgggaacttcgaagtcatccggaactgctgcgttacgctagtgatgcagcgattgaagcggttcatttggcccatgaggtattttcgctggaagaagaaatctcgattaccacccttgatcaggtgtttgagttgcgggggatgttggctgaatcggaaggcctactgggtgaactggatgggccattaaaacccagatccctatggttggaagagtacgagcgcgccagagagttggctaaaacggcaggtatgaaaaggccgctgaagttgtataagcaatggcttacatctgacaacgcgcaaaagcagcgtgctgaatatgttgaagttgccctagaatatttgccggatgaagcagttattgcattacaacaagctgtaatggcaaaaatagcagaccgaaacattgcgatagaatgccctccgaccagcaatactcgcattagtcagtatcgagatgtcagcgaacatcatatctttcgctggataggcttgccgggtgaggcggttgaaggtgacgtccctatgtctatttgtttgggatctgatgatccggggatctttgcagcggatttgaaatccgagttctatcatttgttcgttgtgttaacccgaaagtttggtttgtcgccagcggaggctttgagaaaggtggcagaggtgaacgagaatggacggatttatcgctttcatgatgtcagctag

SEQ ID NO: 145314 - DNA, 342 bp, Enterobacter cloacae
atgaaaaccatacctgcaacaactcagcgggcggcgaagtcgtgcccgtcgcccgtggctgtctggcagatgctacttacccgtctgctggagcagcattatggcctcaccctgaatgacacaccgttcagcgatgaaaccgttattcaggagcatatcaacgccggtattacgctggctgatgctgttaactttctggtggaaaagtacgaactggtacgtattgatcgcagagggtttaactgtcaggagcagtcaccttatctacgggcggtagatattttacgggctcggcaggcaaccggtctgctgcaataccgtcgtaacaccttgtcgctctaa

SEQ ID NO: 145315 - DNA, 345 bp, Enterobacter cloacae
atgaaggaaggcaaaaagatgccactaactgatgcaatacagtggggattacagcgaagtgtcacgccgtgttttggcgcaaggctggtgcaggagggcaaccgactgcactacctggctgaccgggccagcatcaccggtaaatttggtgacgccgaatgtctgaagctggaagcagcattcccgcattttatccgccagatggagctgatgctgagcactggcgaactgaatccccgccatgcgcactgcgtcaccctgtatcataatgacctgacctgcgaagccgatacttgcggcagttgcggccacgtctatatcgtcatttatcccactcaacgttaa

SEQ ID NO: 145316 - DNA, 477 bp, Enterobacter cloacae
atgactttcaacttatcactaccgcaggaactgccgctgacaacccgacgtactgttcagcgtgccctgtcgctgcttgaaaaccatctgcgcgagcccggcacgtcgttcacgtccacaacgattgtccgggactggctgcgcctgaaaatgaccgggctggagcgcgaggtgtttttagtgctgtaccttaaccagcaaaatcagttaatcactcacgaaaccctgtttaccggcaccatcaacagtacggaagtgcatccccgtgaagtggttaaatcggccctgcgccataatgcagcagccgtgctttttgcccacaaccatccctccggtgaagctgagcccagccaggccgacagacagattaccgccagactggtaaaggcgctgtcgctggtagaaatccgggtgctggatcactgcatagtcggaggcatgacagtggtttcatttgccgaacgaggctggttatga

SEQ ID NO: 145317 - DNA, 447 bp, Enterobacter cloacae
atgaatactgcaattactgacgccatcttatcgtcagacactattttcgccacgcctgtcgcagatgaacagcgccccggcttctggccgcagcattttggcgctattccacagtggatattactggagccgagcatcttcgcctggatgggtcgtttctgtgcggattatatcggcggtatctggaatttttacacgcttagcaacggcggggcctttatggtgccggacactgaccgcgatgcgcaatggcaactctttaacagcatgaatggcaatgatgcgcaaatgagtgcagaggccgccggaattaccgtctgccttatcgagtacagtcatcacgcctgccgtaccgggtgcgatgccatgacagcgcacttttatcgtctgcgcgagtatgctctgcgccatcaggaatgctccgccatcatgcgcattatcgactga

SEQ ID NO: 145318 - DNA, 690 bp, Enterobacter cloacae
atgaaaaccagaacaataattgctctttttctctccgctgcctctgtttctgcgcaggcaggcaactggatagtgaaaaatggatggtgccagaccatgacggaagacgctcaggcgctggttatgctgaaaaaagacaccatcagtatcttcggtcagttacaaggttgccccaacggccagcaggaactgatgggaagccgtatcagtattaacgggaatctgctcccaacctctcagatgtgtaatcaacaaacgggctataaagctgttgaaatcgaaggcggacaggcatccgccgcagccagaaaagccattgaatcaattgccgctcaggatatttccagcgtgcaggtctttggcacacaaatgaaatttactcgtggtgatatgctccaggtttgtcctaaatatgtcagcgcccttgcagacgcatcagcaaatgccacagggaacaagccgctgaaagtaaacaaaggctcggtaatgaaagcggccagacaggcttacacaaaagaatatgaccgtgaaacggctgacgccgccgatttcggcagttacgaagttaaaggcaataatgttgtttttgaagtctacaatgccgcttatcgaacctacgataaaatcgttgttgctgtaggacctgatggtaacgccactggtgcaaaggtggagtacatggggcaataa

SEQ ID NO: 145319 - DNA, 417 bp, Enterobacter cloacae
atgtttgaccgtaaggtgtgcgcccagggaattcacaaagcccaggaaagagaggaatatgggatgtcaggaacagtacagatggagtcgtttaatgcagaatttttgaccagagaggaactgcacgacctgattttttaccggaaaagttttgatatcacgaatgtcgccgacatcagtgaaaccgccaaaagagtggagtatgcgattgaacatcagcagaagaaattaacctgccgtgtatacaccgaatacagaagcactgcggtggcaggctctctatggtcaccaacagcacttcttggagcggtaagcgtcgccgcaatcggtgtgcataatctggcgacatggaacccggactatgaaattggtaagaactacgtaaaacgaaccttatccgtaaggtataaaaagtaa

SEQ ID NO: 145320 - DNA, 891 bp, Enterobacter cloacae
atgtcccatacccccgaatcgcaggatgccagtaatatcctgcgtgcctgctttaatttcttaccccaacaaatgaccgaacgtattctttcccacctgcaacacgccatcaactacgagcccgtaattggcattatgggcaaaagcggtgcgggtaagagctcactttgcaacgccctgtttcaacaaccggtatgtctgaccagcgatttgctgggttgcacccgtgaaccccagcggatggagttcacagtgggcgagcgcagcatgacactggtggatttgcctggagtgggcgagacaccggaatacgatgcagaatattcggcgctgtatcagaagttgctgacggagctggatttgattatctgggtcctgcgtgccgatgatcgtgcgcgggcggtcgatatcgtcacgcaccagtcactgcttgcttatggcgcggatgcttcccgtttcctgtttgtcatcagccaggcagaccgcatttctccgttgccagaacctgccggacagactgttccttcaacggagcagtgcctttcgcttgcggttatcagttcgcagattgctggtcagttgccgtcttctttcccggtgatggccgtttcagcacataccggctacaacctgcatgctctggtggaactgatgatacatgcgttacctgtacaggccagtagtgctttttatcgccagttaaagccagaaaatcatacggaggagggtgatgctgctgtacgtcagcgttttggtgaaatagccggttcggcttttgacacggtgatcgcttctgagcatctgccttctggctggagcttgttgctgaggaggttgcgggaaaaactggtacagctcgcatcggaattatgggagcggatttttggctga

SEQ ID NO: 145321 - DNA, 1080 bp, Enterobacter cloacae
atgaataagaatgataaggacagtcatttaggtactttgagtaagttacttgctaatgaagcattacagaaagagatggtttcgactgagcaaccacttacctcagccgatcctgaaaataacaagaaagactctttcttgcaggcatcagaggtaaagcagtgcactgacgatggtgagtgcgcagatgtagatctttctcctgctactctggtggccgaaggaaatcaaactgaccctgcgatagaacgtataatgcggctgaagttgcataacgaaaataccacatctaaaaagcatatcttaaatggaggtgaagacccctaccttcgtgatattgattttaggtggttaaaaggagatgccaatgagcgagctattttctggttttggatatatatccggactgcgtcaaatagcagtcttaatttgccagaattaaatttgcaaaatggctgggattcagagggtcattgtttgtattctttttttagacttccggataatcccgtcagctccgctgaaaggagccggttaattattaccttcttcaataaactctcgggtttcttcaatcctatccatattaaagagtcattcgaacatattcgtagtatctggcttcacttgattagccctgttcgacaatttaaatggttaaagaaaaaagactatgagggtattgaatgggcgtgggattatttattaaaaaggaaggatgttaacgataacatccttttttggtttaagcccgcagatgcaaatgagaaatatattgcgatcatgggggcaattgattgctgggttattcggggaagtaaaattgattgtcaggataaaaaattacttctggataacatgaaaaaagcgtttcagcagcgcgggcgacgagataaaaagaaaagctttaatcttaatactgagatttctataaaaacccgtagggaactcaaagagctggttaaattgcatggcgttaatataaataagtttattgaagggctgattaatgatgaatatgggaagtataaaggcaaccccaatgaatataaaatatctttattaaagaaaaaacaataa

SEQ ID NO: 145322 - DNA, 600 bp, Enterobacter cloacae
atgaataatagtcaccaatataacccatcatggaatccaaactggtttctttcagtgattctggataatcatatcgatgcaatggtagccaggtattcttgtttactaacattacgcctagacttcttttataaaaagaataccccccactacttacatcaagatcatcatgcacttgagcgtgacctgcgattattgatgaataaaatgatgcaaaaatctgctattgtgggctatttctgggtcattgaatggacagccgaccatggcttccatgcacatgctgcatactggctggatgggcatcaaacgcaaagatcctatccttttgcacagcaggcgggagaactctggaaggaattaacccaacaggagggctattttaatatctgccaatttaaagaaccttataaagccgatatcaatattccggtgcgttataatgaacccgccagcattctaaatattcgtcgagtaatgagctatctgacaaaagaggagcaaaaagaggggctctgttcatacggatgcaatgaagttccacaacgtccatcgtcagggaggcctcgtaaagcgatggacactatttctgaaaaatag

SEQ ID NO: 145323 - DNA, 1164 bp, Enterobacter cloacae
atgagctggcctatggtgaaacttaaagattgctgtgacgtagtgggaggagccacacctaaacgcaacattgcttcttattgggaaggggatattccttggataacaccaaaagatatatccaaccttaagtctccttttatttatgaggcacctgaatatatatcttcggcaggatataaagctgctgcaacatatatgttgccagtaggaactatattacttacctcacgagcaccaataggaaatgtggctattgctggtattgaactttgtacaaaccaaggttttaaaagcttaatcccaggaaaaaatattcacaataaatacttatatcattgcattaagaaatttgtaccaaaattagagttgcttggtaatggtgcaactttcaaggaagtatctaaaacagttgtagaaaatttcgaaatacctttacctccatttgaagaacagaaacgcatcgcgagcattctcgataaagcagatgttatccgtcagaagagggaacaaacggtcaaactggctaatgattatttgcgtgcaacctttttggagatgtttggggacccagttcgcaatcccaaaaattggaaattaggaaaatttggtgatatcgcagattgtcagcttggaaaaatgttgtccaaaaaatcaaaaacagggattttttcaaaaaaatatttacgaaacgctaatgttagatggcgaaaaattgatacccacgatcttcttgaaatggattttaatgaaaaggaaatgtctaagtttgagcttagaaggggagatttactggtttgcgagggcggagaaataggtaggtgtgcaatttggaataaccaaattaaagattgttattatcaaaaagccctgcatagagtacggcctaattatagcttggttacttctgtatacttacaggagtatttatattcaatggcaaaaaaaaatgccttctcagagtttatatctgaagtgactttcagtcatttgactgccgaaaaactaaaaaatttacttgtaccagtaccaccattatcgcttcagaaaaaatttgaactgatatataataaattcaattcattacttaatgataagtataacaatcatgagctttcgtttactttattatccaacaccattaatgaaagtgtttttaaataa

SEQ ID NO: 145324 - DNA, 1590 bp, Enterobacter cloacae
atgaatttcaagaaaaaactcgaagagcattttaagcagttcgaagcatccccagtgttatttgttggctccggagtgtctcgtcgttaccttggtgtgccatgttggcaagaccttttgaagcatttcgctgaagcgattggggaaaatcatataaaattaaaaacaaaatcaaatggtgacctacccgaatatgcacaattattggtatcggcatacgctgataaatggtgggacactgaagaaggacaattagcattaagtgaaaaagaacaggagaaaactttcattaacgaacaatctcctttgaagttgtcaatatctaaatatattgagaatgcacatgaaaatattatagataatggtgagttaaaacgcgaaatttctctttttgcgaaagcaaatattgatggggttattaccacaaactgggatgtttttctagaaagccttttccctaaatttacaacctttataggccaggatggattgattactggcaggagccacggtattgccgaaatatataaaatacatggttgctgcactgagcctaactcattgattttaacatcaagtgactatgataaatatagaaagaaaaacccctacctatcatctaagttactaactatgtttatagagaggcctgttattttcttaggctactctttaacagatgaacatatagctgaaatcctggaagatatagttagttgttttcctgatgccagtttggattttttacagaataaattattgtttgttgaatggaaacctgaacttgaagaggctgacattagtgattctgttattcataaaaaaataccagtaaaatatgttcaggcaccatcttataaagaaatatttgaggtgctgagtgaaactaaaaaaaggattccagcacatttattccgaatgataaaagatgaactttatgagttggtcttaactgatgatccgaaaggaaaattatatgtgagggattcagagaaaattgaagaaggggtcagtacaacggagtttgttgtgggatatggcgctatttcgatggtgaaaaaatcggaatcgatggcagctaaaggattagttggactggaacgtgtagaccttatccgagaagttgtatttgaaaatggacattatgattggggatgtgttgttaatgatgttttgccaaatatatgtaaaggcaatgcgcgcattcctatttttcacttcttaaatcacgctaatttaattaaaccagatgggaatgtaattaatgaaataggactctcaggtggcgttttatcacgattaaatatcactccagtaagttttcagtctcaaggatgggataagagacgttctgaaaccgttcctgaagtcagagtgggtgtcaatgagttatatcttgcttatgagttcggtttctttttaagaatgatgccatatatggagccagggttaatcaagcgtgacatagatgagcttcttaaaatattgaagaaacatattgatgaagctatgagcattcaagccttatcaagcaatttctgtcgattagtctgtgtatatgactacataaaaaacagcaatcgtttatag

SEQ ID NO: 145325 - DNA, 966 bp, Enterobacter cloacae
atgcctttagatttaagtaacactttagttattggcatcagcgcaactgcgcttttcgacatgagcgaatccgatcgtatgtttcgggaaacctatgcgaccgatcctgatagcgccattgaaaagtatcgagcctacatgctggaacacgaaaaccagcctttacaaccaggaacaggttatcccttagttaaagctcttctgggtctgaatcagtatcgtcaaccggatgatcaatcaccgttggttgaggttgttgtgatgtcgaggaatagccctgatacggggatccgcgttctgaatactatccgccatgacagactcgatatcactcgctctgcctttaccgcaggtgaaactgttgccgattaccttgatgcttttgatgtggatctgtttttaacgaccaacgttgaagatgcgcaaaaggttattgattctcggttttgcgcggcagcaatattaaaagacccaccttccgacgcctccgatatctcggaggggcaagtgcgcattgcttttgacggcgacgcggtacttttttccgatcaaagcgagttagtatataaaacacaagggatggctgcctttcatgctcaggaagacgcgaagcaggatattcctatggaagaagggccatatgccactctgttaaaaaaaatagccaagcttcaggaacgattgccaacccgcgttgagtattctcccgtccgtattgcactagtgacggccagaaacagcccatcagaaatgcgcgtcattaaaacactcagaagctggggtgtatatgtcgatgaggctttttttctgggcggtgtagagaaaacaaaagttctgaaggcgtttaagccacacattttctttgacgatcaggatgtgcatttgatcgcggctgcaaaggtagtaccttccggaaaagtcccttatgccagtaactccgaacttgcagaacgtgaagcatcgtaa

SEQ ID NO: 145326 - DNA, 876 bp, Enterobacter cloacae
atgacctctgacaaaaccctaaagcaagcgatatcaaatatcaccatttggcgcaaaggcgaacagcgtgcgccacataagccattattgctgctgcacgtcctttcacgctatcggcagggtcatgagcgcttgtttaactatagttctgaaatctacgagcccctattggatctcctggaacgttatggaccgcagcgccgtgaccagcgcccggacatgccgttctggcgtctgaagggcgatggcttctgggaactacaaaacgcggaactgtgctcaaccaatggtagctgccagccacctcgacgtgaacttatcgaatataatgtcgcgggtggatttgatgccgataattttgcgttggtggcaaaaaatcacaggttaattgatacgctggcgcagcagctcctggaggcgcatttcccggccagtattcaggaagacatcgctgatgagatggggtttgatattcgcacctctctccgtcaacgcgatccgaagttccgtcagatggtgctacgtgtttacaattatcagtgcgcgatctgcggcttcaacatgcgccacgacaatgcgccaattgccctggaagctgcccatatcagatggaagcagaaccatggcctttgtgaagtacctaatggcctggcattgtgcgcaatccatcataaagcgtttgatcgtggttcgattggtttggatgaaaatatgcgtgtgatggtttccggtgcggtaaatggtgggggggtggtgcagcggctgttctgggattttgcgggaaaggcgattgcgttgcctccggttaaagaaaattatctgggcgagcggtttgtggaatggcacaggaaagaggtgttcagaggggagcattga

SEQ ID NO: 145327 - DNA, 1266 bp, Enterobacter cloacae
atggctctaacagatatcaaagtcagaacagccaagccaacggataagcaatataagctgaccgatggcagcggtatgcaccttcttgtccatccaaatggttctaagtactggcgtttgcagtaccgttatgacggcaagcaaaagatgttggcacttggggtttaccctgaaatcacactggcggatgccagagcacgtcgtgacgaagcgcgtaagctactagcgaatggcgttgatccgggagacaaaaagaaaaatgataaggttgaacagagtaaagcacgaacctttaaagaggtagcgatcgagtggcatggcaccaataaaaagtggtctgaagatcacgcccatcgcgtgctaaaaagcctggaagataatctttttgcagcgcttggtgagcgtaatatcgctgagttaaaaactcgtgatttattagcgcccattaaagccgtagagatgtctggacgtcttgaggttgctgctcgtcttcaacagcgcactacggccatcatgcggtatgcggtgcaaagtgggttaattgattataacccggcacaagagatggctagggcggttgcttccggtaatcgacaacatcgtccggcgctggaattaaagcgcatctctgagttgcttgagaaaatagacaactataccggcaggccgctaacccgctgggcaacagaacttaccctgcttatctttattcgatccagtgagctgcgttttgctcgctggtcagaaatcgattttgaaacgtcaatgtggaccatcccacctgagcgagagcccattcctgatgtgaaacattctcagcgaggttcaaagatgcgtacaccgcatttggtgccgctttcaaagcaggcgctggcgatcctgaagcagataaaacagttctgtggcgaacatgagttgatctttattggcgatcatgatccgcgtaagccaatgagtgagaacaccgtaaacagtgcgctccgggtgatgggctatgacactaaagttgaggtttgcggtcacggctttcgcacaatggcctgtagttcgttaattgagtcaggactatggtcgaaggatgcggtggaaaggcagatgagccatatggaacgcaattcggtgagggcggcgtatatccataaagcggaacacctggatgagcgcaagctgatgttgcagtggtgggcggattttctggatgccaatcgagggaaagggattacgccgtttgactatgcgaagatcaaccggggtaatggcgagtga

SEQ ID NO: 145328 - DNA, 180 bp, Enterobacter cloacae; identical to SEQ ID NO: 144106

SEQ ID NO: 145329 - DNA, 471 bp, Enterobacter cloacae
gtgaaaataaaaatcctgtgcgccacggtaatctccctggtgattcggcaagccgtggctgctgaaagcgagctgcaatttaaccccgcgttcctcaacggcgagagcgcaaacagcgccgatctcgcctgggtcaacgccgggagcgcgttgccgccgggtgattacaacctcaacgtgtatatcaatacgaattatgcgttcacgggtaacgtcacgttccgccttgctgaggacagcacgggtgaaacgctgccctgcctcacgcctgagcaattcgacgcgctgggcatcgatagccatcaggcgaagggcggcggcctgccgctggcgcagcgctgcatcttcttaacaaaggcgtttgcgaatacgcagtttgatctggaccagaagtcgctcaccctaagcttcaccgtaccgcaaagtgcgatgcgcaatttgccgcgcggatacgtcagcccggaaagctag

SEQ ID NO: 145330 - DNA, 150 bp, Enterobacter cloacae
atgagcattctgatttataaggatattttccagatcctgctgggatgcctcatccccgtcaaagtgaatatgcgaagcctgtattccgtattggttaaggatcagacgatatccctggaacgtggtgatgctgccaacttactgatttag

SEQ ID NO: 145331 - DNA, 276 bp, Enterobacter cloacae; identical to SEQ ID NO: 144257

SEQ ID NO: 145332 - DNA, 633 bp, Enterobacter cloacae
atgatgaataacacctcttttttgattggtagcgcatacctccgcgcctccactgatgaacaggacgcagaccgcgcccgtagggagttaaaggagtttgcagagcagaacagaatcaccctcatacgctggtacgttgagaacgaatcaggcacgaaactggagcgcccagagctcaataagctgctgaccgatgccgcccacggagaaaccattctgatcgagcgcatggacaggctcagccgtctgacgctaaccgactgggagaggctgaaacagcgtatcaaagagaaaaacttgaggctgatcgtgaaggacatccctaccacgctgatcagtctgacaaagggggataacttcgatattgccagcatggtgatgggcgtcgttaacgacctgctgatcgagatagccgccgccagtgccagagccgattatgagacgctacgcaaacggcaggcgcagggcatcgagaaggcaaagcaagcagggaagtacacgggaaaacccgcagatacaaagctgcataagaagattttgaagtatgccgccgcaggacatggcaccacggagatcgccaaactggcgggctgctcacgctccacggtgctgcgcgtaacacggcagcagtag

SEQ ID NO: 145333 - DNA, 639 bp, Enterobacter cloacae
atgactaattcaaacgctgctcaggtggataaccagctgagcctgattgaggacgcgctgggcaaatacgccgcgccgctgcctcaaatccagtcccctgacctcatccgggagcaggccgtcgatctgctcaatcgcgccgatgtgctggaaagcaacgcagacgagctgcgcaccgagctgcaaaaccgcgagcaggtcgtgcatgacattgatcgccagctggcgacgctggtcggtctggtcgaggagggtaaagcctgcctgcgttctggcgaaccggttcgccctgagtgcgccatggctcactctctgatccctgaggtggagaatgagctgagtctggcccgcaatgccgccagcgccgccaacgggcagctgcttgccgtcactaaccagatcgacacgctgcgcagccagtatgcgcgaatgattggacaggtagccttagacgcccgcatggctcacgtacaggcgctgcttgataccgcgatgcagcaggctgctgagctggggctggagctggcaaacaatcatcagttttccgctgcgatccgtgtagataaccgcctggctattctgggccgcaataacggcatgttatccagcctgagaaattatcaagggagttccagataa

SEQ ID NO: 145334 - DNA, 582 bp, Enterobacter cloacae
atgactattaaagccgtacttgcgcagctggctgcgttaaacagcacgatgaccaagagccacggcggaaacgatgccgggcgtgaggcaagactgaattttgaagaccataaactgattggcgactgctggcaggccaaagtctccggcgctcagattgaggagctgaaaaagtccctcaaagctacccatgacctacccgacgcagatcgtaaagcagcattctcagccgttcgccagtacctgctcaaatccaccgctggcgatgtgctggcgcaggcaatgagcggttcccctgtgcagttcgcgccggatatgaccgtgaaacgcaacatgagcaccgagcaaatccacctcgcacggcagcagcagatcagcgatcagcagcttatccgtgattgtgaagtcgccggagtggccaccgggcagatcgtagagctggcggcacgcctcgaagatactcgcggcctgccgaataacatcagacagcccggaattgatgctgtgcgccagcagttaactcaggcacaaccgagccccgcagagctgggcatcgactggagcgctcagggatggaaataa

SEQ ID NO: 145335 - DNA, 369 bp, Enterobacter cloacae
atggaaataaacagccgggccgtgttgctggcctgtctgtctgcgttgcgcttgcctgagggtgagcgcacctccgatcacgtcatgcagctggcgcacctgcgcaccgttctgcgtaacgaggggtattcctcccctgctattcatgacgacgcggctttactcaaagaggctgaggggctggcaaaggcccgccgtgagtggttggctgactccgctgatatgcgtcaacgccatgccgaactccagcaccttgttgcgttaaacctcttacctgaggatgaagcgaggcaggaacagggcgataactaccgggagcaccagttacgcgatccggttaagcaggagggaaaacctgaatatgattga

SEQ ID NO: 145336 - DNA, 2754 bp, Enterobacter cloacae
atggctattaaaatcccggtctccgcgcagtttgacgcggcagacctcaagcaacagattcaaatggtcaacgaccagatccgcatccttgcgtcgcaggttgggcaggccaataaacagaagtttgagcccattaacgtcaagtcaaaagaggacttggacgccttcatcaagcagatgcagaagctgctgaaagtccagaccgaactcaagcagaccatgggcaagacggggcagggctcaaccaatccccttatggcagactggaaaaagatgtatggcgatcaggctgagcgcatcaagaaaatgcagaacatgctgcaattccttggcgtggagtttgacgacgctccgaaaccgaagccgaaaccgccagcgcctaccccctcaaatccttctccagcgcctcagagcgggccgcagaataataaccagcctccggcatggcagaatcacctcagcacgatgctgcgcaacgctggcccggtcggcggcaccattagcggcgcaatgaatgccgggctttctggcggtgcaggtgcagggctcatgggcttggtcggcgggcttgcggcactcggcgtcgggaagattatcggcgcggtcgctgacaagatcggacaggcgcaggacaacgtgatcgggctggataagctctatcgtcaagtgggcggaattgtcagcttttccagcctccagcgtggtgtcatgagtaccgccaaccgtctgggcatgaccaacggtgacgccatcgcgttggcctctacatactcccgcgccgctaacatccagccgggacagaaccttggcaccggaatgctggtatctggaggtctggcacgctcctacggcctcgatccaaacagcgtcgcgggcacaatggggcagctctccgcctcccgtgtcgtaaataacgatcagcagctgcgccgcatgggcctgctcatgggggaagctatcggcaaatcaggcgcgtttgctcaggctggcgaagctatgcaggcaatcagcgactttgccacccaacaggcacgcatgagcctgaccgcgcctaatgtgcctggctatgcgggtgcaatggctggcctgatgagctcagggatccccggcatggatttgcagggctccaccaacctgctgggccgcatcaatgcaagcctccagcgcggtggtgcaatgggcgacccgtcgcgggcattcatggcccgcatggctctccgcaacggcatcaataacccgatggcgcttgaagttctccagtctggcggcgctttcggcacaatcagcagcactctggggcctgattcgctgtacggtcagcgttttggcggcagttaccacggcgatcagactctgctagatatgacccggcagggcatccaccgggcttatggctacggccctgactcaatcgtggctctctcacgccaccttggcgtcggcatcaatgacgcgctggcaattgaccaaatgagcagcgcagacatgagcggcgtttctgaccgcctcagacgcctgaaaattaaccccgacagcgtaaacgcaaccagttacgcagcgctgggccagatccaaagtggcaaagggctggaagtcatgggcaatgaatatctcaagcgtgggagccttgatgctggcgaacgccagcgccttaccgatgcccttattaaaggtgacccggagaagctgaaagacgtgctcactcaggttgccaccgtgcatggccctgcgaagaccgaagggagcgagatccgcgataacgtggcgaagctcaacaaccagtttgaggactacgcccgccgcgccctgcctgctctcgatgtcatgcgcatggcactggttaaaatgaccgggggcagtgaggacagtctgcgccgcgattatgaaaaggggatgcgcctcgatacgcagcagcaggcccgccgcaaatacggctggcgtctcgatgcctaccagcaggaaatgaacaccttgcaggacaagggcgtcggtatgcagaccatggggccagagggcgaccgatacagggcactgaaacgccagcagcagctcatgcgccagcagcagctcaactttgtagagcagggcaatgcaaatgcacacgcagctgcatacggcccgcaaacagcaggagaggctgcgctcgacagcaactatatttcttcaccatccgccgccgcagctggcagcggtgctgccggaaactgggcagggaacaatgtcggcaacgtgaaagacgttaacggcaactggcggcgcttcccatcccagcaggcaggcattgcagcgtctgcggggcaactgctgcgctacagcaccgggaagtatcaaggcggacgaaagcgcaccctgcgcgagattatcagcacctatgcgccaccaaaagaaaacaacacggcgctatacatcgatcaagcgagcaaatggacaggattcgaccccgatcaggagctcgacctgcgcgatcaaagcacgctgatgaaggttacaacagctgttttgcgcaaagaaaacacaaaaaatgccagcatcccgcaatctgttattaattccggcgtcaacatggccctgaataatcagaacaactacaagatcgcaccggaaaccatgcctaccgggcaacgcggaggaaaaattgatatttcagacgccaatatcaacgtaaatctgcaatacccggatgggcgtacacaaacgcaaagcgtcccggtaaaaagctctttcacgcagccgcgcagctttgccagtcggtag

SEQ ID NO: 145337 - DNA, 1266 bp, Enterobacter cloacae
atgagacagcggacaaccgaaacagacgacgaatggcgcaagagatacctcaaatctcaggcggcattttctgaggcgctggcctctgtgcccgccccttactgcgattgcgggcagtatctggagtggatcaaagggctgacaagcatttgctgctggttgtctgtcctcaatcggcaatcagaagccgccgacatctgcgcccagtggtctgagtccgtacctctgacctccgcccagttggcggagaatcgccagctgataaacgcgaccatcaaagacgctgaaaaaataatcaatgatgatgtgcgcgaggattatgccgctatgttcgcggcgcgagagcccggactccttcgccgtctctatatgattactgacggcgaatatgctccaccatccactcaaccccgacgccagcaggaagcccagcgcgaagccagacagcaggaatttgaggcccgtcagctggagcaggagctggcaacgcagaagcaacgccagaaagcctatgcagatgcgatgcgcatttatggcaagggtaacggcggaaacgatgccgtccgcgcaaccccgtactggcgcgagaaagagaaagccgcaggctttcccctccccgttcctgagggcatccgctgcggttcggcccgcatgttcctgccagtcgtcggcccggtctggtggaatggcgccgtgatcgtgccgttgtatgtcatcagtgagtatttgcagctgggccatgtgtccatcgagcttgtttgcggtcgctctaacccgccagtctcccgcacgggtgacaagcgcggcctcaaaggtggattgcgtcagggcgctttcttcccgattaacctggacaaagcccgccataatttgccgcttgttatcgttgaggggctcatgacggggatcgccgcctcgctcatgatgggcggcaaactcccggtaatttgtgccatgtcctgcgagtttttcagcagcgtgatcgacgagctccagattgcctatcctgcatcacctttctacatcatcggtgacgtgggagcagggcaccgcaaggccgcagacctcgccactgagagaggacgcgctgagatttacgcggtagaccttgagccatgcctgccggaggaaggggccgacgcgttcgatatgctggcccgtcatggggtcgataatggcatggtgctgttgcgctccatgttccgcactgcccggctggcgcgtggtgatgctactgtctccccgtcatcgtcagtcaatccttag

SEQ ID NO: 145338 - DNA, 303 bp, Enterobacter cloacae
atgagtgagcaaatgccaagccctgaaatgctggatagcttgatttttaaccatgccgcagacactgccagcctgctggtatcacggggcgtctgcgagcttgatcgcctctttggtgaggggtacgccgccgctaatccggttgtgctcaatcagtgggtggcggtcgccagcaccatgcagctggcccagttgcaaatcaatgccgccaacgggctggcctgtcagatcgagcgactgggggccatggctgacggcattgaagcaagcgcagcagcggcctacgcagggagaatgcaatga

SEQ ID NO: 145339 - DNA, 429 bp, Enterobacter cloacae
atgagcgagcgagtgcagcagttaatcactgccgagctgtgcagcatgatccccaaggcgctggcgcagtggttccgtgagggcggcaaatcggcggggcctgagggccctgtgattgcgttcggcaagcgcatcaagcgcggcggagtgatgaccattgtcgggcgctccatccgagggcacctgtgggccaccccagcctattacgccgacgcggctcgcatcatgcgcaaggataagcggggcaaagcctaccccagccactgcgagattgagcgcgagacgttcacctgccagctgctgcgccagatcatgagcctgacgcctgcggcttatccggggctccctgaggctgtcccggagtggcagaccattagcgaggcggagcaacgccagatcgtcgagaccattaacgcctgtttacgttga

SEQ ID NO: 145340 - DNA, 486 bp, Enterobacter cloacae
atgcagctggatttattcagacagaaaggcggcatgggactctctgagcgggaagccgtcgaggtggcccgcctgcgctggcacgctttccgccgtgcgttcgtgggcccgccctgccctgaatttatccgaggtgcccgccctgtatggcaccctatacctaccatcctgcccgtaattgataacccggagccggagccggaaccattgtcggagcttgaaattgagctatcaccggatgacgagggcgaggaatacggcgagcttgatataccggacgccactccgctgaatacgtcgcaaattctggcatctgcacgctaccagctggaagccgagcgcctgcaaaagctggggctctatcgccgcgcagctacccgctaccggaaagccctttcgatcaccgtccccggcaaacgggccgataacctgcgacgaatggtcgataagtgcgcccgcatggcgggtaaacgtgttcggggatag

SEQ ID NO: 145341 - DNA, 447 bp, Enterobacter cloacae
atgccccagctcagcatccgactacctgacgaccttgtgcagctgctcgacgaacgcgccagcgctgaccacctcacccgtactgacatcaccgcagcagcgctgcgggcctaccttggcgttgtgccagcacctgccgcaggtgacaagctcgacagaatgatcgagctattggaggtgattgcaggcattacccaacccactgagccaaaacctcaggggatgattgccacgcaaagggtaaaaaaaatcaaattcgcccaaagtaacccggcgtataaaactctcgatgtggcgatgtcatctttatcggcgcgaaaattatcactggaggatacagccgaacagctaaacaagatggggctaagaacagtaacagggaaagagtggacgcgcagccgcgtcaatgattaccggatgaaaatgcggagacaggggcaactttga

SEQ ID NO: 145342 - DNA, 513 bp, Enterobacter cloacae
atgaaaccaaagaaaacggcgtcgtttacgctgcgtctggatgccgatttgctggcccagattgagcagctggcagagcagcagcaccgtaaccgaacgggcattatcactgaggcgctgcggcgttacgtggagaccagcacggagggcgagcaggagcccgctggagaggtgcagaagctggatcaggtcattgcattgctgggcaccatatcgggccagctgggcgcacaggcgaagccagccccggcagtaaaagcagagcgcaccgcacctgcaccacaaagagaggcaccgcagggcgttgcggtgcataacggtgatccgcgtttcgtcaccatatcgggcgatgcagacgggctgatagtcagcatgacggagcagcgggccagccttgaggatattgtggcggcactgaatgcagccgggtatcgcacggcgaccgggcaggagtggactcgtagccgctgccgtgattacaggcataaactgaaagacttgggcaggctctag

SEQ ID NO: 145343 - DNA, 1584 bp, Enterobacter cloacae
atgagtatttccgagcaagaaaatgcagtgcagacagaagctaaaccagcgagcccgttaactatcgctctaagtgaagttttcgccgggatgctcagtgaatacctgcccctgcatgatgcagataaatgccgcactcgcctgcaagagctgggcgttaacacgcaggccgtcacggctcttatgcgctcaaccctctggcatacgccgacaaaaaaatacatgcacctgaaagggaatgaggtgctggacatcgtacagaatgattttaacttgctggagcgccccggagtgaaactctggcgctgtaatcaggcagtaaaagacatcctgagcgagcagggcgtgggcaccgtcaaaaagattgaggagtttcgcctcaagatggcaaaggctatccgtgaggcgatcagcggtgagctgcgttactcccagcaagccaagcaggtgcggcttgagattgatatgtttgcgcaggagccacgcctgaaaaaagagcggggcggggcggtgttctacctctgccatacgccttatggcaatttcgacaaagacggcaatcctgcgggttacgatcaggccattgccgatgattatctggatcacttccctaccttccccgcaatgctggacgccattgtggcggctcgcttcgcctcctctcgcaaatccgcatacatccttttgcaggcgatttctgactggggaaaggattttctgctgggcccgaaaggcgtttttgcctcgctgggcgtggctatctgcctgagtgagaaagatgtgattaaaatcctcagcggggctaacagcgggcatctggcggaggagtttctgggctgcttgatgctggttatcaatgagccgacgcaggtgacgaaaatccagtaccgtctggaggagtcactgaccatcacctctaaatttctggcggctgttaacgtgccgctgttcaccaaaattttcacctctgccgatccggttcccggcctcagtgatgctgacggcgtagacagccagatcgctaaccgcttcgcgcaggttaaaggggatggggatattaaactgcgcccgctgttcatgcaggacaaggggcattatttcgataacctctgccagttcaccgcctccgagattaacagccgcattgctgaatacgttgctatgggtgagaaggtggcccgcaaagctgccgatgatgctctgggcaaatggcaccagaaacatggcattgccaatcatgcaggcgacattaccgccagttacgagcaggtgcgcgaggcgtggtatgcctttgcattggatcgcgttgtggcaaaacatcctgacttcatcggctttaataccgttggcggctttgcacttcgctcctcctctgcttgctggacgcagttcgttgactggtacgcagggaaagaggatggaattaaacgtcagcgcctgctgcttgaccgtgatgtgctgattggcagcgccaaggtcagacagtcccggagcgttaacggcaagcgagagggcggctctaccgtgctgctgcctgagattccgatgtctatcccggacaatgttaagagcttcaaacgttaa

SEQ ID NO: 145344 - DNA, 456 bp, Enterobacter cloacae
atgcgagcaccatcaccaaaacgcgcaaaagccatcgccctgcgtgcggaaggcttaaccatgcaggagatcgccgcaaagctcggcattaaccgtggcaccgtctcaaaatggctcgcaaaagagcgatttaagacgcaggccaacgagctcgacaggctgatcagcgacgcgcaggccaaatatgacaacctgccacccagcgaggccgaacggcttcgggacttgcgcgactctctccgggagcaacagcaggtcatcatcaagcgccagatcaagctactggagagcgtgcagggcgaggctatgacagcactccgcagcaaagacctgcccaccgttcgcgcagcagcaagcctgatctccgccctcacccgcgcctttgctcatgaaggagcggtgtatggaatcatcgatcccgcagaggccatgcggcaggcgctgaaagacgattag

SEQ ID NO: 145345 - DNA, 357 bp, Enterobacter cloacae; identical to SEQ ID NO: 27183

SEQ ID NO: 145346 - DNA, 195 bp, Enterobacter cloacae
atgacctacagactcgacccacaacgcaaagccgcccagcagtggcacaagctactcaatcagggccagtgcgttgcggtaatgcttaacggcgtagttattgccacgggcagagaccagcacgatcaccacgtcaaaatcctgatggcgtgccatccggctgcggtactcgtcagagtggctgaccagctgtaa

SEQ ID NO: 145347 - DNA, 285 bp, Enterobacter cloacae
atgaatttttcaaacgggcacaacagtgctcagggccacactttgcctgaaaaacacaataccggtgcttttgcctatggattgtcagaggacggtttcggaaagctgactcgcgcaagaaatgcctgcgacatgctccagcttctcttttctgaatacccgtctcagggcggaacactggatgcaggctgtgcgccaggcattgccgcgctgatggagtacctgcgggcagatttgacggatattgcgcacagttgcgaactgattgaaggaggcacccaatga

SEQ ID NO: 145348 - DNA, 1278 bp, Enterobacter cloacae
atgaaccggcagccgtttacttcatcagcacttaaacgaaacttaagtgaaagtgagaaggcttattatttcaaaaaaaataattccgctgagttagaattactaattagtgatgccgttttaattgctaatgagaattttcgttctggtgttagtgtaaagaaactaaacattaaaggacgttgcgtttacactgcctcatgtttgaaagaaaaaataatacttagacattgtaacgcaaatctaaaatgtattgaatcacttcttcccaagcaaagaaatacaataattaatgagttgaaaatttatttgaaagaaggcactccattcaaaatatatcgtttggatataaaatccttctttgagtcaattgatctgccacaactttttcaatgcttacataatgaaacacgtctgtctagacatacaaaaaatttgttagaatggtatcttaagtcgtgtgagagaatccactcttcaaaaggattgcctagagggttggaaattagccctatgttatcagaattgtacttggcacaatttgataatagtgttcataggcacccagatgtattttattactcaagatttgtagatgatatggtgatcgtttcaagtggttatgaatgtgaagcgtcctttatgaatttcatacaagatttattacctaagggattgtcattaaataaaaataagttgaaagtttctccgtgtataccaaagagaagtaaaggtattaataggcagaataaattgcttcatgaatttgattttcttgggtactcattttccataatagacacccctctgaataaagatggtgagattaatagctgttatagaaaggtaattgtgaatttatctaagtctcgcctgaagaagattaaaaatagaatagctagatctttttactcttatcatatcaatggtgattttaaattacttttagatagaatttcttttttgacaagcaatagggatttaaatagaaaaataaaatcttcaagctctttggagaaaagtaagataagtactggcatctattacagtaattcgagattagatgctgactctatatccctaaaacaattagatgactttttgctgtattgtgtaaaaactaatactgggcgtttgaacagcattataaaaaaaccttttaatttgaagcaaaaaaaagaattgctaagaaatagttttagaaaaggctttttaaatagagtatacagaaagtataactttaagcgctatactgagattacaaaaatatggctataa

SEQ ID NO: 145349 - DNA, 2019 bp, Enterobacter cloacae
atggctataaagaaaaacattaaactcgataagaaagattatctcagggctttactatgtgatacacagccgggtgattgtccaattattttttcaaatgatgggctatatataaacttaaccgagcatgatagagtctgtaataactcatcaagttacactcctgtttcttctttcttaaaaaaaataattaaccctagtttagactcttctattggtgtcgaaaagcaagcccaagcaaagaaaaaacaaagctctccgtttggctattgcatagtgaaagatgcctttagccaaagacatctttctttagttcaccctagatctcaaattaattattcggaattttacaaaacttactcatccgttatcacactaaatacattgaaaagtaatttttcaattcgttatccccgtaaagtagctaactctttctttttgtatgagaattctgcatcagaaaaatacaaaggagaggatatcgaaaccacaaaagatgagttaatgaggaaatattcatcctcttattttacttatggtgggttcaacaggatatataaactatttcaaagtaaaatgtttattggtcttgagaagagattctcatttatgtggatgttggatgtatcgcattgttttgacagcatatatacacattctatttcttgggcgttaaaaaataaatcatttatcaaaaagcatgttgcacacagcaatcagtttggtcaagaattagatacgctaatgcagcgtagcaataataatgaaacaaatgggatacctattggttcagaatttagtagggtttttgcagaattaatatttcagagaattgattgtaatattgagtcatgccttctgagtgaacatggatgggttaataataaagattatgctatattgagatatgtagatgattttattgttttttgcaatagtgaatcaagtgccgaaattattacaaaaatcattaatgttaagttaaatgaatacaatcttcagttgaatgtaaataaacttaagaagtattctagaccattttgtactagcaagacaggtttgattatcaaagttaatgaattaattcgtaacctagagattaagttgtatgaaaaaaatgatggtgacttcacattaaataaaataagaagtaagcatgacttgaaaatatatgtaattaatcatgtcaagtctatatgcattgaaaataaagtatcttatgctgatgtttcttcatatataatatcttctctttctaaaagactaatatcaatgattgatatgttacaaacccaaaaaaatgaaggggatttagaagtaacaaaaagaattaaggacttgattttcacagtaaccgatataatgttattcttcttcaatgttaacccaactgtttcatcatcttataaattatcaaagacgatgtttgttgttaataactatttgaatgatatctctagtgactatagtagtatttttatgacttctatagtgaatactgctgaaaccattaattttggtgagaatgataatggtttatttattgatgatttcatttcaattgaaaaagttaatttgattttagctgctactttttttggggataattacctcgtgagtgccgatttttttcatgggattgtacataaaaagaaattagattactttactataatctccttgttattctattttagaaataggagatcattccaggaattgaaatgcataatagagaataaaataaaagagctattaagccataatattgatttactacaatcatcggaaaaagcgcatttatttttagatgttttgtcatgtccatttgtctcaatagagacaagacgatttttatatagaaagtatcttaaaaactttgagccaacacttaacagaagtcaccaggaaattgagaatgatttgcagtcacttctccaaacatattggtttgtcaagtgggatgagttagatattgtgaaaatgatcgagaaaaaagaattgaaagaaagctattaa

SEQ ID NO: 145350 - DNA, 477 bp, Enterobacter cloacae
atgaaacagctttcctttttacccggcgagatgacgccacacgaccggcgtctcatccagcgggcgctcagggcgctggaccggcacctgcatgagcccggcgtggccttcacctccacccatgctgtccgtgaatggctgcgactgcatatggccgcacttgagcgggaagcgttccgggtgctgtatctggacaaccagaatcagttgattgcccatgaaacgctcttcaccggcacgattaaccgcactgaagtccatccccgggaagtggtcaaacgtgctctgcatttcaacgcggcggcggtgatactggcgcataaccatccttccggtgagacaacacccagccaggctgacaaagccctcacgcagcgactggtgcaggtgcttcagctggtggatatccgcgtccctgaccacctgattgttggcggcaggcaaatctattcgttcgcagaacacggtctgttgtga

SEQ ID NO: 145351 - DNA, 327 bp, Enterobacter cloacae; identical to SEQ ID NO: 141624

SEQ ID NO: 145352 - DNA, 1557 bp, Enterobacter cloacae
atgacgccgttacgcgtttttcgtaaaacaacacctttggttaacgccattcgcctgagcctgctgccgctggccggtctctcgttttccgcttttgctgcacaggttgatatcgcaccgggatcgctcgacaaagcgctcaatcagtatgccgcacacagcggaattaccctctcggttgacgccagcctgacgcgcggcaagcagagcaacggcctgcacggagattacgacgtcgagagcggcctgcaacaactgctggacggcagcggactgcaggtaaaaccgctgagaaataacagctggacgctggagaccgcgcccgcgccaaaagaagatgccctgaccgtggtcggcgactggctgggcgatgcgcgtgaaaacgacgtatttgaacatgctggcgcgcgtgacgtgatccgccgtgaggatttcgccaaaaccggcgcaaccaccatgcgtgaggtgcttaaccgcatccctggcgtcagcgcgccggaaaacaacggcaccggcagccacgacctggcgatgaactttggcatccggggcctgaacccacgcctcgccagccgctcgaccgtcctgatggacggcatccccgtcccctttgccccttacggtcagccgcagctttcactggctcccgtttcgctcggcaacatggatgccattgacgtggtgcgcggtggtggtgcggtgcgttacggaccgcagagcgtgggcggcgtggtgaactttgttacccgcgccattccgcaggactttggtatcgaggcgggggtggaaggtcagctcagcccaacctcttcacaaaacaacccgaaagagacgcacaacctgatggtgggcggcacagcggacaacggttttggcaccgcgctgctctactccggcacgcgcggcagtgactggcgcgagcacagcgccacccgcatcgacgacctgatgctgaaaagcaaatatgcgccgaatgaggtgcacaccttcaacagcctgctgcaatattacgatggtgaagccgacatgcccggcggcctgtcccgcgcggattacgacgccgatcgctggcaatccacccgcccgtatgaccgcttctggggccgtcgcaagctggcgagcctgggctaccagttccagccggacagccagcataaattcaacattcaggggttctacacccaaaccctgcgcagcggctacctggagcaaggcaaacgcatcaccctctcgccgcgtatctactgggtgcgcggtattgagccacgctacagccagagctttatgatcggcccttccgcgcacgaagtgggcgtgggctatcgctatgtgaatgaatcaacgcatgaaatgcgttactacaccgccaccagcagcggcagttgccgtccggctcaagcccttacgaccgcgacacgcgttccggcaccgaggcgcacgcctggtatctggatgacaaaatcgacatcggcaactggaccatcacgccgggtatgcgtttcgaacatatcgagtcataccagaacaacgccatcaaaggcacgcacgaagaggtga

SEQ ID NO: 145353 - DNA, 243 bp, Enterobacter cloacae; identical to SEQ ID NO: 144700

SEQ ID NO: 145354 - DNA, 276 bp, Enterobacter cloacae
atgattaaaagttttaaatccaagaagctaaagcagttcagtaaaggcgatacaagtaaggtagcacaagcgcataaaaagaaaatagagattatcttaaacgcgttagatacagctacttccattcttgatctcgaccttcctggtttagatcttcactcgtatgctgagttcactccagttcgctggtcactgaaggtgtcagcaaactatcgtattttctttgagtgggatggggcaaatgttaataatgtggattacgatgacccacattaa

SEQ ID NO: 145355 - DNA, 342 bp, Enterobacter cloacae
atgtttacattgcaaaaacctatgcaccccggcgagttcatccgcgaagtatatttagaacctttagagattcagataagcacttttgcagagaagatcggggttgatacatcaacaatcagtcggttggttaaccaaaaagcagacctgtcctacgagatggctattcgcctatcaaaagctttcggtcgttccgccgagtcatggatgaaaatgcagatagcgtacggcttataccgcgctcaggataaagtaaaccttgacgaagttgaaaccatttacactccgcggaacctagatgccgctgaaatgcaagatcatgaaccttatataaatctgtaa

SEQ ID NO: 145356 - DNA, 600 bp, Enterobacter cloacae
atgaatttacactttacaatctttcctaaaagaacacaaaaagaaccctatttccttcgcgaatccacagtaaaacttaaccgggtgggcaataaccgagtaaaatcgcaattcatttttaagccttctttcaaccatatagccctcattctgggactcgataaaagtgaagtagaccgggtcagaaaaataaaacaacggcttcctgatcataaattgataggtattgctcgctggagcattgcacctattgaaagcagccaatctgctttatgttatcttttcgtctgtgaagacaatgtagcgtacctatctgcacctgagatggtttttactaatgacaccatatccatagactcaacgaccagacgttccgtctacaaaacaacttacaatttgacaagccccaatacgaaatatgcgtatataaaccttcgatttcattctgaatacaaattggttacaaaaagacgtggtccgtcaaaaattaaaatattatccgaaggtgaaccgtcttctgactatgcttctttattggctgagaatgaagccttacgcaaggaagtagagcagttaaaaaaacaaaataatgccgaataa

SEQ ID NO: 145357 - DNA, 381 bp, Enterobacter cloacae
atggcaattacctatcttggaatggatctcgctcctgctaacaaccagcttgcggtctatctgaagtttataattgatgaggcgataacatattcctatacggtactgggaagatcgactagcacgacaagtttagactttacgtattcttcaaatgacattgtctctttaccagagataaaaattccggttattggactgtatgcaaactaccttaaccaggtgcaggttgtctttaaaaaccttagcggagtggaagtttttaatcaaaccatccaggtaagcacacaggaacaactctaccgcgatgggacaattttccatatcgatattgagcaaacggatccctctaaggaaggtgcgaacaagttcctgatatga

SEQ ID NO: 145358 - DNA, 384 bp, Enterobacter cloacae
atgatggaagctgataaaaagcttatccattactggcaggatattttaagcaggaaaaacaataatatccgcgtgctattgttgaatacgcctgatgaatatcctttcagggatattgaaagctggccgcatatcaatggcgtgttctacgtcacggaagaagaagaccgggtggtagaggggctgcaaggtatattacgcggagaatgttatttttcgcaaaagcttgccagctatctcatcacgcactccggaaattatcgctataacagctcagagtcagccctgctcacgcaccgtgagaaagagatcctgaacaagttacgcattggtgcttcaaatattgaaatcgcccgttcgttatttatcagcgaaaataggtaa

SEQ ID NO: 145359 - DNA, 792 bp, Enterobacter cloacae
gtggaattcaaagacagtggcatcatcaaggaagcctatggctcgcatattaaaactggttctgtttcagacgaagcttttccatcatcggaggaagaacgacgaaagttactgatgacaccaaaatattacggcgtcggatatattggtaatggatgtcattcaactattgaaaacacccgaacacaccaaagaacgagagcattcatactctggcataacatgctggcaaggtgctacatgacaaccaaagggaagcagtattttaaaggctacaaaggtgtcactgtatgcgagcgatggcataactttcagaacttctgcaatgaccttccaaaattgcatggctacaacaaatggaaggataatccgggagagtatgagctcgataaggattactcacatcgccggatttattctgctgacacggtggcatttatcagcacagaagaaaatgccagggaagctggattacgacgcgttgccatgaagattccttccgggcattatcatgaaataaataaaattcgagatgagatattaatggaggctgaagatgaattaaaaaacaatcaaattaattatgaagttgttcttgacgggaatatgaaagtaatcctgtgtgaaactccttatggcacagtgttgttctggcctctcacgaaaaagattcagcgtaattgctacatgattgatggtgatgtacaggtttatgttcattacctgcgctggctcatacttcagtgggaaaacagaaatcccgacataaactgtgttgctacaacctgttga

SEQ ID NO: 145360 - DNA, 372 bp, Enterobacter cloacae
ttgcacagcctcatcgatctgaacgtgacgtttattgataccgcaaatttatatggccgtggtcataatgaaagactaatcggtcattttcttgccgggctggataaaagcactcgcgagcagttcaaaatagccacgaaatgcggcatcgatcgctctcctgacgagtcttacgcccgcaccatcaacaatacgcctgactatatcatccgctgctgtaatgagtccctcaaacggcttggcgtggagcgaatcgacctcttttatctacacagactgagtaacgccaccccggtcgaagagagtatggattgtctgcgcgccctggttaaagagggcaagattggtgatgctgccaacttactgatttag

SEQ ID NO: 145361 - DNA, 573 bp, Enterobacter cloacae
atgattattgtgggtattttcccaggaataatcctgataaatgaaaagaaaaataaaaatttattgcaaataatcatttatacactaatcattattcccgtcagcatgcttgtcctgacaatgattttccgccccacccccaatatgatcattaacatgaccatgaacctttccggcataagcgattggcgcacacatcaatattacatagatactcacactcacccaccagcgatgtttgatggtttaacatggaacacacgttattataaagatatcccttcgagattctttatcaccggcgtaaacattttctcgcttggaaacattcagcttatttgccctacgcaaatcaatcatgccagatcgctgagcctgaaaactacgccagacaactttgacgaatatgaccttcgcataaaacgattaaaaaacaccgctatgaaatgtatcccgtttaagaaggatgagatacaccaatgggattctcctatagctgagcctgtttattttcagaaaattaaatctaccgatgaaagccttttattaaagttgcttcatgatatcaagtaa

SEQ ID NO: 145362 - DNA, 918 bp, Enterobacter cloacae
atggtgaacaatatgaccgacttaaccgcgcaagaagccgcctggcagacccgggatcatctggatgacccagtcattggcgaactgcgcaaccgttttgggccggatgcctttactgttcaggctacccgcaccggggtacccgttgtttgggtgaagcgtgagcaattgctggaagttgtcgatttcctcaagaaattgccaaaaccgtacgtcatgctgtttgacttacacggcatggatgaacgtctgcgtacccaccgccagggtctccctgctgcggatttttccgttttctaccacctgatctcaatagaccgtaatacggatatcatgctcaaggtggcattgtctgaaaacgacatgcatctgccgacaatcaccaaacttttcccgaacgcgaactggtatgagcgtgaaacctgggaaatgttcggcatgaccttcgacggccacccgcatctgacgcgcatcatgatgccgcagacctggaccggccacccgctgcgtaaagactacccggcacgtgcaaccgaattcgatccgtttgagctgaccaaagccaaacaggatctggaaatggaagcgctgaccttcaaaccggaagactggggcatgaagcgcggtaccgacaacgaggacttcatgttcctcaacctcggtccaaaccacccgtctgcgcacggtgcattccgtattattcttcagcttgatggcgaagagattgtcgcgactgcgttccggacatcggctaccaccaccgtggtgctgagaagatgggcgagcgtcagtcctggcacagctacattccgtataccgaccgtatcgagtacctcggcggctgcgtcaacgaaatgccatacgtgctggccgttgagaaactggcgggtatcgttacgccggatcgcgttaacgtga

SEQ ID NO: 145363 - DNA, 1983 bp, Enterobacter cloacae
atgtccagctactgcttttactcccaagatgcattagcccttgcacaaagctctggggtcgatgtgcttatcaatgattatgctgagcagcataaaaaacaaacctacattctttgcagaccattgtctaatgaggacgtcaattatgactacgatcaggcaatagcggtattttcctctggtataaaacccttctttattaatattggtaatgattctgagctctttgaagagtatcaggaagattttctggaagatgtttcttttctggctgaaaagtttaaatacagagaaaaaattggaagaaaaaaatcatggcagagtctattcgactcacttcctgtggatgatctggacttcagtaaattagaagttgaaactaaggaaagcagggtcattgacctgataatctcattaattgtaggaagtattaatgacacttcaagaataaatcttgaggcaagtaatctgttagatactataaaatctaaaattattctatttgatacagatcaaaccaaatttgttttccaaagcgggtttggcaaaaagagtgttattcaggggctagcaggctcaggaaaaactgagttactgctgcacaaattaaaagaaatctattctaaaaactctgaatctaaaattgctttcacatgttttaataaaattctggcttccacaatgagaactagaatacctgagtttttcgattttatgcgagttgagaaacagattgaatgggggacaaagcttttttgcttcaactcttggggtttgaccaaagatcctttctctggaatgtacagatatatatgccatttttacgaaataccattcggtggttttgggtacggtgactttgattcattatgtaagaaagccatcaatgacataaataatagcgggcgatcagataaaaaggcgcttgattatgtatttatagacgaaagccaggacttcccacaaagcttcattgatctttgtgaaatggttacatctaaaaagctatacgttgcaggagatgttttccaaaatattttcatgccaataaatgataatgtaaatcgagccgatatcgttcttaaaaaatgctatcgtacagatcccaagaacttgatgttttcccatgcattagggatggggctttatgaagaacctgttttaagatggttaaaagaggctgaatgggattcctgtggatacaaatatcataaagtagataatagagtagagttatccagagatcctcttagacgttttgaggatattccaaaggattataaaagcacaactcttcatctattagaagggacagataatggaccggaaaaaataattgaaataataaaagatataaagtctaggaatccctctttagaagaaggggatattgctgttatatttcttgactcaggtggttatatttatgattacattcagactttaaaaataaaggttaagcagcaacttggctgggattcgaatatctcacatgaaacaaaatctaaacaagatggcaagctatttatttcgaatataaataatgcgaaaggtttagagtttccttttgtaatttgcttcgctatgaagttggtgaagaaatccaatttccgaaatgcgctgtatacaatgatggctcgatctttccttgagagtcacttggttttgaataatgacaaagaaaatccatcgatgcctactattcttcagggcttagacttcctgaataataacaattacatgaatgtaaggctgccatctgatcaagaaataataaatcaaaaagacttcattgttttggatgaatctatctcaatatctaaattggttaagagttattgctcagataaaaagtcgactccactgttaattgcaaaaataattgataaagtcgaaaggtatatttcagaagaggatgatgttgatggggagtatataaaaagtctgattgaaatagaatatcaaaggaataaaaaaagatga

SEQ ID NO: 145364 - DNA, 639 bp, Enterobacter cloacae
atgagccagtatttattcaaagatatacccggagaatattttgagaagttccgcccagtgagagatgcgttttcaaatttagaaaaccttcttgtgacagcggaaatagtgaattcttgccatagttctcggaataaggaaacaggtgattttgatttattgataactactggcacacataagagaatacttatacgaaagcctgacggtttttttacaatgaatcttccttttcaggttattgaatttgaagaaaatattatttttaactatgatgcttatggcttaacagtcaatgctgagttcatttcaagatgcagaaatgtgatcacaacatgtgaaaatggttttttttctcatgaagcaattgctgtagacctgtgcgataattttgatagggatatgcagcaagctatcaattattctgatgcaatatcggcattgcttttattagatcatgggtatttcagatttgatgatgatccaataaatgtgaacggtagagtacatcccagatatcactttgatttcttttgtaataactcaaccaatgttaagattggttctaatatccggatagcggattcatttttcctagatttatttgatgctagtaaagatcgtccttatttggcttga

SEQ ID NO: 145365 - DNA, 420 bp, Enterobacter cloacae
atgaaaattgaatatattgatatccagaactacagaaagcttaaaacttgcagaattcgtctgactgacgaagaaacactgctcgttggggcaaataacagcggcaagacgtcagcaatggatgcgcttattttctttctggatcaacgaggaagaacggctgcgagcatcgcatcgggtaaatctccatcttcacgaaaattaggcgcagccgatttcaccctatcaaattggcatcagcttaatcaatttggtcaagcatgggcgaacgccgaagaggttggcgaaaaaatcagtgactggcagcccttatgcccaacgctggatgtctggttaaaagtcgagaaaaatgaagtccatcgggtacggcacctaataccgatgacctgctccccgttgattagtacaccccgatgttag

SEQ ID NO: 145366 - DNA, 207 bp, Enterobacter cloacae
atgtatcaaggtgaaaaaattggagtggggatcgtcacttataatcgtaaagacggtttgcttaaattattaaactctcttccgcgccaatgtattgatgaactggtcattattaatgatggacaacattttcctgagtattccggtctggattgccactatatattgaatgaagagaatcttggtgacctgctccccgttgattag

SEQ ID NO: 145367 - DNA, 1032 bp, Enterobacter cloacae; identical to SEQ ID NO: 132894

SEQ ID NO: 145368 - DNA, 219 bp, Enterobacter cloacae
atgaataatgaaatggttactttgaataaagaagaaactagcagaacaattctcgactggtcacatgatttgcgttgctgctcatgttcattatggcttcttcttgagaatatgacgagtattgaagaagaacgagagcacgcacttattactctagtagttcaaacactagataaattgaataaaagtgtctctgacttcgacacatataaactttaa

SEQ ID NO: 145369 - DNA, 216 bp, Enterobacter cloacae
atgaatactgaaacacttaaatcagaaaacggtacgattcatcaattagctatggatattgatcgcgtcattaacgcgcttgaatatgctgagtcagatcctgaggtagcatacaaacccgcagcactcattaaaatctgtatcaatcagctcaaaaaaaatctatcagttttaaataacgatcttgggcacgattggccggagaataagtcatga

SEQ ID NO: 145370 - DNA, 213 bp, Enterobacter cloacae
atgaacaatcttagaaaattaagactatcgcttcaccttacccagcgtggtctggctgaggaaattggtcagactattagttctattggccattacgaatcaggaaggcgaactcctgatattaaaacatgccatcagttggtagaagtattgagaaaaaacggtaagaacttatctatcgaggatattttccccccatcctcaggagtgtga

SEQ ID NO: 145371 - DNA, 882 bp, Enterobacter cloacae
atgctgagtatcaaacaacgtgaagaaatggaagctctggtggcgaaacgtgaagggcttagtgaagaactggctttcgctgtagagcataaaaaaccgtggcaatggggaagctgggagtcaggcgaagtcagcacctccacctgcgagaagcatggcgattttgagcgtattaccctcattggaaaagcgtatcgtggcgttgaaaatgttaagcactcccagtgcccggagtgtgtgaaagcggaacttgctgacattgaagccagtctgcgtgcattacgagtagccgaactgatggacaatgccgggatcgcaagacgattcgaagcgtgtgaattcgataactaccaggctatcaacccggatgccgccaaaaatctcgcagcctgtcagcgctacaccgctagttggcctgatcgcctgaaagctggaactgggctcgtcatgaccggcaactgcgggaccggtaaaaaccatctggcggtatcgatggttaaaaatatcgtccgtaatcatctggcaagtgtcgaagtaacggatgttatgcgccttacccgtgctgtgaaaagtacatggcgccacaatgctgagactaccgaggaagaggttattgagcggttcgcctctttggacttgcttatcatcgatgaggtgggcgtgcaatttggtagcccggctgaaatgactattctgcaggaggtaatcaacgcccgctatgagagcgttctaccgactatcctgatcagcaatctgaccttcgagcaactcaaagagtccattggtgagcgtatcgtggatcgtgttaccgatggtgggcgtaaccgcctggcgtttggctgggaaagctaccgcgcaattgctgcaggggtgacggcatga

SEQ ID NO: 145372 - DNA, 1359 bp, Enterobacter cloacae
atgacaactcctgtatggaaaaatgatgatctggaaggtgcggtaattggcgcaatttttctgcgcaataccgatcctgaggttctgggcattctttcccgtatgccggcgagcgtattctccgtccgtcagtaccgtgaaatttattctggcatttgtcgtcaggctcgaggaaccggagtgatagatccactgttgctttgtgagtccatgccagaacacagcgcaacgatactcgaatcaagccgtatcgcctgggctaaatcagcgctgacgtattacgtctccacgctggaacgtaacgctgccgttcgtgacgctgaggctgtaatcgagacagcgctggctggcattcgcaatgctgccaatggtgataacgcagtcgaagcgttgaaggccgcacagggggctatggctgcaatttctctcactcctgataccgttcaacctgtgcatattgatgaaattttacctgcggtaattgaccgggtagacgcaagaaatcaggggctggaagaggccaaacctctgatgaccggtattgaagaattggacgcaaaaaccggtggcattgaaccgacagatctggtcttcatcgccgcccgtccgtcgatggggaaaaccgagtttgccctggacattatcgataaagtatcagagcaggggcatggcgtactgtttttcagcatggagatggccaacatccagattggcgagcgaatggtatctgctgctggtggcatgtcagtgtccaggctcaaagaggccgcgaagtttgaagatgaagactgggcaagattatctacaggtatcgggcatcttaccgggcgcaatatctggatggttgatgccacagatctgacgcttgaacagatccagcaaacggcaaccagtcatcagattgctcatcctgaaaccgcgctggtagttatcgattatctgttactcattaagatccagagtacggcacgctatgacctcgcggtgggtgagttgtcgaagggattaaagcgcctcgccaaaacaaaccgcactcccgtcttggcgctgagccagctttcgagaggcgtggaatcccgacctaacaaacgtcctatgaactcagacctgaagaactccggcgaaattgaggcagatgctgacatcatcatgatgctctatcgcgatgaagtgtataaccccgaatcacaggcaaaagggatcgcggaaattaacatcaccaaacagcgtaacggcgttcttgggaccgtataccgccgtttctacaatgggcattttttgccgattgaccaggaagaagcgaaatcaaaatcagccccgcagcaaaaatcacaaccgcgtcggtatgcaaaagcttaa

SEQ ID NO: 145373 - DNA, 312 bp, Enterobacter cloacae
atggatcgtctaattcacgaaatgtcttatttattcacccaaaagcgcttcatggaactccaggatgctgcacgagacatagatatcagtcatagcgactatcccgaatgctttggccttattgctgatgcaatcgatgagtttcttgaagataagcctgaggatgaatggcttgagcgggaaaaaatatttatgcactacgttgcaatgcgttcgatatcgctatgggggaaaggccataaagttaccgatattcagtgggcgcatcctggctggtttggcactgccgagaagggaggcactatccaatga

SEQ ID NO: 145374 - DNA, 996 bp, Enterobacter cloacae
gtggaaccagaagatctccggagcatccacgccatcaatacgcgccagcgggtcgtagctatcctgatcgctgtagacgtaggtcagcggcacatccccgtgcacctcctgcagcaggcggaacccttcccagacaaatcgggttgtgaccggcttgccggttggctgtccgcccagcatctggcgtcgcgttttactgatgcgtcgcccgagcggatcgtagcggaagctgacctgcgtctgcggcttgttgcgatcccgcggctggctgatgacttccgtcaggcgatgttcgccgtcgtagcggtagtgccagcgcgtctggccgttatccttctccacggtgcggccgtggatatcataccgccagcgaatgccgttcagctgcgtcaggcggttgtgcgtgaccttctcagcagatccttcgagcgggttaccggcagcgtcccagcgccactgctcctggccgggcagcgtgccgtcctgaacgagcaggcgcccggcgctgtcgtactgccagcggtaccagctgaacgggttatcgtcccgctcttccctcaccaggttattgtggtagtcgtaatcccagcggcgggaccagcggcgcggcgacgggcgctgggcattgccggtaaagacatcacggcgatgcagtcggccaagacgatcgtattcgctgcgggtggtcagcagcccctgggtgcggctggtctcccggtggagttcgtcgcgggtaaaatcggagaccgacagcttatccagagcaatgctgagcagatgcccgctgccgtagtaaaactgcttcagctcacggccatcgggcagcgtaatagaggtccggttgcccagcgcgtcatactcccacgccagctcgccgagctcgcccgcttcgcgcgtcacgcgaccgagcgcgtcatactcaaaggcgagctcctgctctgcctcggtggtccacgcgtcggctgcaagcgcaggatgcagcccaatccggcttaa

SEQ ID NO: 145375 - DNA, 657 bp, Enterobacter cloacae
atgcttcaccggcaggccacgttcgttccatttgagcgattccgtccagccttcaggacgatcgagctgtaccggacgccctgcggcgtcgtagcgatatcgcgtctcttccccgtcggcgccggtctcggccaccagccagcccagcggatggtagcggtagcgggtaatacgaccggcacagtccgtcgaacgaacgatctgcccggcctcgttgtactcctggtagcggctgtttccggcggcatcgacctcttcaacgacctggccgaacgcgttccggcgcagctgcgtggtctgccccagcggatccaccacgcgcttcagcccgtgatgttcgtcgtaccagaaccgggtggcgctgccgtcggcttcgattatggccgcaggaagcgcgcggtgctccagccaggtggtagtgcgggtattgccgtcggcgtcgatctcctgaacccggttgcccatgtcgtcgtagacgaaggtaacggcattgccgagcggatcgatgcgacgcgtcagaagctcgttctcgtcccactcgtagcgccagttttcaccgcgctcgtcaacgtagcggacaatcaggttttgcgcgttccagtagtggcggcgcgtctggccgtcgtagtgctcaacggtcgtcagaccggcggctaa

SEQ ID NO: 145376 - DNA, 1056 bp, Enterobacter cloacae
atgcaattacagtcaggtcagaatatccctctaacttcatcctctatcacgctcaacctgcgatatccggtgcgaccggcttttcgcggcgaacccgatacctgcgttttcatgctcaacgcacagggaaaggtgagtggtgataacgatttcatcttttttaataatctgagttcaccggatggcgccgttaaactgactcctgggacacagcaatcaagcgtgcatattgaacttaaccgtgtattaccggctgttcagaaaattgccttaactctcgtcatcgatggcagcgataccattaccggcctgcagcagctgagcctgcaggcacccggcatcgcatcattcgatcccgagacggcagggcgcagcgagaaagccatcatcgtggcggaggtctatcgtcataacggcaactggaagctccgggcgcttggccaaggtttcaatggcgggcttgagccgctggccatcagctacggtgttgacgtgtcatctccagctccgacaccggctcctcaaccttcaacagctccgacgataagtcttgagaaaaagctggagaaacaagcgccacgcctggtcagccttgcaaaaaaagcgaccgtcagcttgaccaagcacaagcttaatacgctgcaggcgagcgtagcgtttgtgctcgatgcctctggctcaatgaccggagagttttcaagagggcatgtgcagtctgtactggatcgcatcgctgttcttgccgttcagtttgatgatgacggtgaaatggatctttggggctttgctgaaaagcaccgaaaatatctgaatgtcacgctgagtaatctcgataattatgtcgaaaccattcaggggagtggcaaacgctcaaggtgggaattactgcctggcttgggtggtacgaacaacgagccaccagtgatggaggagattgttgattactaccgggacagtaagctacctgtctatatcgtattcatcacggacggcggcatcagtaaaacaaaagcgataaaagatgctattcgtcgtgacctgctccccgttgattag

SEQ ID NO: 145377 - DNA, 1170 bp, Enterobacter cloacae
atgaacctgacgccggggggcaatgcccccgtaccatcacaggagctccgggttcgaatcacctcaggtggtccggttgacgcctctgcgtttcgtctttatgcagacggaaaagtgcagggggatgcggatatggtcttctacggccagctgcgcaacgatgatggcactgtcagcctggtgagtgagggacagtattcaacatttactgtcgctcttaaccggctgaggaccgatgtccagaaaattgcctttaccgttacctgtgacggtgggcagaccgttgctggtcttcgcaatctgtctattgacgtagagcagggtgcaacccgtctggttagcggcgtcgtggatttaacgggccgtcaggaagctgcgctcattctgggtgaattctatcgtcgtaataacgagtggaaattccgcttcgttgctcagggtttcaatggcggactaaagccgctggcggaacactttggtgttgatatcgcagactcaccggctccggacactacaactgcgccgcctgccgttacgccaccagcaccagctccggcagctaataaagtaagcctgagcaaggtttccctgaccaaggagaaaccagcaatcagcctggccaaacgcgataactttggcgagatccgtatcaatcttaactggaatcgcgcaagcggcagctcaggactgaggggcatgtttggttccaaagggattgatctggatctgggtgcctttgtagagctggaagacggttacaaatcggtaatacaggcgctgggtaatgccttcggtgattatcatgacgaaccttatgttcagctgcagggcgatgatcgtactggcgacaatgcttcaggtgaatggctgcacatcaacggccgcgaatggaagcacgttcgtgaggtcctgatctatgccttcatttacgaaggtgcggccagctgggataaaacagatgggatcgtcaccatccatgttccggatcagccgcctattgaaacccggctgacagaaggcgataaccgtcgcaccttgtgtgcgattgcccgccttgtcaacgaaaatggcgccatcaaggtggagcgaatcaaccagtatttcaaaggccagtctgaaatggacaaagcctttaactggggctttcgctggagcgccggttctaaataa

SEQ ID NO: 145378 - DNA, 582 bp, Enterobacter cloacae
atggtttcattaagcaagaatcagacggtttcactcactaaacaatcttctgcactcagccagcttcagtttggtcttggctgggatccaattaagaaaaaagggctgctgggtgggttgtttggtggcagtggttccatcgatctagatgccggatgtgtcctcatggacagcgccggaaacaaaatcgacaccgtctggttccaacaactgaaatccaaatgtacggctgttgttcacagcggcgacaacctgacaggtgaaggcgatggtgatgatgaagtgatcaatgtcaatctgagcaaactgcctgcaaatgtcgagtacctggcctttaccgtgaacagcttccgtggtcagtcgttcaacgatgtcgataatgcattctgccgtgtagttgatcagaccaacaaagaactcgcccgttatcagctgaccgagcagggcgcccataccggcatcgttattgcgtccctgcgtcgtaataatggcaactgggacttcacggcccatggccacccatgccgcggtcgtaccattaccgatatgcactccgatatcgtttcaacggtagtccgctaa

SEQ ID NO: 145379 - DNA, 1059 bp, Enterobacter cloacae
atgaaaaacaaaatttggcttatggaaggactttcatcacagcgtgatattattcagggaatgaagtctttcgctaaatttaataacttcaatcttgttgtttatgcctctcatcgtcacgaacgtaatgaattgcttgccgttgctgactatgcgctaatcgaaccctctgacccggaaagccgccttgctttcattctcgacactatcgggaaacacgggattaatgctgttcatacgggacgaaatagtcagtggttcgaacagcatcgtgctgcaatcgaagcgtcgggcgctacgctcaccactggcgcgacggcttctgactggctgacgcttgccgacgataaagttactttcgctgactttatgcagcaatgtggactgccggtcgtcccttctgtacgcatcaactcgatttcggcgctgcaggaccatcttgctaatcctccttttgcggatactccgctatgtgtcaaacccgtcacgggtatttatggcatgggattctggcgtttcgatgacgaggcctcctccatggcggtattcaacaacccggaaaaccggatcgtgaaacccggccagtatattgcagcgctgagcgccgctaagacgtttaccccccttgttttgatgccgtatctgcctggacccgaatattctgtcgatattctggcgcacaagggtgaagtcctcgcagctgtgggacgtcgcaaagaaggtgcgcttcagtatctggtgaactgcggcgaagcatacgagctggcctgtaactgtgcccgggctatgaacgcggacggcctcaccaatgtgcagacgcgtaatgaccacaacggcaagccagtgctgcttgagacgaatatgcgtccgtcaggtgggattggatacacgttgcgcagcggcgtaaatctgccggggctgtttgccttccaccagctgggcctgatgtcgaaaaatgaagtgatggataacgcgatggtttccttcaagcctgcaacggtgcgatccattaccgatgtcatcgtctatccagccgacctcaccaaccgtattaattaa

SEQ ID NO: 145380 - DNA, 1143 bp, Enterobacter cloacae
atgtcactgttgaacgaagacactgtttatcgacgtgcattgtcatgcggcacgattcaggtcacacgcgcccggggcgagatgtcccttaacgatctttttgatattgctgagcgccataacccgaaacgtgcttttctctttgtcagcaaagtgctgggcagacatattccggttcctccttcgacaatgcgtcaggcataccagcgtctggcccgccagtttccggagtccgttcccggaccggtgctgtttatcgggatggccgagactgcggtaggtctcggggctggcgtgtttgatgaacttcgccaccattacgcggattccgtttacctgacctcaacgcgccatcctcaggacggtgaactgctgtgtgaatttaaggaagagcacagccatgcgacagatcatctgatctacctgcccgctgaggcggaaatgcgccgcagagtgaccgaagcgcgaaccctggttctgattgatgatgaagccacaaccggtaacaccttcatcaatctccttgcggcactgcgcaatactggccggttgccacagctggagcaggttgtggctgtcacactcaccgactggagtggtgatgcgctggaaacgcgttgtcctttgccggtgcgcacgctgtcattggtcagcggtgcatggcagtgggaacccatcccggacgcgcccgtcccggtaatgccagcggtgaatgtgacttcccggggtaacttccccatcaccggcaaacagtcctggggccgactggggatgacggcgcccgctaatgacctgggccgtaatatcaccatctcaccgggagaacgcgtgctggtgctgggcacaggtgaatttgtgtgggaaccgttcctgcttgctgagcgtctggccgaggccggtgcggatgcgttttacagttccactacccgatcaccgatagccacaggcttcgccattcagtcggctattgccttcacggataactatggtctgggcattcccaattttttatacaacgttgcgcaccagcggtttgatcgcgttctgctttgcaccgagacgccagcggccagcgtggacagtcacctgatgaagacgctggcaggagtagccgccagtgtggagattattagctatgaataa

SEQ ID NO: 145381 - DNA, 774 bp, Enterobacter cloacae
atgaataaacccgttgtcctgagtgaccttgatgacaccctcttccagacccgacgcaaaatggtggatgagctcgcgctggagccctttaaaaccggagcgctggacagaagtttagcgccacgcagcttcatgactgaagagcagtccatgctggtggactggttactggagcaggctgaacttattccggtgacggcccgcggcactgaagaaatcatccgcgtgcagatccccttccactcttgggcgattacaacccatggtgccgttatcctgaacccacagggtcagcctgacgaggactggaaagcgcacatgttgcagggcctggcgcagtacgaagagaggcttatctccatgcaacgtgcgatcacagagatgatggaagccaggggcattaacgcctgggcgcgactcaactatgaatatgacggcacacccgtctatctggtgatgaagcaccgcgacagcacacggcttgatgagctgtatgccattgcagacgagattgaagcggtattcccggtcgcggacttctatatccaccgtaacagcaacaatgttgcctggcttcctcatcccgtggaaaaaggtctggccgttacctggttgctgaacaaattacgtgccgagcgaggtgtattcccggtgattgggctcggtgacagtcttagcgatcaccgctttatgaagctctgcagctggtacgggatcccgcgtcaaagccagttcgctgaagccgtctcaatgaaaatttttggagaactgtaa

SEQ ID NO: 145382 - DNA, 1080 bp, Enterobacter cloacae
atgcagccactcattcctttttcgggctcttacgacgccagtgatgtccagttcctgctcaaacccattgaaatggaaatgacgccggttgaccaaaaagaggcgctgatccagtccggcaaaaagcattattcagacatgctgagccaggagcctgcccctacctcttggcatctggatctattctcacgcgcactggatcgtggcgcggcccgactggcacacgaagtaacacaacttgcccgcgaactggccaaccgctttggtgatgaacccattattctggcaagtctcgtccgggccggtgtgcctctgggcgtgatgctgcatcagacgctgcgggacatggggaaaacatccttccactacgggatcagcatcattcgtgatcgcggcatcgataccgctgccctggatatcattgaatcccgtcatggcacacatggcattgtgttcgttgatggctggaccggtaaaggcgcgatcacgggtcaactggttcgctccctggaaggacgcagcggttatccggaacacccccgccttgtggtgctcgctgacccgtgtggctgctcctggctggcggcaagcgatgatgactggctgatcccgttcgggattatgggggcgccggtatcaggccttatttcacgctctgtatggactactgaagggttacacggctgcgtcgtgtgcgaacatctgaatgagtacgaatgcagccgcttgctggtcgggacggttgccgattatcgcgaaaaactcgatcccgcggctgtacccgggctcgactggaatatggcagcgaataccggtctgtggcagaagagtcgtgatgtgatcgccctccttgctgacaggtatgcggtcgacagcatcaaccggattaaaccgggtatcgctgaagcaacccgcgccgtattacgccgggtacccgatcatgtgtttgtacgctcagtcagcgatccggatgtcgagttactggtaggcctggcccgcgataaagggatcatcgttaccgaaatgggtgacgcacttggccagtaccgggccgtgaccattattaaaaaggtgctctga

SEQ ID NO: 145383 - DNA, 957 bp, Enterobacter cloacae
atgaaaaatcgcctctcgccctggaatcttggcgccacgctgtacatgcccgcaacccgttacgatattgagggagctatcctggacggcaagatcccgggacttcgctcgctggtcatttgtctggaggatgcggtcagtgaaacagatatcccccgggcgctggaaaatctgagacagctgctgcagcgcctcagccaggaaaaattacgtgccggtaaccaggactggccgctggtgtttattcgcccgcgacatacggaaatggggcaatggctggttcagaatgtcgacctgagcgccgttgacggttttgtactgccaaaattcactctggcctcgttgccggaatggtgggcggcaatggcagacacgcacctttgtcttatgccgacccttgaaaccgacgacgtgtttgatgtcctccggatgcgtgaacttgcggaaaagctactttctcatccatgccttgatcggctcattgccctgcgtatcggcggaaatgacctgatgaatgtggtctcgctgagacggccgcggaatctgacactttacgacgggcctatgggctacgtgattaaaatgctggtgtcagtattcggtccgcgtgattttgcgctgacggcgccagtttgtgagcatattgacgatcatgacattatggcgcgggagctggcgcttgatatggcgcatgggctggtgggtaaaacggccatccaccctgctcagattgatgttatcgaaaacgcactgaaggtatcagcaggcgaacattcggatgcgctccggatcctcaactccactcaggctgtattcaaatcgcagggcgcgatgtgcgaaccggcaacgcatcgccgctgggcagcgagcatactggaacgagcccggatatatggcatgatcccggaacaaagcgcagagggtatcagactgatgccactgtcacagaaaaactga

SEQ ID NO: 145384 - DNA, 1224 bp, Enterobacter cloacae
atgggatttcgatttcgtaaaacgatcaacatcattcccggcgtacggctgaacttaagtaacggcgcaccgagtctcagcgtaggaccgcggggggcgtctgtatccattggtagccggggcacttatgccaacctgggtttgccgggtaccggcctgagttatcgcaccagactggatagctcagcccgctcacgtactgcccgtagcgcacaacccgatccttctattcggctggagctcgaaaaggaagtgggcgcactgatgtctgttgtgagcagtattgccaatatccatgagctgacgccggatccccgccagggtatcagctggtccgaactggaaacagaatatctggccagtcgtcagaaaccctggctggtaccggcgccggtacgtccggcgaaacctgagttgatgcccttaccagagcaaccggatgagagcactagtgtaggattttttgggaaatggtttgaatccgatgcggcccgtgcagagcgtcttgaggagctcaggaatcaatggcagcagacgctggctgatacggaacgagaaaatacgctccgccagcatcgctatcagcagcagcgcaccgcctgggctgaacagtatgccaattggcaattcgaggctaaggagcatgaaagcaggctgatcgcatcgcaggctgaagcccgtgaccagtttcgcagggacagtgctttctttgagtcccgactgggtgaggtactggcgcaaactgagtggccacgggaaactctggtgacgttcgaagtcaaacctgaacagtccacggtctggctcgatgtcgatctgcctgagatagaagacatgcctgataaaacttacggtgtgaatgcccgcggtacagaaatcaccgaaaaggccatgacgcaaaaagcacagcgagaaaattacgcacgccatgttcatgggtgcctgttgcgcctggccggtattgccctgcatacactaccctttgactacgtggtggtttcaggttttacccagcgcatcagtaaacggaccgggtatcttgaagacgaatacatcctgtcatgcaaatttagcagagcacagatggcgtcgattaattttgccgggatagaacatgtggatccggtggaagcgcttggagactatccggttatcagaaagatgagcacgacatttatctttcaggcaattgaaccacttttttttgacgcaggctttaactaa

SEQ ID NO: 145385 - DNA, 489 bp, Enterobacter cloacae
atgcaactcaatacgcgacaggtccgcattttcactctggctaatttactgggcaccgggaaaccggttcctgccgccgatatcatcaccagcctggaatgttcagagccaaccctgacacgggcccttaaagcactcagggaagactattcagcagaaataaagtacagcaaggccagtcactcttaccagatgatcacgccgggtaaccttgataaaaaaacgctgcgacggatgagtgatgatctggcaaagaatgccgaactgaaaagcacagagtcaggtggccgcgtcattctggataaagataaaaaaacagcggtctctttatcgctgcgtatgaaaatactgcggaagatagacaggcttgcggatatggaaggtctctcaagaagcgaggccgtggaaaaaataacggaacgtgtgattgacgagcttttaaaggaaagccgtgaaaatgagaagattcggaaaaatgaatccccttaa

SEQ ID NO: 145386 - DNA, 405 bp, Enterobacter cloacae
atgtctgaagaactgaaaacacttaataacacccgttcactgcgagctcaggcgcgtgagttgcctctcgaaactctggaagacattctggagaagtttaatgtcatcgtttcggaacgtcgtgatgaagaagaagcaaaacgtaacgagatttcggaacgtacagagaagctgaataagttgcgccagttgatgctggatgatggtattgacccgtcagagttgcttgaattctccaccggccagacaaaacctaaaaaagagcgtgcagcacgaccggccaaataccagtacaccgatgaaaacggtgaaactaaaacatggactggccagggccgtacacctaaagtttttgctgaacacattgccaacggcggcaatgttgatgacttcttgattaaataa

SEQ ID NO: 145387 - DNA, 375 bp, Enterobacter cloacae
atgaggtactggttgctcgttatcttactgaacggattgttctacttaatcgttaagcatgctgcgccagaatggcatggtacgcatggttattatgccggactgatcatctgcacactcatagcggcgattattacatggcgtgatcagccaggctggctcgataaaatcctgctcggcgtaatgaaatacggcgttctgagtgccgggattatcttctttgcctggggtgtcgggtacaagctggcattctgggggcagggtaattctgaggccgtatttgtaagtgccggggacgtgattttgcccaatcttgcgctggtcacgggcgtagtgatcgcggcatggggatacgtgagatatttcaggcgttaa

SEQ ID NO: 145388 - DNA, 348 bp, Enterobacter cloacae
atgagcgattttccttttgactgtacgactgatcctgtagagaccgaggtatcccaggctcttgcgggttataaaatggcgctgatcaacgcgcattaccgtaatttctggcaccggtttttatgcaaacttaaggatgaagaggctctgaaaaatgagcgtatactcgtgattcaggagaaactgtgtcgggttgttgtcaataaaagtcctgaacacatccaggcgttaaaaagaatcagtgatgaacagtccgacgcagccagattacaggataaattcagcaatctgattgatacatcatgccagtctgcgaagtcgggtatcgaccacgtgaagaggcgttga

SEQ ID NO: 145389 - DNA, 384 bp, Enterobacter cloacae
atgacgccgatgatgcatgagcgggtgcgcaacatgttcggcgacgccgggctaacggctggcttcacggtgcagcagctgatgtacgacgaccctggcgacctgtcgaaggcgatcatggtcttcaggccaaacggcgggtcgaatatccgcaccgatcttggctctgagtaccacgtcctggtcgacgttgtcggcgcgaaagacaagcgcaaagacgcgctcaatgccgttcagcgcatcgtcgattacgtccaggccaaccccatggctgacgagtgtgtcggctacatccagaacatgggcgcaatccccgcgccggtgctcacagaagaagggcgaatagtcttccgactccagttcgcctgcacttacggcgaatag

SEQ ID NO: 145390 - DNA, 357 bp, Enterobacter cloacae
atgtcgtctactgcttcatggtcatacaacaagccatgcacgatatggcgcaagggggcaggcggcaaggatgagtggggcgaccccatcgcggcctacgagcaaccagaaatcgtcatgtgcgactacatcggcggcctgtccgctaagctcggctcgctcggcaaagaggttgtcgtaaaaaacaccttcttcactgcctatgcgctggctgacgaaggcgattacatccttatcggccccagcaccaatccagacccacttagcgctggcgctgatgaggttcgccacgtgacgcggtggaacgacacgctggaaggcctggaagacgactgggcgataattactggggtttaa

SEQ ID NO: 145391 - DNA, 174 bp, Enterobacter cloacae
atgacgtacaaatcagttaagcacggactgccgcgcgcattcacccgcgtctgggtgatgaccgacacggggcgggagactaccggctacgtgaaatcggacggcgagtggttcatcaactgcccgcgcatccgggcgactggcgcgaaggtgctgcgctggaaggagggctga

SEQ ID NO: 145392 - DNA, 696 bp, Enterobacter cloacae
atgagtaacgcagtggcattaaatgaatttgattttaacggcaatgctgtcaggactatgacggatgatgattcagaggtgtggtttgtagctaaggatgttgcagatatccttggctatgcaaagacaaataatatgacagagcgtcttgatgaagatgaaaaacggacgctgtatatagcagcatcccagaataatcagacacttataaatgaatctggactgtacaatgccgttatgggctctcaaaaagatgaggcaaagcagtttaaaaaatgggtcacctcagaagtgcttccctctatccgtaaaacaggcggatacaagatggtgccacagacctacgcggatgctcttcgtcaactggccgaccaggcagaagcggcagaacgggctcagatgatgttggaaaagaaagacggtcagttcaaatctgtacgcggcgctttcggcaatcacgtcatgcagcacaacaaatacgttcatagtaaaggcgaaggatttaggcatgccacgattgcgcacgtaaagagcgtcatccccgggaagtatagctggcagacacttgccaactactgtggctatcacgggttgtcagttgaaatactgaccccacattaccaatcagtaccgctgaactcctatcccgcagaggcatggatggcaatctataacatcgacatcaccaaattctga

SEQ ID NO: 145393 - DNA, 153 bp, Enterobacter cloacae
atggaaattgttgttcgggtaacagttgccgaacttgaagagtcggagatgtcaaccggcgaattacacagcgcagtccttgaggatttagactcccatcgggactacccattattcaacgtgaaaattgaaattgttagtcagcaagaataa

SEQ ID NO: 145394 - DNA, 846 bp, Enterobacter cloacae
atggcaagcgaattaacaatcacggcgagtgcgctggcggaaaaaggtatcgacgtcgctacctggagcgcgctgaagaacagtatctatcctggtgccaaagacgaatcggtaatgatggcgcttgactactgccgcgcccgccagttggatccgttgctgaagccagttcacctcgtgccgatgagcgtcaaagactcaagaacgggtaaaagcgaatggcgcgacgtggtcatgccgggcatcgggctttaccgcattcaggcagaccgctccggcgattatgccggcgcccgcgaaccagagttcggtccagacgtaactcagacgcttactggcgtcgaggtgaccttccctcagtggtgcaaatacaccgtctacaagcgcatgcccagcggggagatcgtcgagttcagcgccaaagaatattggattgaaaactacgccactggcggccgcgacaccacggcgccgaacgcgatgtggaaaaagcgcccatacggacagctggcgaaatgcgcagaagcccaggcgttgcgtaaggcctggcccgagatcggacagcagcctaccgccgaagaaatggaaggcaaatcactggacgttgatatccgtgacgtcacgccgcgcagcatcacagaagcgcttccaccagctgcaagtgaagaaacacttcaggctatcaccgatctcttaacgaccctggataaagactgggagaaagacttcctcccagtgtgcagcgacatcttcaaacggccaattcttgaggcgtccgacctcactgaagaagaggcacagaaagggttcaacttccttcagaaaaaagctaaggcggcagcatga

SEQ ID NO: 145395 - DNA, 1140 bp, Enterobacter cloacae
atggatattctcacaactctcacaggcacttcgacagaagatattttagggagtaaaattactggcaaagatgcttttgtgatcatgccggatattgaattgaaggctattccagcactgttgaccaaaatagactctatttacttattacctcttcctgaagaattcgaatgggttaacaatatcaaggaggctgatgaacaagaagttgagatattggattcgcttttgattgatcggataaaggaaaaagacttcaatgatttatggcttggagagccagaaatagtagactgggaaaatcaaataggctattgctttgataagagacaaagattcattcatgaaaccttatcaatataccatgtttgtgattattttgatggtaagaaaactgaagtaactgttgatgaactcaaaaaaaattacctgcatgttttgaatgccgattttgaatcgataaaaaaatggtctttatataggtgcctctatgccgagataaaagaaggtgatcagaactatattcttcgagactctatatggtatgttgcagataggaattttgtatcgactattgatgatgaaatgaaaaaaataattcattatgaggagtcggataaattccctgtatattcatataaacgagaggaggattataataaaaaactttgccaagatgataattcctttacacacatgaatcagaaattcattcatcatggtggtggtaaaagtaagattgaattttgtgatcttatcagaggtcaatcagattttatccatgtaaaatattatactggttcgcaaagtatgagccatcttttttcacaaggatttataggttctgaactttttataagtgactctgaatttcgaggcaaacttaatgagaaactacctgctcatataaaattagccgatcatataaatagaccagatgctaaaaaatataaactagttttcgccatagcttctaataaaaatcttcccgaagatttacctttgttttctaaagtaaacttgaaaaatttccacaagagtattaccaattttgggtatgaggtcaggatctgcaaaattgctgtggacccagatatttataaaaagaagctatgtaaaccacaaaagaacaagctttaa

SEQ ID NO: 145396 - DNA, 213 bp, Enterobacter cloacae
atggttaacagaatgaggtctattgcacgaacggccgcagaggagtcaggtaagttcaggactgatgtcttagaagcggcccttgctcactcgaagaaagatgaaataattgcagcttacaatcgagcagaatatctggcagaacgagtgattctcatgcagtggtggagtgattatgtcattgctcaaaaatttaaagctattgcggcataa

SEQ ID NO: 145397 - DNA, 993 bp, Enterobacter cloacae
atggatatcaatgagttccgagaatttttacagacacaccgagatgcttatgcagcttgggggcggtttgtgtctgaagaaatttacagtactcttcgtaactccttaggggatgacaaagccgcactatttctaaagatccactcagaaccaaggctaaaaactatcgcctcggcgttaggaaaggtcagccgtaaaggatatgacaatcctgtagtgcaaatgactgacttggttggtgtgcgttttgtcgttctgctatcggttgaaatcagaactatcagtgacataattgaaaactgtgataaatgggatgcaactgtttctaaagactatttatcagaaattgatgttaatcccaaaatttttgactatcaatcccggcattacgaagtaaggccaaaggctcaatttgattactgtggcaaaagtataacgcccgaaatgtgctgcgaagttcaagtcaggaccttgcttcagcatgcttatgctgaattagtacatgatagcatctacaagccttccagtgatgtaccaaaatcagctgaaagacaaatagcgcgtagcatggccttaatggaaacaactgatgatctgttttgcaaaacaatggagattctggccgacaatagtaaagaaagaaacggctttttagattttctttcaaaatattacgcggaaaaaattgggcaacaatttattgaagcagatgtacttgttaacttctctgtaattgatacatttaaagatcacattaccgacagcctgccaaataaaattcacgggcttcttagcgaaaagaaatacatctcagcaagaataattagcagagttgaatacaatcctttatttactcaaccatgcatattatttgtgtactggttagcaagccagatagattcaggagaaatactttcaaaatggcctttgccggggaacattggtggactggaattagtattaagtgatttagggaaaagcatctctcgttag

SEQ ID NO: 145398 - DNA, 1086 bp, Enterobacter cloacae
atggcgagtgtggactttagctttgaagggcttctaatagagagaattatcgcacatagagttttccctagaggtgctgataaaacgttaacgcctccaaagaccagcaaatctttaatggtatttaaacaagatgccttagatgcttttcaggtaaggattacggaggctttggcaagcaaatctcatgggattgagatgtctattggcggtgttggtgatgattgttttttaaatctttcagcttcaacgttttctaatgatacaaaccatttcatcaaggttaccgaacggcttgcaagtaaactcagtgaggcacaatacaacagttctgcgccaggaggaatattagccgtattatcaggacgagttggaaatgactcacttccattccttgctgtcataaaagccgaaacacagaacggttttagaactattgaagatgatgaacaggttacaatggagtttatcgctgaactccttctaactccagctcaacgtttttataagattggatttattgttcagactatcgccctaccccctgatagggatggtaattataatagctcatcttatcgtgcatttttgtttgaccatctaatgacatcaaccgaaacaaaaaacgctgccgggtatttctactctcgcttccttgatatggatattagtaagtcttcaaaaaagttgacccaagattttttcgagaacactagggactttattaataccgcacagatagatgaaagcgataagtttgcgctgcatgaggctttaaggagtgaaatgcgctcgagaaaggccacattaagtaccgctgacttcgctcaaaccaacattcctgaaaatatgcagggggagtatttggagtttatgaaaaacaacaattttcctgcagcagcagtaactaaggacaatggttatattgaatccaagttgaaaataagaagtaaactcgtattttctaatgatgtatgggtttctgtcccaccagatcaattaaaaaaacttgtagaaatcatcccatcggatgataatgaatcaacaattttgaaaataaaagggcgactgaaaagtcaacaataa

SEQ ID NO: 145399 - DNA, 204 bp, Enterobacter cloacae
atgagtaatgttccctttaaatgccctggctgcggccataacctgactgtacgtagcggcattgaaatcaagagtgtagacgatattgaaggctccacctgtaccaattgtgggcgaactgttcacaaagacgatatcgctaagcaggctcgtgatcaagctgagaagatcatcagggacatgctcgggaagcacttcaagtaa

SEQ ID NO: 145400 - DNA, 462 bp, Enterobacter cloacae
atgagtcgattcaacctaaccccagtgttcattctaattgtcgcggctctgactctcttcgtgaaccactaccgcgataacgctatcacctacaaagaccaacgtgataaagcgactgagcaactcagcctggcgaccgccaccatcaaagacatgcagatccgccagcgtgatgccgcggcacttgatgccaaatacactaaggagttagctgatgcaaaagctgagaatgatgctctgcagcgcaagcttgataatggtggtcgggtgctcgtcaagggcagatgtccagtgtcagcctcaaccgaaaccaccagtacctccggcgtgggcaatgatgccaccatcgaactctctccagcttctggacgaaacgttctcggtatccgagacgggatcattcgtgaccaaacttccttgagaacattacaggaatacatcaacacacagtgcctgaggtag

SEQ ID NO: 145401 - DNA, 174 bp, Enterobacter cloacae
atgaaaaacgaacagttggttagtaaagccgaggaagatatttctgccctcattacgaaaaagattgcggagctaaaaaagaaaacaggcaaagaagtatctgagatcgtgtttgttccacgtgagataatggccggtcttgatggatacgaagtgaaaattaagttgatataa

SEQ ID NO: 145402 - DNA, 510 bp, Enterobacter cloacae
atgaaaaagaccagaactttcagtgaaagattctgggaaaaggtcgttgttgcttctccagatgaatgctggatctggaatgcggctaagagaaagagtcctataggcggtgggaggtatttattttacgggcatttgaaagctggagttactgctggcgggcctggaaaaatgattcttgcacacagagcttcatgggaacttagcaacggacctatcccagacggatatttgattgaccatacctgccataacactctttgcgtcaacccaaaacatcttcgaatagcaacaccaaaacaaaacgctgaaaacaggcaacgtcactcctctgcgtcaggatttcgtggagttacttggaatcgggatatgaagaaatggtgtgctcattataaagagcatggtacccggcatcaccttggttactttgactgtaagcatgaagctgctgaggttgcacgacgagcccgtaatgaggtgtttacccataatgatgcagacagagattaa

SEQ ID NO: 145403 - DNA, 3492 bp, Enterobacter cloacae
atgacgacgacgatcatcaaaggccgcggtaaaggtggcagcaatcagacccgaacacccgttgaagcaccggacagcattcagtccattgcaagggcaaaggtgctgattgcgcttggagagggtgagttcgctggcgggcttgatggtaaaaacatttttcttggtgactcatcttcgtacacgcctcttcagaacgccgacggaagttataacttcaataatgtgaaatatgagttccgttccggtactcaggaccaggactacattcagggcttccccggcattgaaaacgaacttcaggtttcatacgagctgaaacaggctgtgccgtacgtgcgcgcggtatccaacacgcagctctctgcgctgcgaattcgcctgggatggccaactcttttactccagaaaaacaacggtgataaagtcggcacccgcgtcgagtatgctatcgatctgtcggtcgatggcgggccgtatgaaacggtggttaacggtgctgttgatgacaaaaccacgtcgctttatgagcgcagtcaccgcgttaaccttccaaaatcctcgactggctggcagttacgggttcgcagaatcacgccggattccacgagcgtgaatatcgtggacaccatgcgcgttgtagctgtaactgaaattattgacgccaaacttcgctacgttaacacagcgctgctgtatgtagagtttgacgcaaagcagttccctaatggcattcctcaggttgtgtgcaatccgaaggggagaatcatccgtgtacctgatacctacgatcctgaaacccgcacttactctggtacatgggaaggtgtgtttaaatgggcatggacggataaccccgcctggatttattacgacatcattctgaacgagcgtttcgggctggggcaaagaatcgatgcgactcagatagacaagtgggaactttatcgcatcgcccagtattgcgatcagctggtaccagacggcaagggcggcagcgggacggagccgcgttttcgttgcaacgtttatatccaggaccgtaatgacgcctggaccgtacttcgtgatctggcgggtatatttcgcggcatgacgtactggggtgacaataagatgtatgtcctggctgatatgccccgcgatgtgtggcatatctataaccacgccagcgtagttgagggtaaatttacctttgcggacccgagtgaaaccacccgaaacactgccgcgctggtgaactggtcagaccctgccaaccactacaaagatacgcctgagcctgtttacgatagcgatctggccatgcgcttcgattatcgtcagctcgaaatgactgcgatcggctgcaccaggcagtcagaggcaaaccggcgggggcgctgggcgctgcttaccaacggtatcggcgaggtggtgaccttcagcacaggcatggacgtcccccctgttggtgaggtgatcggcgtggctgctaacgagctggccggaagaactatcggcggcagggtgagtgcggttaacggccgcaacataaccctcgatcgcgctgctgatgtgaaagccggtaacaggctgtttttgaatcttccgtcaggcacagctcaggccagaaccgtccaggccgttaacggaaacacagtcactgtcaccacaccctacagcgaaacgccggaggctgaatgtaactggggtgtggactctgacgatctgtttatagcgcttttccgtgttacgggaacgcgggacaacaacgacggtactttcgaggtcaccgggacgacttacaaccctgatatctattccgctgttgataccggcgcaagactggacgagcggccagtcagtgtcattccgccaggggttcaggctcccccaggaaatatcgtcgtagacagttactctacggttaaccagaacattgcgattaccaccatgcgcgttgcctgggatgctgttcagggtgcagttgcgtacgaggcggaatggcggcgtgacagcggcaactggattagtgtgccccgaacgtcttctctcggctttgaagtgcagggtatctactcgggtcgctatctggtccgcgtcagggcggtgaacgccagcgacgtttcatcagtgtgggcgacatcaccagaagtaaatcttacgggtaaagtgggcaatccaccgaagccggttggcttcatcgcttctgaaaatgtggttttcggcatcgagctaaactggggattcccggcgaataccgacgacacgctgaagacggaaattcagtacagcctgaccggttctgaagacgatgcgatgctgctggccgatgtgccttacccgcagcgcaaatatcagcagatgggccttaaggctgggcagattttctggtatcgcgcgcagctggtggaccgaaccggcaacgaatcaggttataccgaatgggtgcgaggacaggccagcatcgatgtttccgacatcacagacgtgatcctggaggaaattaaggactccgatacgttcaaagacctgatcgagaacgcggtggacagcaacgaaaaaattgctggcatggctgacgaaatcaaaaaccatgctgacgaactcgagcagcaggcgaaagacatccaggagaacgctgacgggctggctcaggccgaagtgaagatagacgagatctctgtgtcgatggacggcatgacgggaggtgtgaagaactcggcaattgcgataatccaggccaatctcgctcaggtggccacgcgtaaaacgctgtcggcatcggtagccggtaacagcgcgcagctggaccgcattgatgaggtgatcgtcactgacagggaggcaacggcacgcgcattgctgagcctgcagacgaacgtcaacggcaatacggcatccatcaacagtctgagccagacggtttcgaattaccagcagaccacggcgacgcagataaacgccatcactgcgaccataaacggaaatacggcggcgataacaacgaacgcccaggcaattgcgaacgtaaacggccaactcagcgcgatgtacaacatcaaagttgcggtaacgagtaatggccagtattacgccgcaggcatggggatcggggtggagaatacgccatcagggatgcagtcgcaggtaatcttcctggccgaccgatttgcggtgatgtctcaggctggagggaccgtaacactgccgttcgttatccagaatgggcagacgtttatccgtgacaccttcattcaggatggcactatcaccaatgccaagatcggaaatgtcattcagtcgaataattacagtgcgggtacagcaggctggaccatcaacaagaatggttctgctgaattcaataatgtcacggttcgtggcggggtttacgcccaaaatgggcagtttggatttaccaactcaacaggaggagtcacgatcaataacaacggtgtcactgtcaatttgtcgaacggtgggcgcattgttctgggagagttttga

SEQ ID NO: 145404 - DNA, 258 bp, Enterobacter cloacae; identical to SEQ ID NO: 133439

SEQ ID NO: 145405 - DNA, 549 bp, Enterobacter cloacae; identical to SEQ ID NO: 16825

SEQ ID NO: 145406 - DNA, 246 bp, Enterobacter cloacae
atggcattcaccctagtcgcagacattttcgcaaaagtagacggggcgattacgtcaatggtgagcgccaatgttgccaccattatctctgatgtaacgcctctgattgccacctgtctgacaatcaagctgatggttcaggggatgtactcagcgtttaatccgggggcgggcgacagcctgagttcgctgattaaagagtatctttccatagcccttatcctgatgacctgcccccacgattag

SEQ ID NO: 145407 - DNA, 219 bp, Enterobacter cloacae
atgcgcgcccgctggatgtggaatatccgccagcttctgctgagcgtctggttcgaaggcgtggccctgccgccgtccctgtcacatatcaccaccgaatcacaatggcgcagtctgaagtggtttactgaatttggccacctgaacagaggtgatatgctcacctcagaacaacacaggtgtcataatgaaaaaaagaaatttcagcgcagagtttaa

SEQ ID NO: 145408 - DNA, 237 bp, Enterobacter cloacae
atggttgataaagttaccgaagctgccgttgtgggtggcgtggatacacataaagatttgcacgttgccgctgtcgtagatcagaacaataaagtccttgggactcagtatttctccacaacacgacaaggttaccggcagatgctggcatggatgacctcgtttgggacattaaagcgaattggtgttgagtgcacaggtacctatggttccggtttgcttcgttaccagtcataa

SEQ ID NO: 145409 - DNA, 246 bp, Enterobacter cloacae
atgaatgctgaacacacggattacggctggcttttcagggaaccggatgaagaaactgacggcgatatcatgattgatctggagcaccttcctcaggagctcaaactggtcgccatccagattttactgaatcagattgaccgcgatacggcagagaaaaaactggcagaagtcatacagcaacttgggtttgatatcaccgcagcagaactgtcagcgtatctttttaaaccgggtcatgcctga

SEQ ID NO: 145410 - DNA, 1101 bp, Enterobacter cloacae
atgactcaactctttagcccggcgcagatcggcagactgaaacttgaaaaccgcgttgttatcgcccctatgtgtcagtactctgctgaaaacggtaaagttactgcctggcaccgaattcatctcggacagctggctttttccggggcaggcctgcttatcatcgaagccagtgcagtggagcctgccgggcgtatcacccctgcagatgtgggcctgtgggatgacgacacggaagctgcattgtgctccgttattgatgacattcgccggtattctccggtctgccttggaatacagttgggtcatgccggacgtaaggcatcatccgcagcgccatgggagggggggcatcagctggatcctgaacatggcggatggaagactgtcgcgccatctccgcttgcctacagtgaaggtgaacaggcaccggaagaactcagccgtgatgatcttatccgtataaagcaggcattcattgacagcgccagacgcgccgaacggctgggcattgaactgattgaagtccatgctgctcatggttacctgttacatcagttcctttccccactgagcaatcagcgcagggatgagtatggtggtacgctggagaatcgtcttcgtttcccgcttgaggtcttccgcgggatccgtgaagcagtaagccagaatatcgccgtgggtgtccggctgtcagccactgactgggttgacggtggatgggataatgcacagtcaattgtactgagccagcagcttgaggcactgggctgcgattatattcatgtttccagtggcgggctgtcaccattacagtccattagcgttggtcccggctatcagctgccgtttgcacgagaaatccggcaacaggtaaaaatccccgtcattggcgtggggctgatcaccgaaccacagcaggcggaaaacgccctgctgaacggcgaggctgattttattgcgattgcacgtgcggcgctctacaacccacactggccgtggcaggccgctgcggcattaggtagcagcgtcagcgtaccaccacagtatctgcgctcagagcctcatgggttgaaaggcacactacaaccgaatcgctga

SEQ ID NO: 145411 - DNA, 147 bp, Enterobacter cloacae
atgactgatatcaccgaactgacacagtatgaaataaactgtccgggcgtcgggcttgcaaatagcggcgagcccgacgcccggtggtgtcaaccttccagattcagctccacgctgcgcttaagcaccaggcgcataatggcgtaa

SEQ ID NO: 145412 - DNA, 1344 bp, Enterobacter cloacae
atgagcatcgaacagttcggttataaacaggagctccatcgagcattgacctttcgcgatctgctggtttacggcatgatttttatggtacccatagcccctttcggtgtcttcggctacgtctgggatggcgcgcagggcatggtggcgctggcttatctgatcggcatggtggcaatgtttttcaccgccatgagctactggtcgatgtcacgcgcgttccccgtttcaggttcggtatacgcatacgctcagcgcggaatacaccctatcgtaggtttttttgctggctggctgatattgctggattacattctggtgccatcgctactgtatattgtcagcgcggcggcggtggggccgatgttaccgggcgttccgggctgggtctggattatcggctttatcgcgcttaacagcctgattaacttacgcggcattacctttaccgcacgggcaaataataccattttggtggctgaaatcgtggtgctcgcaatttttgtggtactgggattgattgcgctttattccggagccggggcaggccatctgacgctcgcccccttgtataatgccgataaattcagcctgcctctggtcatgggcgcagtctcaattgccgtgctctctttcctcggcttcgatggaatatcgacgctgtccgaagaaaccaaaggcggcgtcgataccgtgggtaaggcctcgttgggcgccctgatgctggtcggtacgctgttcattctccaaacctggattgcggcggaccttgcgcaaggaatgaaatttggcagcctcgataccgcgttctacgatactgccaatctggccggcggccaatggctgaaatacgtcaccatgtggtccacggtgatttcctgggggatcgcaaacgcgctggttgcccaggcggcggtttcacgcatcctgtttgcgatggctcgtgataagcaactcccgcagttgcttgcgaaggttcatccacgcctgaaaacaccgtatgtcagtacattattagtcgcactgatttcactggtttccggtctctggttctacggcgatatcgacaacctcagcaggctggttaacttcggcgcgcttatgggcttcctggtgctgcacgtggcggttatcaaccactatctgatccgtcaaaaatcgcgcaatctggtgatgcatctgctcttcccagtgattggtttgtgcattatcggctttgtcatttatgaaatggatattgaagccaaagtgctcggcctgagctggcttgccgtcggcatggtttattacgccattatgcgcctggtgcttaagcgcagcgtggagctgaatctggaaggttga

SEQ ID NO: 145413 - DNA, 912 bp, Enterobacter cloacae
atgaaaatacccaaagatcggatggtttacgccatgtcgcgcgataacgttcctgtcgccaccgtcaacagtggaagtgaagtgttatttgaaacctgcgactgcttctccgaccaaatcacctctgccgagaccgtgttcaacgagttggactggcagcgtattaacccggccaccgggccggtctacattgtaggcgccgaaccgggcgatgcgcttaaagtcaccatcaagaaaattaccctgacgagccagcaggcggtgatggtcaccgccccgcaactcggggtgattggcgacgaacttagtgctccaaaagtgaccatagtgcccattgaacagggccatgcgatcatgcctggcaatgtacgtgtgccgcttaatccgatggttggcgttatcggcgtcgcgcctgccggaaaggctatctcctgcggcacgccggatagccacggcggtaatatggactgcaaaatgatcaccgccggcagcaccctctggctaccggtcaacgtacctggtgcgcttttcgcgctgggagatttacacgccgcgatgggtgatggcgaagtctcagtttgcggcctggaagtgccgggcgaagtcctcgttgagttaaccgttgttaaaaaccgtcagctacccttgccgatgctggaaaacaacgaaacgattttcaccctcgcttctgccgttaccctcgacgatgcggcagcccttgcggcacgtaatatggcacattttatcgccgataatacttccctgatgctggcggaagctatcaatatactgagtatcgctggcgacctgcaaatctgtcaggtggtcgacccgctgaaaacttgccgctacgcgttacccaaatcggtggcggcgcagctttcgctgagtattgaagggaagcaggcatga

SEQ ID NO: 145414 - DNA, 1005 bp, Enterobacter cloacae; identical to SEQ ID NO: 31749

SEQ ID NO: 145415 - DNA, 1005 bp, Enterobacter cloacae; identical to SEQ ID NO: 31749

SEQ ID NO: 145416 - DNA, 1104 bp, Enterobacter cloacae
atggcgaaaatatggcacaaaattaaatcggttttcatagcagaaccggaagatgcttactgggatcaaagagcgaccaaccttgactatctggtgaagaggcacacaggtgaaattatagttgatcctaccaccgcgcacttgtccctggatgaacgggccaaaatggcagtcggtacggtggatttcgagacgatgcttgcagacctggagatatcaacagattatcgttcactcaatcccaatgatattgttgtggcagtctgcattgggatcatgggagttggagctgcgcaactgacaaatcactatgcagatgcacttgaagagaaattcgtaaagctgcatgagaattttaagcctaaggataaaggccccagtcccttagactaccgggcaggtggtaaccatcgttcaatctttgggcacgactttaatctcaatcagaaactgcctgacggttatacgtatggcgggcaagatgtcggagggcaatcggtctattccctggtactcaagtatctcgaaagtaactttcccggtagcagtggcctcggcctgcatttgaaggcaatactgcatattctgacccactatctttccgatttacccacaacgaaaggtcttcctctgcccttttcttctttttttacagagtggaaagaggaccccaccaaagctacagggtatgcagcctcgaatcctttaatggaagctctgggagatgagtacggaactattaacgcagctgatgcatccacctacgctgttatgaagatgctcttactatcttatggcgcttttgcccacaggggactggatactcctgaagatgaaaaagagctgcataagacgcaacttgcggtgatcgcttatggcactgcgcttgttatacagatgcttctgctggtaacaggaactcttggacgaaccggaaagctgaactaccttattgccggtccgttcctctggaacagcgcccgttcggtgttgatagtccataaacagcatcgtcaggtcatgactcattatgaaaaatctattgccgtacttaatgacagcgaatcaaattttgacgattggataaaaactgtatgcgcttag

SEQ ID NO: 145417 - DNA, 345 bp, Enterobacter cloacae
atgcgcttagtaaaccatgccactaatacaaaaaacttttatcattttgaagactccgatgattgttgcgagcctgctgtagtaacagcagcagctgagcgtttgcggcaaagcaaagatcttaatgctgcagatgtcgcccaactggaaacgattgtctcgcttgaactgctgaggtatgagtacgcttctggcgaaatgccggtggatgatttaaagtcgcagatacaaaaattgcgtaataatttaatcgatgtccatggccgggaacctttcgataatggcaatatagacaaaggcttctacatatttctgaacgaggagtatggtcttgtcacaaagtaa

SEQ ID NO: 145418 - DNA, 138 bp, Enterobacter cloacae
atgattattttatttgttgttattgcaataattgcttttgttattatatttggcgccaatgaggtgcccagacgaagaaggcatcaggcgatgcaggaggcaaaaaagaaaaggtttcgtgatagtgaccagagatga

SEQ ID NO: 145419 - DNA, 591 bp, Enterobacter cloacae
atgttaaaaaatctatggaagagtgagatggaaattttcccatttaatcatttcttttgtaattcctgtattagttctaatgtcaccgagggtattttgcaatggttgatatctactaattcttggaaaagagttaatgaatatttttatgaccagtatgaatttagtttatatgatgcgaaattaccagatgagattcttttcctcaaggaagattttttttgtgatgaattgaaaagttttatagaaaataaatttgatgtggttctgaaaaataaagtggatattgttgcgcataaattaatatcaggcgacaaaataaaaattcataatgattttattgaagggcaagagtcacatcgtattttgtttcattttaataaaaattggaaagaagagaatggtgggtattttatgatcttttctaaggatgagccggaatccttagaaaaaataattcctccacttcatggttcagttcaaggattcgagatatcacagaactcacatcatgcggttagtcaggtatacgattttgaaagatatactgtaatttactcattttacaggaagggaaatgaaaatatctga

SEQ ID NO: 145420 - DNA, 783 bp, Enterobacter cloacae
atgaaaatatctgattttatatgttctcctttaggttggaatgaaagctcaccattttatttgcgtgataactttctgttatcacaaaatataaattccgtagatgatatatgcgtagtagatcccggcagtaaaataatggggattgattatttagtacctaagtttttggatgaaattgagaaagtagattgggaaaaaatgggattaactttctgcgacaaaaatgaattttcattaccagaatatgaaaggttattgtccaaaattgagtctttattatatttttcaaaaaacatgcatagttcgataaaggcatttgcaattaactttcatccattattatctgagtgtgaagattttgatgtgagtttcagtgatccttgcataccattcgatgtattcactaatgttccaaaatatgaagagaaatacgctgctgaaagatttgttgaagggattattcatgaaactctgcatttacagttaacagctatggaacatttattacctttgttccatgataaattgttaactgataatgtattttccccctggaaaggagagggccgaaatgaacgcggtttactacatgcagtctatgttttctcaaatattaaaattttttggttgaaggttcatgcgcaatctaaaaatataaatgactttgcagtaaaaaggattaatgaaattcaaaaggaattatcaacggcaggacatatactaaaaagcgatgcattaactcctgaaggtagaatgcttgcctgcttgtgtttatcataa

SEQ ID NO: 145421 - DNA, 639 bp, Enterobacter cloacae
atgaaaattaaacattggttagtatcatttttaataagcttcagccagattgcttttgcagatactgtattagatgaggtttctaaaagcgtcattagtgtttgccatgctcctagtagcaaagggcagaaatgggatgttcaggttcttgcctctggtgatgttaaagttggacttaagtttgcaggtaaagtagcggctgatgcaaaggttgctcttacaaagagtgagtgggatggcgtacaacaagttcttagggaacatcaacaattggataatgacagttatcgagattgtgtagaaaaaatcacacctttatttttagcgaatataaaagaagaacggaatatatcctcacagatattaaataaagaagaaagtgaactaaaactgccaataagtataatcggtggtggacaaaaggtggtcttctctcctgattttattatagagatggaagaagcttctggcggtggagtgaataaaaaaggattatcaattacagttacacctgagaatggacgattatatcttactgaaggtgagccagtgaacgtggcaattaaaggtaagaattatttgcttgaatttagatttaataaaaagatgcagcctgtctatacattaatgaaccaatag

SEQ ID NO: 145422 - DNA, 402 bp, Enterobacter cloacae
atgagtgagtctcttaaaatattaaacaacattcgtacacttcgcgctcggtctcgtgagttttctcttgaaaatcttgaagaaatgctggagaaactgactacggtggttgaagatcgtcggcaagaagaagttacatttctgaaagataaggaagaacgacaggccaagctcgaagcttttcgtcagcaactccttgaggatggcattgatccagcagaattgctttctggtctgagttcttcttctaagccaaaatccagccgtgaaccacgaccggctaaatacaaatatatcgatgaaaacggtgatgagaagttttggactggtcagggtcgaactccgaaagttatcaccgctgctattgaaagtggtaagaagctggaagatttcgctatctaa

SEQ ID NO: 145423 - DNA, 753 bp, Enterobacter cloacae
atggaagatgccctgtacgaaatcgcctccatgcgcctgtttgcccgattatccctggatagcgccctgccggatcgcaccaccatcatgaatttccgccacctgctcgagcagcatcaactggcccgtcaattgttcaagaccatcaatcgctggctggccgaagcaggcgtcatgatgacccaaggcactttggtggatgccaccatcattgaggcacccagctctaccaagaacaaagagcagcaacgcgatccggagatgcatcagaccaagaaaggcaatcagtggcactttggcatgaaggcccacattggtgtcgatgccaagagtggcctgacccacagcctagtcaccaccgcggccaacgagcatgacctcaatcagctgggtaatctgcttcatggagaggagcaatttgtctcagccgatgccggctaccaaggagcgccacagcgcgaggagctggccgaggtggatgtggactggctgatcgccgagcgtcccggcagggtaaaaaccttgaagcagcatccgcgcaagaacaaaacggccatcaacatcgaatacatgaaagccagcatccgtgccagggtggagcacccgtttcgcatcatcaagcggcagttcggcttcgtgaaagccagatacaaggggctgctgaaaaacgataaccaactggcgatgttattcaccctggccaacctgtttcgggtggaccaaatgatacgtcagtgggagagatctcagtaa

SEQ ID NO: 145424 - DNA, 222 bp, Enterobacter cloacae
atgatgcaagaaaacctcattaaaaagaattatcttcaatgtaaattgaagaccagtgatgtaaatgtcatcaagaaaaaaatgaaaaaaagattaaaactctcccgacactctctcgcggtcattgagcaaagtaaaattgatttaattgatctcgataaaatatgggaaaaatgggaattatgtattgaccgtttcaaatactttaaagttgaatattaa

SEQ ID NO: 145425 - DNA, 177 bp, Enterobacter cloacae; identical to SEQ ID NO: 139670

SEQ ID NO: 145426 - DNA, 1098 bp, Enterobacter cloacae
ttggtatatacaatggaagtcaaaccatttcgtgtcctttgtttagatggcggtggtatgcgtggggtttatcaagcgacgtatctcaatacattcgcgcagcgtttgcataaatctggcgaaggagccatagatccaggcagagcgttcgatttaattgtaggaaccagtacgggcgggatagttgcctgcgctcttgctgcgggggtctcacttgatgaggttgttgatctttatcaagtgcatggtggaaaaattttccctcgtcaacgattacgtgctttacctgtactggggaagtgtgttcgtgcccttttttctggccttgcatctggggatcaagccttgcgagcaatcctttcagactcctttggcaccgaaaccatggggcaggtctatattcgtcgtggaattgggttagccatcacagcagtggatcttaatcgccatgctgccacagttttcaaaacccctcatatgaatcgtcttaatggacgcgacaacgaccgactattggtcgatgcctgtatggcaactagtgccgcccctatcctgagatcaatagctcgtttatctgaaccaggtggcggagcaactgttgattatgttgatggggggctctgggcaaataatccgggagcggtgggaatgatagaagctcatgaaatccttcaaaaaagaggagagattgagcgtccgattcagttatttatgctcggtacgcttcctgtgcagggaggcgaagaacttatgagtgctgataaattgcaccgaggtgtttggggatggggggcaggaattaaggctatcactgtaagtatgaattcacaggcaattgcgtacgactacctggctcgtaaaatcgcggagctgcgaggcgatgggagttttgcatatcgactccctgcacaatgcccatcaggagaactccagaagtatttagaaaatatggacgatgcacgtcctagggtgctaaatgcgcttgcccggcaagctatctcagatgttgattacgcttgggctacggcagaatcagtaagtaaaatgggcgcgtttcggactgcattggctagctcgtccaattatagttgtcattaa

SEQ ID NO: 145427 - DNA, 1056 bp, Enterobacter cloacae
atgaccattattgattgtaataaagagatgaaagggtatcactcagaagaagtgaacctttctaacgcagagcaggcagaaatgcgtagccgccgtgacaatggccgaacaaggctccaaaatggattgacaaaggctgggcatcctttgccaaagaaattcagctctcagggctcatatgcgatgcggacaatggttcaggatgatgcatgtgactacgatattgatgacggtgcgtatttcgataaggaagatcttaagaacgctgaaggcgattatcttagtgcgcttgatgttcgtaagcgggttaagaaggcattgaaggatgaccggttggcgtacgacgcggttgtcaaaaccaattgtgtgcgtcaagagtatcccgatggctatcacatcgatattcccatttatcgtacgacctgctctaaagatatttgggggaatgacgtcatagagtatgaattagcaagtggcgacgaatggactaaatcagatgcacgtaaggtcacgagctggtacaacgatgccgttggtaatgaactgaaaacaggggaatcagataccagtcagatgcgccgtatcaccaaacttactaagaaaatggctagaagccgtaatgcttggaaaaaaaagacaaccagtggcatttgtatttctaagttagttgtagacaattttattgcatgtccaaatcgggatgatgatgctttacgtgatacatggcaggcaatcaaattgcagttagacgtaagtcaacgtatagcccacccggtatttactgataaaaatcttgcagaagaagacgacgaatgcgttatttttttccgggggtgtctgggagatgcgctggaggtattgaaggttttagacgagcacgattgtacaagtaaaaaggctggcgaagcctgggatgaggtgtttaatacaacctatttcagtgctcagtttaccactacatctaaatcgctgttacggcctgcggttgctgcctcgactactttatcttttcctagtcatcccgtacaacctaacaaatcatcgggatttgcctga

SEQ ID NO: 145428 - DNA, 198 bp, Enterobacter cloacae
atgatttacgacctcaagcttccgcattgggcttcactgcttaactgcccattctgtggcggtgaggcagaactggtcgccgatggcgatggtgtttatgccggatgcgctaccaagcagtgcctgattaagccaataacagacacatatccagcaaaacgagatgcgattcgtgcgtggaatcggaggccatcatga

SEQ ID NO: 145429 - DNA, 258 bp, Enterobacter cloacae
atgtcacagtggaacattgcagccaaaagccaggaagagcgcgataaggtcaacgttgacctcgcagcctccggcgtcgcctacaaagagcgcctgaacatgccggtagtcgctgaagtggtggccagagagcagccagagcatttgcgcgaatactttatggagcgcgtgcgatactaccgcgagcagagcattcagctaccccgcgcatccgatccgcgttacatcgagatggccgagcagaacgccaaaaagtag

SEQ ID NO: 145430 - DNA, 225 bp, Enterobacter cloacae
gtgagtcatgagcttacagatagccagatacttgcagacctcattggtaccctgcagcgttatggctacaacgtcgatcggaagtctctttcgccagtcttgctaatcgtgcttcaggatttaaaggctcgccagcaggttgcagaaacaatgattcgctatctggaatcgccccatttgctggctatcgacattgcgccgatacgaggtgttggtgatgcctaa

SEQ ID NO: 145431 - DNA, 351 bp, Enterobacter cloacae
atgcgcgaaatcggagctcaagtcacagctgcgagggcggcggtagtaatacacgaaacattcggacacctcgacgcgaaaccgggtgagagtcataaggggtatttcattttcatcaacgggcagcatggtgacatggatgtggtttacagcgacttcccgacatttggcgaagggcctggttattttaacgatcgtggagacttcatctgggagttaattcgtgatgatggtccctgtgctgctgtcggcatctaccggttcgacggtgaatatcaactacccaaaagaaaaggcagcgctcgtttcgtcggaaatacagtctgcattcagaaattcggtgaggactaa

SEQ ID NO: 145432 - DNA, 516 bp, Enterobacter cloacae
atgaaattatttgagatggaaggttttttgcgtggcaaatgcttgcctggcgacatgaaggtaaacgaaacgaacgccgaatacctggtgcgtaagttcactgagttagagcagaagcttgcagagtctcagcgcgagttccgtgctgctgatgcgactatcgagaatctgcagatgcagctcaatgcagaacgtgaagctaagttggcgctggctgcggagaatgcggggctgaacaaattcatcacacagagttgctacgtgtttgatggtgaacagcatgaaatatccgacgcgtatatcagtgctacagatggaggtatgccagaaactccagaaacagaaaatttctttactgaagtgcgggcgcagggtgtggatgcagcgatcgaagagttaaatcagctagcggagcgtagcgagaaagaagcgccaattgcagcagagcatcatcgttcagcagcgctgtacatgaagttgttcgccgcccaagttcgcaaaggagtgcagcaatga

SEQ ID NO: 145433 - DNA, 345 bp, Enterobacter cloacae
atgaccataacaatccgtgagcagattcttgcagccctgcgtaataacccgagcctgaacagtgctcgtattgccagcatgatcggcatgaccaccaaaaagatttccggcccgttaagcacattgttagcagacggcctgatcgagttcgaaggcaagcacggccagcggctatatcggctgaccagctacggcatgaaatacgcaccggaaaacataccggcgatgccgaagggaaattcgaagctggtgcagcgtacagagacaaacgtgatctgccaggagtgccgcaacagtccggcgatgagaagggtattgatggtttgggggagggtaggggtatga

SEQ ID NO: 145434 - DNA, 126 bp, Enterobacter cloacae
atgaacgcagaaatggcgaaagccgcggtgcacgaacaccaacggctttcgggtgcaaaaacgcgtcgtaattgcgaggtcattatgacaaacgcatgtactaaacaccaggcaaaaggggcatag

SEQ ID NO: 145435 - DNA, 429 bp, Enterobacter cloacae; identical to SEQ ID NO: 144888

SEQ ID NO: 145436 - DNA, 219 bp, Enterobacter cloacae
atgtacatcatcgacacagcagcagagattgaagagcttcagcgtaacgctgcactttccgctcaccgcatcgaccacaacgccgtatcggctgagcattgtgaagaatgcgacgaaccaattccagagccgcggcgcgctgctgttcccggctgccagacgtgtgcggattgccaatccgtcctcgaattgaggaataagcagagaggactgtcatga

SEQ ID NO: 145437 - DNA, 1092 bp, Enterobacter cloacae
atgaaacgattaatacttgctgcgactgtaataagtgcaagcctgctgccatttacctgttcggcaaatgccgactcactgggtatcaataaagactgcgataaccatcctgtcagccagtacggcatggacaccattaccgcattcagtcagtacaagacggaatcgaaaaaatttaaagatgcactgactgcgttctgcaataaaggcaaaaccatgggcgacatgggatttgacgctgccaatgctcactctcttgctgaagcaaggaaatggactgactccagtcttcccgggggaaatgaagagcagaaaaaattttcagcagccatggggagcctgctttactatgcaatgctgaatggattctctggttttgactatcccaggccgcccgagcaaaaagaaaaaccagtaagctcatttaatccaaatgaaatatgcgatgacatatcatctaaagcagccaaatattcaacctcgaatctcccccctcaagtacagatttcattagctgagtggaatcaaatcaaaggcgagtttcagatggtgtgttttgcgggaattatggcggggaacaatcgccagtcggttgactcaaaaatattggctggaatgaatgatattggcaaagaagtgtatttaagtgcttatcgttctggttcggaatacccaaagcttcgcagcaaaaacaacacagaaaaaaatgatgctgcagcaagggagaaagaggctgcaaaggagaaagcagatgcagccagaaaacaaagtgccaccaacaaaacaaagcaggctgacgattataaatccaggagtgttcgccttgactcccccgattttcaacgctttcagtcttcactcagaaatgaatttatgcggcgaattggtgatgcgacgcgtttttcaggaaaagaatgttcaataaatgtctggatgtcacagaaaggtgaggttctgtcagccaggaaggaatccggagatgaagagctttgctctgtggtattgcaggcatcgaagggaatgaggcttagccctatgagtaatgaagtttacggagtgttccgtaatccatccctcaactttaaattctag

SEQ ID NO: 145438 - DNA, 933 bp, Enterobacter cloacae
atgaatatcgagctgcgtcatcttcgctactttgtcgccgtcgccgaggagctgcattttggccgcgcggcggcacggctgaatatctctcagcctccgttaagccagcagattcagatcctggaacagcaggtcggggcgcgccttctggcccgcaccaaccgcagcgtgagcctgacggcggcgggtaagcagttcctgatcgacagcagactaatcctgagcatggttgatgatgccgccgcccgtgcagaacggctctatctcggggaggccggagagctgcgaatcgggtttacctcttccgcgccgtttatcagcgccgtctcggagaccctttcgtcattccgtcgccactttccggatgttcacattcagacgcgcgaaatcaacacccgcgagcagattgccccgctgaatgagggttcgctggatctggggctgatgcgtaacacccagctgccggacacgctggcgtgggaggtgatcctgcgcgagccgctgatggcgatgatcccgcacgatcacccgctggcgtcgcgtccggccgtttcgctggcagagctggcaaaagagccgtttgtcttttttgacccgcaggtcgggacgggcctgtatgacgatatcctgggactgatgcgccgctacgatcttgccccggtcatcacccaggaggtaggggaagcgatgaccattatcggcctggtggcggccgggctgggcgtgtctattcttccggcctcctttaaacgggtgcagctgcgcgaaatgcgctgggtgaccattgccgaagaggatgccgtttccgaaatgtggctggtgtggtcaaaacaccatgaacagagccatgccgcacagcgcttcaaacagcagctaattagcgcctctgccgggcggcatttccacggaaaagagggtaaaaatgtgcggtaa

SEQ ID NO: 145439 - DNA, 990 bp, Enterobacter cloacae
atgcaaaattctgccccattgttaagcgtggtggttgccgtttataacggtgaagctttcctggatcagttctttacctgccttgtgaatcaacgcatcgacaacatggaagtcatcattgtcaatgacggctctactgaccgctcgatggagatcgtcgaaaaatggcgagaaaaactaccgcagatgcaggttatagaacagcaaaaccagggcgtatccatcgcgcgtaacaccggtctggccgttgcgacgggtcaatatctctctttcccggatattgatgatgtctttaaacccggcatgtaccagcgcctgctggatatggccgtcacgcaggatctggatgtcgccacctgtaacgggaactacgtctgggagaataacaagaaaccctcgcgcccgatcttccctgaagacaaactggcttcgacaggggtcatggctggccctgcgtggttaaaaatggcgctggattcacgtaagttccttcacgtcacctggttgaacatctatcgccacgactttatccgtaaacacagtttccatttcgaacccggcctgcgccatcaggatatcccatggaccaccgaagtgctgcttgcggcagagcgggttcagtacaccagtgaacgttattacgactactacattcactccgcatcggtgtcccatatgccggacaatgacgacacgctgattcgctccgcgcgtcactacatgaaaatcctgcagatgctcgatgccatcaatcagcgctacccggataaagtaaaagggatccctgcctgccactggcaaattgccaaagaagggctgggcattattcacaccttcgacaacatgaaggatgagaagaagaaatcaatgattattaaagagttcttcgaaacaggcatctggaaactcatctggaaaagtgcaaaaagtccgcgtctgcgctggcggctgggtcgacgttatttccgtttgaaacggtatctggcataa

SEQ ID NO: 145440 - DNA, 231 bp, Enterobacter cloacae
atgagaactgtatccatttttaaaaacggcaataaccgcgccattcgtctgccccgcgatctggattttgagggagtgagcgagctggagatcgtccgggaaggggacagcattattttgcgtcccgtccggccgacctggggctcgttcgcgcagttcgagaaggcagacccggactttatggcggagcgcgaggacgttgtcagcgacgaaggacgatttaacctgtga

SEQ ID NO: 145441 - DNA, 459 bp, Enterobacter cloacae
atgagcgaaaaatacgtcgtcacctgggacatgttgcagattcacgcacgcaaactggctgcgcgtctgatgccttccgaacagtggaaaggcattattgccgtcagccgtggcggtctggtaccgggggcgctgctggcacgtgagctgggtattcgtcatgtcgataccgtttgcatctccagctatgaccatgacaaccagcgcgagctgaccgtgctgaaacgtgcggaaggcgacggcgaaggtttcatcgttattgatgacctggtggataccggcggtactgcggttgctatccgcgaaatgtatccgaaagcacatttcgtcactatcttcgcgaagcctgctggccgcccgctggtagacgattacgtgattgatatcccgcaggacacctggattgaacagccatgggatatgggcgtggtcttcgtaccgccaatctctggtcgttaa

SEQ ID NO: 145442 - DNA, 690 bp, Enterobacter cloacae
atgcttgatgatgatgaagcagaccaggcccaccgggcacctgaactcagtccggacgttcaggctctgatcaacaacggactggaatttctggacaaggcaagggaggagctggaagcggcaaagccaaagttttcggttgtcagcttctggactgccgttgagatactactgaaagtacctctcgtacacgagcactggacgctggcttgttccggaaaaaaaattgtccgaagtaagtatgttgcaggcgactttcagtctgtgacttacgatgaaacctgtgcccgcctcggtgatatcctcgagaaacccttgccaagagaaacaatggcctttttcgataaggtcaggcagcatcgcaaccgggtggttcacttctatcatccctcattcagtgacgctgaacaggagcagatccaaagagaacaagcagatgcctggtttgctctaaaccgtcttatgcgcgatgactggaaatccctctttggtgtgcgcttacgtcagaagcttgctggtaatgaaactatgatgctccgggggaatgagttttacgctgctgcgagactaaggcagattcaatctgaagttgactcgctcgtcaggaacaatgttgacgttcatgaatgctaccagtgcaaacagaaagcatcggtcactctcacagtgtcaacaacgggtaaaaagtga

SEQ ID NO: 145443 - DNA, 123 bp, Enterobacter cloacae
atggctgagaccgagctcaaatacggaaaagatcccgaaatgagaaagcttgcgcaggacatcattaaagctcagaaaggtgaaatcgagcagatgaataaatggcttggcagtcaaaaataa

SEQ ID NO: 145444 - DNA, 510 bp, Enterobacter cloacae
atgatcgtagcttcagaacaccaagcaaagctaaggcagaaagaaatacaggaaatcgacaagaaggcatctaaagagcacgaggaggcaaagaagaacagtaacttcactcagacatacccaaagggctggcaacgcattagagagcttgtgagggacaaacagggtgctgccgctataggtctttactcatttttcgctgaacacatagatcctacatgcggtgcagtggtctgcgatcagcagtttttagctaatcagatgggtgtttctactcgaacaattcgtcgttggttagattatttggaggagaaaggtgctttggtaagaataccagttgctggaaaggtttgtgcttacgctttagatcctcacgaagtctggaagggatataacacatcaaaagactactcagcctttgttaccaagacattagtgaacaaggatggagaaataaaacgccggataatggctatgttttccggagaggagagcggtcaagagcagtag

SEQ ID NO: 145445 - DNA, 984 bp, Enterobacter cloacae
atgacctgcttattcgcaccttccttagaacagcaggacggaaaaacgcttgcctcagtgcaggcggttgaagagagtcgcctgccggaaggcgaagtaaccgtcgacatcgactggtccagtttaaattataaagatgcgctggctattaccggtaagggtaaaatcatccgaaatttccctatggtgccggggattgatttcgctggccgggttcataccagcgaggatccgcgcttccatccaggccagcatgtactgctcaccggctggggcgtgggtgaaaatcactggggcgggctggcaacgcaggcgcgcgtgaagggcgactggctggtgcctgtgccgaaaggcatggatggccgcaaggcaatgatcgtcggcacggcaggctttaccgccatgctgtgcgtgatggcgctggaagatgcgggtatccgccctgaatcaggggaaattgtcgtcaccggtgccagcggcggcgtgggcagcacggcagtcacgctgctccacaagctgggctatcaggtcgctgcggtttccggtcgagaaagtacccatgactatctgcgccagctcggcgccagccgtattctcagccgcgacgaatttgccgaaagccgtccgctggaaaaacaggtttgggcaggggcggtggataccgtcggtgataaggtgctggcaaaagtccttgcgcagatgaactacggcggctgcgtggcagcctgcggtctggcgggcggatttgccctgccaaccaccgtgatgccatttattctgcgtaacgtacgcctgcagggtgtggattccgtgatgaccccaccggcccgtcgtcatgaagcctgggaacggctggtgcgcgatctgccggaatctttctatacccagagcgcaacggagataaccctcagccaggcgccggaatacgccagtaagatcatggataaccagttccacggtcgtgcgctggtgaaaatcgcctaa

SEQ ID NO: 145446 - DNA, 396 bp, Enterobacter cloacae
atgtctacatggaccggtataactgtcggagaatttgagctgtgctctatgcaagacgattatgagcaatggtatttcagaaacagcgatcgtatccgagacattgtgggtggagataaggacggggatcaccgcaattcatttattggataccgagcagaagtaggaaagattcgccggcggatggagcttcagggatatcacagagaatctctggagcgccattttagggagtgccttgcgaactggcaggaagcaatggagaaagaacttactgaactaaacagcaatgatttctcagataatggcggtgaaggataccccaggtactacgaactcagaaaagactggctgatgaaagcactgccagctattgctgaaggaaggtgcgaataa

SEQ ID NO: 145447 - DNA, 351 bp, Enterobacter cloacae
atggtcaacagcgcgcaggaggtgcgcaagctctccggcggcaaccagcaaaaagtgatcctcgcgcgctgcatggcgcttaacccgcgggtgctgatcgtcgatgagccgacgcgcggcatcgacgtggggaccaaatcggaagtgcaccaggtgctgtttgacatggcgaaaaagggcgtggcggtgatcgtgatctcctccgatctgcctgaagtgatggcggtgtccgaccggatcatcaccctcagcgaaggccgggtgaccggcgagatccacggcgacgacgctaacgaagaacggctgatgacgatgatggccatcaaccacaacgccctgaacgcggcataa

SEQ ID NO: 145448 - DNA, 294 bp, Enterobacter cloacae
gtgagtaaagcaaaggaagtcatcgccaataccaggtatgcagaattcccggacacgctggtaactctggagctgtgccgcgcgtttgcagccatagaaaaacgccgtattggtgaatcgctacgtgcatgcgctcgcgttctggccgccaaggcacaagatcaccatcttgtcagcgtgctggatgaaatgggccgaagccagttccctgaagtccagatgacgagaatacgtgactgcatcagaaggatggaatcagcgctggtaaggaattttatcaatgcgtctgattaa

SEQ ID NO: 145449 - DNA, 1896 bp, Enterobacter cloacae
atgtctgttgaattgaaagttttcggcggtgcttatttcccaaaagataaagcattgaaaaaatacccagatttaaaaccgcttgctactgctgtgaatgcggctacgaaagccatcgccgaagctgttattcttggcaagctggcggcccaacaccctgaacatattgatgattattttaaagtgaaaatctgggaacaccgtgaaggtttaccctgccctgaacttgatattttctcctctgaatttttcgataccgtggctatctggaatgtgaatgcaggtgaaccagctgcggcaccacagccagaatctgaagaaaagacggaatgggatgacaacaaggcagtggaagaaattaaaactgtcgcgcagctcgacgtggcatcccgtgcagcttgcctggcactgttcggcccggtccctggaatcactacagcgcagtacggccagattgtcgatctgaagaatgatgatgaacccagctttgcccgcgagcttgcagaagcactggcgaaagagacccgcgcgctggcgctggctccggaacggcaggagcagctgctcgcatggatacgtgaaaatacaaaagactctgcacagtggccggacatcaaaaagcagatcgctaaatggatcgataccccagttgataagcgacctctggctgacagcactaactctcaagaaaaccgtacagacaccggctccacgctgggcggtggtaacaagacagaccgtagtccggatctggttcataacctctctacgctgcgtatcgaagtggctgttgccattctgagcatgtacgacgagatcgacatttactggatcccgaataaatacatgattccagcgaaagccatggccgaagcagaacaggacacccgtttcacagcgtggtggaaaaaactgcgcagcaccccaggcattctggattattcccgtgcggccattatcgccctcattaaatccgctccggaggacatttggatggaccctgttgccttgcgtgaatacatcaatcgcgagctggttgaacgtgaccatgcgaaccctgaccagaaaacggttgatatagcctgccgccctaaacctcgcactaatgttgagaaaaaagaaaatgatgaaaccgaatcgactgtaccgggcgaagctctgccaccagcagtttgccctggcaaagctgcgcaactcaacaaagaactcaacgaggcattcgctcagagcccggcaccagaagagcaagcgattgaccaaccacgggtggagaacctgggcggcggagtcttctctgttgatgcactgattaataattccccctcaaatgaggtcgaaaaacaggaagtaccacctgcaccaaatgatcgcgactttgcgattttgcatgcgcttaatgaccttatttctggacgcaccaacatcatggggaaagaagaagcagaagatgtggtggcaggcaccggccagctcgtttctgatgttattccactgctaatggccgatatcaccaccacagaattttgcctgtctcctgagttctccgacgaggagatccacgacgtggcaaccaccatgctggatagctggtctgacgatatcagcgttcgccagaaaatagcgcttgatgcaatcgtggaataccgccgcccggcaccaccaaaatctgtcgtgctcgatccaccggccgttaatgcaaagccgaaaaccaagcccgaacctgcacctgaaacaaacgcgccgctttcgtctgttacctacctgcaacagctgaccattgcagcgctgcagggcttatgttccaacccggcatattgcaatcagtatgacgatttaccggcaatggccgccgggcttgcccgcagcgtgatcagtcagcaggaggttgcagagtga

SEQ ID NO: 145450 - DNA, 258 bp, Enterobacter cloacae
atgcgtacttctcaggaattagcgagcgcactggcagagcgcatgaaaaacgcgatgaataaccgacccactcaggagccagtggatcgccgcggtgaaatcattccagggaagcaataccgcgacgaacgcgggcgcatggtaacagttttgcgtgcttccccgctccgggtgtcatatcgccgggaggggtacacggacgtcagtgaaacagggcgtcgtgagtttgaaattaagttcaccgaggtgaagtcgtga

SEQ ID NO: 145451 - DNA, 660 bp, Enterobacter cloacae
atgcaggactggactcaaattccacagcaaacgccgctgtacaacgagcgcgtgcagcacgtgcggaacaattacgagctcgaggagaaggcgtggaaattctgggagctaatgctggaaatttactccacccgatgggagaccaaaaacggctcggccccgtcgggcctatggattgcgcagattgggagtttgaccagcgaccagacgacgagcgtctgtaacgcgatggttgcacgctgcagggcgggcaactcatggccgcctgatctggctgagttcgtcacgctggttgccgactgcggaggcagcgagttgggacttaaaacggcggacgtgatggcagaatacaggcgctggcgcaatgagtcataccgctacgccagcaccgaggaatattttatcgctcgggaatgtcatccggttctgtaccagatttgcactgagttgcggcgcacggggattgagcgacagctgaccgagaaggaacttgaagcgctggcagcaggacagctggcgaagtgggaaaaacatgtggcggacggacatcggatcccgccggtcagaaaacagattgccgcaccacgccatgcgccagggccgacccccgcgcagttacttaaagcgcaggcagaggcagccaaatcaaaacgtatgtga

SEQ ID NO: 145452 - DNA, 213 bp, Enterobacter cloacae
atgactgatttacctaacagcccgaactgtgggttgaaaccggccatgaaggtacgcagccgcggcataaactggggctccgcagaaattcgttgttcaaatggctgcccggatatgcgtgccggattttcgtacccgcccgatcatgaggttgaggcccggaaagagctgcgcgaaaaatggaaaaaactggtggaggagaaagcccaatga

SEQ ID NO: 145453 - DNA, 216 bp, Enterobacter cloacae
atgagcaaatcaccaatgaaatacatggtccgcgcgtggaataaagagctcaaaaatccagcgtggtgcatgggtagtcgcaagcatcgtaaagactgcgcccgtaattgggctgctgtcactgccgctgctgctgagtcatggcatgaggtaattgattgtcaggatgcggcagatgaagccgtagcagaagaagtaagtaattgggacgcataa

SEQ ID NO: 145454 - DNA, 339 bp, Enterobacter cloacae
atgagcacttttaccagagagaaggctgagccgatttaccaatgtgaattctgtcatcatgatgccaacggtgatctgcagtggcactgggaagacgtgaacaaggatttttatgaccaatatgattctgaacgtcgcggtaagcgccgggttctctacaccgcgccgccactcatgctaagtgaaacagcagaagtcgccagggcagcactcgattacatcgactcattaccaatagatatcgctgccgcattaccagcaatgcctggattcgaccgtgattgggctgaaaatgttctcgctgatgcggtaccaaaggaggtggaaaagtgtacctga

SEQ ID NO: 145455 - DNA, 411 bp, Enterobacter cloacae
atggaacaacaaatcagtcatgaagtgatatctcgctcaatttatgaccaagacttagagtatttagtaaatgttgttgaaagagcgaatattgatatcggtattaccctgctggtcaaaggtcttttggtgtcaggcatgctcgtctctaataaaaagtattacacccaagtaagtgatgacctgcagttatcaggagatattggtgcatcgatcgctgaatactttaaggaaagggccaaaaaatttgacgttgaaaaaaccgagtattcagagccgagttttatgaatcttataaaggtatctttcctcaaaggcgacggtcagatggggagtatgaaaggagcttgtcttcgtctgaaaatagaagaggttgacggttactttttaggtggatctcaattcgaataa

SEQ ID NO: 145456 - DNA, 540 bp, Enterobacter cloacae
atgaaaacgttcatttgtgtcgccagcggcccgtcgctgacttcagatgattgcgcccatgcccgcaactccggcctgccaattattgctgtgaacagttcgtggagcgctattccttcatgccagcatatctacgcatcagattgttgctggtgggaagaatacggcgcagggataacatcagaggcttcccggtggtgtggcgatgaattcacggcccggcgattcgggattaactggctaccgtctgcaatcccaggctcgtttaattctggtcagcgcgccattgagctggcgatccaccttggagcaagccgcgttttgttgctgggctatgactgctcaatacgtaacggcacccactggcacggcaaccatgctctgttgtccaatccggacaaattcagcgtagcgcgctggcaggatgaattttcccgtctccgcgctgctgctggtggtgtcgagataattaactgttcccgctttacgcggcttacctgcttcccccgacagtctctcgagactgcactttctctgtag

SEQ ID NO: 145457 - DNA, 1362 bp, Enterobacter cloacae
atgcatcgaattgatacacccacggctcaggccgataaatttggtcagggcaaaaatggttttacaaatggtgacccggccaccggccgccgtgctactgatctgaacagtgatatgtgggatgccgttcaggaggaaatctgtaacgctatcgagaaatcaggcgcggtgctgaataaagggcaacatgatcagctatatcaggctatcgttaagctcatcactgaccgtgtgcctgatgcgcttttacgcagcaagaatcttgctgatgtggtggataaagcactggcgcgctcgaatctggagctgggaaccgcagctattcgtaacaccgctgacaacagcaataacaacgctctggtgcctgttggttacaaggggaattttacagccgactctaatcacggcgcgattgattttgcgacttacccctttgtcgtcggtgaatcattgtttattgatacgcgtgggtgtaccaataacccaccgttcattacgcaggatttttattatatagatgtcgtgtgcgccaccggccccgctcagggggggagggtaaacaggccgttgatccagttcgtcagttacacgaattcgaagttgatcctcgccattcgggaagatgatggtactaccataggctggcgctatttcagggcggtgcaatacgattctgataataatacggtaactattccgggggcgcttaaggctgtcaatggcggtgcagagctttcacaaaatgcgataaacattcgtggggcagggaataaacacctctggttttttaatgcttccggtgcagaaatggggctcgtttatgcctctgacgataaagtgcttcatttacgcgcagcgcagggaccgtcagtagatattcagtcaaatggaaatgtgattgcgcctaattatcttgaggctaaggatgatattcactcagggaggaatatcagcagcgtggggctgattcaggcgggggcgggcctgtacgacacgccaggagtgcgggtgtactcgcccaataacccaccgccacaacaggatttaagcccatacgcgcgacgtgactcgattactaccgttgggctttcatcaaacaatcctgcatacccatatatgcggcaggagtctacaggtgcagttatagaacttgcacctcaagactgggttagaggtaatttcctgcagggtatgcggttaggtgctcagggagctgctaacaataataatggtggatgggccgttgcaccaaatggtgcagttttgactgcatcatatcaagatgctaactatacggcggtgtattatagatatccacaatataatctaaatggaacatggtataacacaggtgcaatatga

SEQ ID NO: 145458 - DNA, 537 bp, Enterobacter cloacae
atgattgctggtaaatttacaagatatatccctacaagtggaaaattgttgaaagattctagcgttataaaaaatcttactgggatggatgttatttttctgcaaaatgaacgaggcgatgattggtatgaaattcaatcgaaattctcacaagaaactatgaaaatagtttatgatgaaaatggaattatcacatcatactctctcgatgcatcttcactaaatccgattgattcttatgtggcggagatttctgaaacagaatttccagagggtattgatatattgggtggttggaaatttgatggcaaaaaactaattcaaataaatcctgacccgttggatgaaatcaatagtaaaaaaattcgtttgataaatgaagctacagcagttatagcgactttacaagatgctgtagatttatcaattgcaaccactcaggaagtcgaaagtctacgtgaatggaaaatatatcgggtgcttttgaatagggttaatccaaacgaacctgactggccgttaaaaccaacccaatga

SEQ ID NO: 145459 - DNA, 582 bp, Enterobacter cloacae
atgaccactcaacttatccccctctttaacggcaagatttgcaatgaaacaacccttctctgtgatgcgcgtgatcttcatgcgttcttatccgtaggaaaaattttcgcagcctggataaaagatcgcattgccgattatggcttcattgaaaaccaagactacgttttgcttaccaatactggaaagcaaaattctggacgaggtggccacaaccgaaaggattaccatctcacactcgacaccgccaaagaactggctatggttgaacgaaacgataaaggcagacagattcgccgctacttcatcgaatgcgaaaaacaattaaaacagcaggcctccagccccacctttccggggaattacgcggtaatcacctacttcgaaaacggtctgccggtggcgtgccaccctcttatgcctggcgaggtgatcatgaatccagattcatgccttgagcacgtgatccgctctggctacgtggtgatgccgtgcgatgaagcggaaaaattcacgctcggcgagatacaggaaatgatcgccatagcacggcgcgcacgtgatcgctggctgcaaccttaa

SEQ ID NO: 145460 - DNA, 345 bp, Enterobacter cloacae
atgagcaaatcactaaatgcacgctgtattcgccgctggaaagttgagtttaaaggccgttgcgattctaaggtgagcccgtggtggcgaaaacgcgatctgcgcggttatatccgcgagtgcgcgctgacaacagctgactgtatggttgagagccgggctgaagataatgccaggattgctttttacggttacacacatggctggtcgcctgaattctcctcctggtacgatgaacgccgggaggcattccagaaagaagctcgccgtcatcttaatgagaccgccaccaatgacgaaatcgacgaagaaattcagaacgagctggaggcctggaatgactaa

SEQ ID NO: 145461 - DNA, 441 bp, Enterobacter cloacae
atgaccaccaacaaatatgcgactctgcgcggcacaatcgccagagccaaacgccacgactgccagaaggtagtgatgcgcgtgacgttagctgaagaggtcctcgatcagctgtcaaatgctgaaaagcagatagcggcgctggcttcagagaatgcggggctgaaaaagtacatctgcgatgagtgctacgtcgagaacatcaaaactggtgcaaaaaaatgcgccgggcttggtatgcctgataccccagcaaccgacgctttcctagatgaaatgcgtgccgacgctatcaaatccgccctcaacgcttgttcggagtgcctcgatagagactgcatcatggattcgaacggcatcagttatgaagattctgcactccgtgaagcgggtgctatggcactgcatgatgcgttacttcgccaggagcgtgccgtatga

SEQ ID NO: 145462 - DNA, 204 bp, Enterobacter cloacae
atgcgctttcatgttgtgttgtgctggtcggtgctgatctccaactttcgggatggttttgccattgccccgcgcgggttaatagtccgctgcacatcagcctgtgcattcaccacaacggtgagagcactgtttacctgctttaccgcgtcgcgtctcacgcagtccgataatcagcaatgctctcgcctgttgtgcccttaa

SEQ ID NO: 145463 - DNA, 378 bp, Enterobacter cloacae
atgaaatatgcacgcattgatggcgggattgtcgttgagttattcgaaaccgatggtgatatatctcagatgttccatcctgaccttaagtgggtggatgtcacgaatatcaaaccacagccggattttaactggtgctatgacggtaaggcgtttacagctccagtcgtcgattttatgaaactggcagagcaggaaaggtcgtatcgcctgcttgaagcggagcggattaccgccgactggaaagttgagctttcgctggggatcatcattgatgatgacaaaaaatcgctgattgcatggatggagtacatcaaggaagttaagctggtagatacttcaacagccccggacatcacctggcctgttaaaccgtaa

SEQ ID NO: 145464 - DNA, 567 bp, Enterobacter cloacae
gtgagttactacaaccttctgaaccgcctgttacccctgtcttcatatagcccaggacagccattgcttgatgcctccattcgcgctgaggctacggtatttgatgttgtagaaaactctgccgggctggctgaatgcggcgttacgcccttctatgcacaaagccttctccctgactgggagcgtgtgctggctattaccccaccagagggcgcgacctatcagcaacgtcaacaaagggttattgcaaagctgtcagaagttggcggtctcagtattccttatttcattcaactggcaaagaaccttggttacaccatcacaattgatgaacctcagccatttcgcgcagggataaaccgcgccgaagatcgtctctggataaaggacatcatctgggtatggcgcgtcaatattcaaaattctggcgctcagatttaccgattcagggcgggtagttcagccgctggcgaacgtctgacagagttcggcgattcaattattgaagaggtgtttcgcgatcttaaacccgcacacaccttttgttacttcgcgtatcaggagtaa

SEQ ID NO: 145465 - DNA, 1068 bp, Enterobacter cloacae
atgccattcattaccaaaaatgccgcacaaatccgcactgacatgctgcgtgacatcaagaacctgctgcaattacctgatgacaagctggggccagacagcgactggtatgtacgggcatcgagtgtggccagcgttgccgaaggtctgtatcagcatcagggatggatagtccgccagattttcccggatacggcagacgctgaatttttgtacctgcatgcccgtttacgcgggttaaccaaaaaagccgccaataatgcctccgggcccgccacctttaccggcgaaccaggagcaattgctgctgcggggcttgttttcaaacgcgacagcgtttcatggacaaccaccgaagacataactatcgggccagatgcgaaagcctccgttaatgcgatttcttctcaggccggaacgacaggcaacacaacgtccgtcatatccgccacactgaccaccacacctgatgggttcgacagcactgtgatggtcggcctgatgaccggaggcacggatgaagaaagcgacgccgaacttcttgccaggctgcttgaaatcattcgtcgcccacctgccggaggtaataagtacgattataaacgctgggcgctggaagtatcaggtgtgtccgcagcatatgtgtatcccttaaggcgaggtctcggaacggtcgatgttgctgttacatctgccggaggtttaccgtcgcaggacgttataaacagaacccaggcacatattgatgaaatgcgcccggtgactgccaaaaacacaatggtcattattcctgctattcagacatttaatgtgctggtcagggtgtcactggatggcatcacgctgaccgatgccagaaccgccattaaagctgctttagaggatgatgacctgcgtcgtgagcccggcgtggcgtttatccgaagccaggcgggaacattgatctcactcattccaggtataacggactatgacatcgtcactccggccgcgaatatttacccggcaatagacgaggtcaaagttgaatggcttcgcctgggggatgtggaggttgagcttctgtga

SEQ ID NO: 145466 - DNA, 351 bp, Enterobacter cloacae
atggaaatgttgattgatccaacgaccggcgattataccggcgacagctcagactctttagcgaatgccgtctacttacggctgatgacgccccttggctcatggtgggcagatccaacgctgggctctcttttacatacactccgccgcgagaaggatgtgtcccgcgttcagagactcgcggtgcagtattcgcagcaagccctgcagccgattattgacgacggtcgtgctctgtccatttccatcaccgccgagcactggcaacaaggctggatgctgcttcatatcatcgtcacgtctgcgagcggaacaccgcagacgtggaaatatccggttaaggtcagctga

SEQ ID NO: 145467 - DNA, 2142 bp, Enterobacter cloacae
atggcgcgtaacttacaactggcgctgcagctgcttgcccgtgataccggctccaaagtgcttaagcaggcgctgcagggcatcagccgtgataccaaagcggcgcaaaagaccgatgacgagctggcgaaatcccgccagcagaactcaaccacagcgattcgcgcctcccgttctctgattgaggaataccgtcgcgccagttcggcgcgagcaactcttggcattcgctcagagcgcgaaatacagcgcgaaatacagcagaccatggcggcctataatcgccttacccgcacaggtatgctgtccgcaaatgagcagaaccgggctttcagggccatgactgacagggtcaagacgcttagaactgagcttggcggcgtgaatgactcaatgacacgcatgcagcgcttgcgtgctgcaggttcaaccgtggcagcagtagccggtgggttaaccgctgcgggtatgattataaaagacccggttcagcgtcagatggcttacgaacggcgtaatgctgagattgcaaataccgcttataacaacctctcagcgccagaccgtattaataaaatacctgagatcaataatgcaatccgtggggctgttcgttatggcggtggaacaccggaggctgcacaggaaactattaattcgcttttcgcaggtggtcttgatgataaaacggcattaaaaatcctgccggatattactcgttatgctacggcctcaggtgcaaaccctaatgaccttgctcgtattgctattggtgcaattaagaactttgatataaaggctgaggatttgccagcggtatttgataaaaccatcaggtctggggagaatggtaaatatgaacttgctgatatggctggttcattacctttaaccatgacaaaagctaactctgtaggtatgtcagggttaaaagatttggatgtaattctcgctatgctacaggctaacgctgaaacagcaggtgataatagcgctgcatcaacaaacgttaataacctgcttgataaatacaccagtgctgacactcagaatgcgttaaaaaataaaagattcaggactaaagacggaaggatgcttgcctatgctgattatatggctgaccagcgattttcaggcgtaaatacttctgatgcattcaccaatgcagtatcaggtattgtttcagccgacccacgcgtgaagaaattacgggctcaggctacgaaatttaaagggacggacaaggagaaagatatccttgcctcactggatattatagtttcctcaattacatcgaaaatagttgctgaccagcaggccagtaccgcactaaaaacaagcataatgaaaaaagacttcattaaggagcagatttcaggaacgcgtgattccgttggcgctggtgctgcttcatatgatgtgatctcatcaaccaatgattttaaatcacaacaatttgaatcagagaaaatgttctctgagcaggatgcaatgaaacctgtcgccgatttatatggtgatttgacgtcaaaactttctgattacgctaaagaatatcctgagctaaccacggctatttctggtgccaccacaggtattaaagccatgactgcagcggcggtagcttttgcagggctaaacttcctgactggtgggggaataaaaatgccaggctctccaggcggtggagtgccgactgcagggggatctgctcttgggcgtgcctggtccgttattcgtggcggagctggcaaggtattagccccactggccctctatcagggtatgcaggatgcgccacttgttcatgttgagcgaggtgatgctgatgcacgtgcgcggcttaaggttgacaactattccagtgagtcagcacgcatgctggatgcagtaaaagcccgccccggattgctggatgtcgtggatgaggtcaaatcatggtggagttctccggccacgatggggcaaaacacaccagcaacaacaggcgtgccgtcttatcttttgccccaacagcaacaaaaatcacaacccattaacctcaccacaaagttgattctggacggccgtgaaattgcatcagcggtcaatgaatacaacggccaacaatccgttcgcggctcaacaggaggcccgcagtga

SEQ ID NO: 145468 - DNA, 501 bp, Enterobacter cloacae
atggagtttttaattgctttaattatattcggtgcttctgttgctgtttacaaagatgctatcaccaataacattgcaagacctgcccgttgggggattggttcagcattcatattcttcattgtcattccattgtatctatttaaaagaaaaaaattaatcggaagtgcattatcagagtcggatgatgccagtagtgttcaaggaggaaaaaatgttagccctttatcagtttatgtcctgatgttcattttcgcatttattgccccagtgattaatttttacaaaggtgatttacctggctgtgattcatccgatgtccattctgttcttaccgagttgctgaatggagaaaaattctctgaacctgcgcaaatgagttatgaccgggttaatgcggtcagacattgtaacttgacggtttctgatagagtgttttcatatacagtgaaatggtacagtgaagaaaaagatcagtttgttgtacagtttgacaactaa

SEQ ID NO: 145469 - DNA, 216 bp, Enterobacter cloacae
atgagacatctcctgagaaatctgacagcaaagacctttaaccagcgcttccctattggctcacagttccattattacctgacgccaggtgtatcggagcgggaaactgtaataacccgctcagcagcctggcatatgcgcaatggtcgtctggttgtcagggtcgaagggaaaatcggtggcatatcagtcagcaaaatggaacctttaaagtaa

SEQ ID NO: 145470 - DNA, 219 bp, Enterobacter cloacae
atggatatagctttggtcctcatatttctggcgatgtatttaactcttggctggtgttgggcatgcatcctggtccgattagtgggattagctaatttatcctgccagaattgctggtttgcctttctcttatggcctttgagtattatcgcgaccgatgcgaacctggaggaaaacgatgagacatctcctgagaaatctgacagcaaagacctttaa

SEQ ID NO: 145471 - DNA, 426 bp, Enterobacter cloacae
atgccgagtaaagattactatcataatcgaaggactaggcttgctaaggccgtggaaaagttgggtggtcgttgcgagagttgcggatccgaatattcgcttcagtttgaccacatagacccttccaccaaatcagcaaatgtaagcgagatgcactatcactcagattcggtgttttatgctgaggttgaaaagtgccaactactatgttctgcatgccacattcagaaaaccaaatttgaccttagctacttagtggctggtgagctgaatggtatgagtaagctaacaatggacagtgtccagttcatcagagaaaactacattccacgacataaggtttatggagccagagggctagggagaatgtttggtgtaacacatcaaacagtgctttcagccttaaatggcgaaacctggaaataa

SEQ ID NO: 145472 - DNA, 372 bp, Enterobacter cloacae
atggcaaaagccaaatggcacagacttccggcattcaccattccgctgtttcaaagtgcgcatgtctacctcgcaacaaccagagaacagtttcagcacgctgataaattccttggtggtagcggagaggaaaggccattcaactgtggactggcaaacaactatgaaaacaccgatacgggagagcgagtttacctgattggagtattcgatcagcagatatcaactctcgttcacgaatgcgctcacgtatgtttttacgtctgctctgatgtgggcgtaacgaccaagccggaagacgcaaacgaaacctactgctatctgctcgacagaatgttttcggcatttttgccgtatataaaacaggattaa

SEQ ID NO: 145473 - DNA, 522 bp, Enterobacter cloacae
atgaagaggttgctttcgattgctattttggcaatggcgctattgggctgtgggcaagataccgcaacagacaaagtagaaaaattcataaaaagcaaagacattggactgctttcaaaaagtaaaatttcacagtgctcggaaagcttcgtcagaaattttcattactttgacgaaaacacattgccgacaactaataagtactacgaattgagtgaatacctctatggtaaagtgaaatttgaaccagtgagtgagagtcaagtcgggaatgccacagaggtaatgctgaaggttagtatcccaaaaccaatagaggatgctaaatcattcatctttgctgatgaaaaccacgcccccagtgaagaaatatcagcattaaacaatttgcttgctctctataaacgcggtggcttgaaagatatgcaatacaccactttcgatatgaagtgggtagtgcttcccgatggcatagatccgaattttacacctgagcagataaaagcctgctcacaaaaataa

SEQ ID NO: 145474 - DNA, 573 bp, Enterobacter cloacae
atgaaatttaataaacaggaacttagaaaagcagcagagaaagcgacagaaggaaattacgttgtcggacactgcgatattaacaagcacggaaacctgagcagcgtttacatctgtcaggaatggaatggaatggctggcggcgttgttgcagagtgccacgttaattgcctgacgaaaaatagcgatcaggtctatgcgaatgcaggatttatggctttggccagccccgcgaatgttatatcgctacttgaagaaattagcacacttgaatccagatgcgcagagctggctgcggagaatgcggggctaaataaattcatcaaagatgactgttttatttacacaagcgatgacatcgaaccgcggtgtgccagcgacttcaagccagaaaccccggcaaccgatgctttcctggctgaattgcgggcgcaggagtctaaacgggtatacgaaagcatactggacaacccagccgtaactgacatggggtcgcttgttgattggcttgaacaaaatgccaatgattccatagcattcgccgcccaacttcgcaaggaggccgcccaatga

SEQ ID NO: 145475 - DNA, 426 bp, Enterobacter cloacae
atggctcgccacaaattcactaatcgcaaagctcgcattgaaaagaagttcagcaaaacggcaatggaccttcttattcagctaaggccacgcagcatcaaccgggaagatttcagtctggaatatgatgatttcaaagggcgtcacggcaccgtctaccacgacgaatggcatctatgggattcgccggattactggactggtgagtgcgatagctacgatgcctttttcgttctccatgacaacttgattactcagactcacgactttgaaggcgagatggacgcacggaatgaggctggctgggacgcggaaatcgatatcgctcaattctgctcaccatggcggttaggtaacgtgactcgcgctcaaatcatcagacactgccggaagcttgtatctgctggcataagttgggacgcataa

SEQ ID NO: 145476 - DNA, 342 bp, Enterobacter cloacae
atggattactcaggtttgcacgacgctgaaatcaacatgaaggtgtgcgctgctctcggccttggccttagcagttatgcgcggattatccgccagggtgacgcttcgatccttcttgatgacaataaaactctggtcgactactgcaacaacccggcggacgcatggccgattatcttttctaacaggataggcattgttccgggaacagctactgacaagtgggcggcgcatcatggcgactggaatattgccaccgctgatgccaacccgcttcgtgcagcgatgaccgtattcctccttatgcaggagtcagccaatgttcaggataatccagcctaa

SEQ ID NO: 145477 - DNA, 240 bp, Enterobacter cloacae
atgttcaggataatccagcctaatacgtggtatgccgatttgtttggctcaccatgcaaaatcttccgcgccactcatgaagtcgtccactacacccgaaagggtcgccgcggcatcgccagcatgatgcgctttcaaaacgaatttgagccactgaccaaagcagaggctgagcgtatcgaagaagaaatcgaaacagcagatcacattaaacggctgcgcgctatgcgtgcggcatga

SEQ ID NO: 145478 - DNA, 237 bp, Enterobacter cloacae
atgagcactattcaggatattcgcaaccaactggcaaccatagctacagaggcgcacaaggtggcgtgctctctggatgttggtgatgagcgcaccgaagcatttgaactatacgaggcattacggcgacttcagcgtcatggcgctgcaaccgacatgcttgccgctaccaatccattgctatctcactgctgtgaagatgacgatgaagattggtgggacgatgaagacgactaa

SEQ ID NO: 145479 - DNA, 483 bp, Enterobacter cloacae
atggatgagtggtgccggtggattcaacctctcatatatagcggtggggtattgataatgaaatacagatattctggagatacgaattctttttatccctgggcattaattgatgattataagcgagcgaatgtatggcctgaaaatggcgctgatgtagacgaagatattttcacgatatatagcggtacaccgccagaaggcaagactcgcgccccagatgttaatggcaaaccatgctggatagatgcaccgccaccatctcaagaagaacaaattttcgctacggagtttcggaaagcggcgttattgacggaggcagcggcgattatcgcgccgcttcaggatgctgttgatttaggcatggcaacagataaagaaactactgcactgtctgaatggaaaaaataccgggtcttgctgatgcgtgttgatacaacaaaacccgtatggcctacacctccggcttcggtggaaaagtaa

SEQ ID NO: 145480 - DNA, 600 bp, Enterobacter cloacae
atgtctaaggcggaattaaacagcgatcatattgccgtagtggccggtgatattactgtatttaactatgacggaatgacgcgcgaatatatttcatcatcagtagagtttttgcacgtaggcgtaggtattccggctaattcgtgtgtagatgcgcctggcaaaataaaagacggctttaccgtttgcagaaccaacgataacaaaacctgggaagacgttgccgatcatcgcggcgagacagtatacagcacgcggaccggggagaaaattaccatcacagcaccgggtgattatccgcaggacaccacggcacaggctccatctacgccatatgatcaatgggatggcagccagtggttaacggacccgacagcgcggcacgctgcggacgtgatggcagcagaacagacgaaagctgtgttattggcggaggcgacggcaatcattgcaccactggcagatgctcaggctggaggctacattgaagatgctgacgtgccacgcctgaccgaatggcagcgataccgatacaagctgactaaagtcgataccagcatcgcgcctgacgttacttttccaccgaagccggaggtgtag

SEQ ID NO: 145481 - DNA, 210 bp, Enterobacter cloacae
atgcgcctgtttaatccgaatactatgacagaggttatacccggctttcatgatactgccggggtgattgagctgcctgctgataactggtttttcaggacttcagaaataccgaaagggatgcgccttgatgtaaatgacaaaggtgaacccgttcttttagaaattaaaaatgaaatgacagaaaagggtgaggttgacgccatctga

SEQ ID NO: 145482 - DNA, 234 bp, Enterobacter cloacae
atgacaatcaagggccaggagtatctttatctttcaccggacggtgtatggcagtttcaaatctacatcccgtcttatatgcgtcacatgttcggcgggaagcgcctgtatcggaaaagtacagggacaagagatatctacaaggcgcgtcacttccgtaaccacatgctggtagagtggaacaaccttaaagaacagttcaagcctgatactgaggataagcgtattcagtga

SEQ ID NO: 145483 - DNA, 270 bp, Enterobacter cloacae
atgcagaagaataaaaagcgcgttcttattgagtttgctgattacggtcaggatcttctctattttattgttcaggacggtatcatcatcaaagcagggccataccataacgacatctacagcggtaaacgggtgttaaatagtgaattcaaaattggaggtcaggttgagttaagtcataaagataaaagcacattcattaaatacccgattgaggcaatcaccgaacaagaagatggtcaagaaccgccgcaacgggagaccaaataa

SEQ ID NO: 145484 - DNA, 273 bp, Enterobacter cloacae
atgattactgcaaaagaagccgaaaaacggacccgtgaaattgtcgcggaatatatcagtgaatgtggttgtgaaaatcccaaccatatccggcaggtattaatcaaattaatcagcatggcttcgcacgccatcgtagcaacaaatggcctggatcaggccatttacgttcttcacgccaccagtgaccacctgagaaaaatgccgccgctgtacgagctggaaattactgaggacggccacgtgaaagttatcggcgtatcacgccattga

SEQ ID NO: 145485 - DNA, 909 bp, Enterobacter cloacae
atgggacgcacaaaattacaaccagttgaactagtggaagatgcgccgctggccgatggccttagtgtcagtttgaatgccatgaccgagcatcgcatcgaaatcatgcagcagtttggtgatggcctgccatatgaacgtgaccgcatcgttcacgagacacgcttttacatggctcagagtgctgaagccatgctggaggctggtaagcggctgattatccttaaagagaatgagccgcatggcgagtttgttgagattgtcagagagcatctcggcattgaacctcgcatagcgcaaaaaatggcgcaggccgcactcaaatttctatctccagaactggagtcaaaagcgaaaacgttttcgcttttagggcgctcaaagttatacgaactaatgctggaagatgatgaagaactggctcaattagcagatggcggcacagtggcaggcctgacgctggatgatgttgatcgcatgtcggtacgtgagttgcgccagtctcttcgtgaagctcgcgaaaccaacgcagcacaacagcgcgtgctggccgacaaaaacgaaaaaatcgactctctctccaccaaactggagaagaaatcccgtattcagccacccaagcctgatgaagaagtgaagaagctgcgggcggaagtgacggcgttagcggttgaggcggaatctgccatcgcggttcgactgtccagcgcctttgagaccctgtgcgcatactgcgctgaaaacatgattgatacccccagagactttatggccggtctggtctaccagctggaaagcaccgcacgtagcctgcgctccacgtttgacctgccggatgagccgacaggtaacgccgccccttcatggctgactgacccgacgccacagattaacgggcaggaggcataa

SEQ ID NO: 145486 - DNA, 189 bp, Enterobacter cloacae
atgacacccgcacaagttaaaactcgcttccagcaacacggcatcactgttacccagtgggctgaggagaacggatactcccgtgaagctgtgtatcgagtcctaaacggtataacaaaagctaaatacggacaggctcatgagattgccgtgaaactgggactcaagccatcagcgcaggctgcctga

SEQ ID NO: 145487 - DNA, 537 bp, Enterobacter cloacae
atgggccaaagagaagaagagctgcggatgttatcagaccaggttcttgatagtcttaaagggctacctcaagatggtcaggaacgtcaggttacaattagtgttggtggtgataatcatggctcaatacatgttggttctgttgtcaacattacctcggcaccacctcgtaagcgtgaactccacgaaatggaaagccgtgaattagctggtatcagaagagatttgctgagcaaaagtaaagatgcgaaatggcgttgctacttcaatgtccctgtaattctgctctttggtttaatgtttttagcatttggctttgcactgtggaatatatacttactatacaattacggggcgaaagcaagccttttagttctagatgagaaaacgtttttcatgtacctatcgtgggctttagccgttaccttcagtggtaagagaatggataagattcgaagggtggaaaacagaataattcaagaaaatcagtcaactattgacgccatagatgtaattttaagacggcgatcattttaa

SEQ ID NO: 145488 - DNA, 342 bp, Enterobacter cloacae
atgtcacagaccaacaccgaagccgaaatcttccccctgcagttccctttcaccacagcggcaggtgattccatttctcagctcgcgcttaagcgcctgacggttaaagacctcaagcaggtcaagaaaacccataaggacccggctgactgggatgaaccgctgattgcccgtagtacaggcctgctcccggaagacctggacaatatggacctggctgattatctggagctgcagacccgatttcagaaaatcacagggctgggcaagaaacccgaagacgatgacaaaggcacaggggctactggcgaggtggttccggttccagccgggggaaattga

SEQ ID NO: 145489 - DNA, 426 bp, Enterobacter cloacae
atgaattattggtttagtccagaaaataacgccttttatcccgttgcgttgaaaaatgactatctcaccgcagggactctccctgatgatttaatcgaagtaagcgataatgtgtttatggagtattcggggacaccacctgaaggaaaagagagaggcattgcagaagatggatacccgatatggattgatcttccccccttaactcccgaggaggaagctgaagcagcagcacaacgaaaagctgcgttgctggcagatgctaaatcaacgatcaatatttggcagactgaattacaactgggcatcatcagtgatgaagacaagactagcctgatactctggatagcctacatcagggaacttcaaaatattgacccgggaaccgggtcagatatcaaatggcctactcagccggaagtgtag

SEQ ID NO: 145490 - DNA, 279 bp, Enterobacter cloacae
atgcgtatcgcgggtgaaaacgggttgccagtttggggcgatttaacaccgccgacacgcgaagaaatgattaaggcagcggaacagcaacagcagcaactgattgattccgcgatgcagtcagtcagcgttatccaactcaaattgcaggctggtcgaatactgactgactcggaaaaagcaaagctgaacgcaattctggactacatcgacgcggtgacagcggttaacaccaccaacgcgccgaatgtagactggcctacacttccggctgagtag

SEQ ID NO: 145491 - DNA, 1284 bp, Enterobacter cloacae
atggtaggaaaacaagagggaaagccactttcgtttaaagcggtagaaatgatgaagcctggagacaaagataaggctgatgtaggcgaaaatcgtggcttacgtgtctcctgcggtgcaactggggttaagtcttttttctaccgttacacaagtcctctgactggcaagcttgctcaggttaaaattggtaacttcccgcagacttctctcgccgctgcacgtcttaaacttcacgaattaaagcttctccgacaggaaggtcggtgtcctgcgtcagagcttaagcaagataagctccagcgtgcgattgaagctgaacaggctaagatccctgaattgaccgtacagggattagttgaactgtatcttactgaacgtattgaggatcgtaaaacgaaggacgggaaggtcattctaggtgccagaaagccgaaaggacaggctgaggttcgtcgtactctctatggtgacgctgttaaaagcttaggaacccggaatgcggctgatattacgcgccaggatatcattaatttaatcaatggcattatagctcgaggtgcaaccgtacaggcagggaatgtactgagggagctttcactcgcatatgaatttgcaattggccttgggcgctttgatgacagttttgcgaatccagcgttgctagcaaaatccagcttacgacagacaagaatcaagctcacaaatggacgtggaacacgagtactgagcgaggacgagctcgttaaatttcttaaatggcttccgggctctgcttatacgccaacgatcaaaaacgtgttacgtctgactctctggaccgggtgtcgtaccggtgaagtctgcaatatggcatggaaggatgttgatcttgaaaaaggcaccattcatctaagagaaaccaaaacaggcattgagcgctatgtgcaattgtccactcaagccatcaactttttgaaggttctgcggcttaactctgatacctatcttttcccttcttctcgcacaaaattacctatacagcagaaatatcttaccgagaatgcttggcgtatgcgtgagcaggggcaaatgctggatataccgagttggacgcctcacgatctaagacggacggtacggacagggttatcacgattacaatgtcccaatgaagtagcagaggccgttcttgggcatacaaaaggcggggtagaaggtatttataatctatataaatatgacgctgagtgtgaaaaatggttgcagatatgggctgattatttagatagtcttctggattga

SEQ ID NO: 145492 - DNA, 405 bp, Enterobacter cloacae
  misc_feature (383)..(392): n is a, c, g, or t
gtggactatctgcccttatttgccgcgataaaagagaagccggtgctggttgttggcacgggtgaaattgccgatcgcaaaatcgcgtttttgcagcgcgcaggtgcgcaggtgcgggtagtggcagaagcggattttgacgaatcacaaatcgacagcgtcgtgctggtaattgcggcgaccgaagatcgcgacctgaaccggcgggtttccgacgccgctcaggcccgttaccgcctggtgaacgtggtggacgaccagccgttatgctcgtttatctttccgtcgatcgttgaccgttcgccgctgctggtggcgatctcctccggcggtaccgcaccggtgctggcgcgcgtgctgcgagaaatgacggcaacgggcgnnnnnnnnnngcgtgctgcgtga

SEQ ID NO: 145493 - DNA, 801 bp, Enterobacter cloacae
atgttcaacacagataatctgccaaaccagttcgacgacccacgtagccagttggcacagggcgccaaaccgtggtgggatgcgttcgacagcggtaagttaccggacaaagcagcactggagcagatcccagcttaccgcgccacatgggaggcgtactgtgaatttgctggtatcagcatcgcaccagatgtagatatcacacagttaactgatgcacagctacgcgcctgcaactgggaacagcgtatgcgtttccgtagggcggcgcaggctaacccgcactactgcccggttaaacaaacggaagtcactattggcgtaggtaaggcactggatgcaggttggagcggtaagaaagccacctcaactgcactcatgcgtgaagcagctaacaaagagattactgaggcgtatatgagtcgtacaaaccagaaaagcaagctgcgtgcagcattggcgcaccatgataatcacccagcagttcaatacgccaaaaagcaggggaataagattcgagtagatgcagatgccctaagcccgggattgtcagcaattcaagatgcggcgagcctgttccgtaaactcagcgagcatgaaaaacgccttgctgatatggaagcccgtatgcgtgatctggagacgttcaaagctaatactgaggcacgtcatgttattgaggatgcaggtcaagaccccgcagaattagcgcgggtaatgcgagcggatggggattcttacggtaagattgcgaaggcattaggccgtagccgtagcacaatccaacggtgggtagattag

SEQ ID NO: 145494 - DNA, 1062 bp, Enterobacter cloacae
atggcgctaggtttcgcacatgactcaaaaaagacgtgtaggtcgtctcttggtaatcgacgtttagctaaagaagattatgtacatacgttaaacagcctgtggcagcatactatggcgcgtttgcccgttgactttccgtggtttgataaagacaaggaaattaagtacagcaatgccttgtttgcactaaatgctaatcagctccacggaaaccgaggatgcctaccggttgaattacataagccaaccaataacttctgcaacaatgatctggtgcctcgtgaggctctggatggaaaacatgccagcatctttgatcgccatggttatcgtgctgaaaacggagaacgggttaaaatgacctcgcatcaggcacggcacctgctcaacaccattgcccagcgcggcggactgtcaaacctggaaattgccaagtggtcagggcgggccgatgttaagcagaatcgaacttacaaccacatgaccgaatacgagctggttggtatggctgaacgcctagaccccacaaaagcgctatttgggcctgtcggcgaggtggcaaagcatttgcccgtgactatgcaggaattcaatacattagagcattcctcagtccatgtgacggagtatggctactgtgtacatgactacaccatgagcccctgtgagaagttccgagattgcgtcaattgtattgagcaggtttgtatcaagggcgatgatacagaaaaattagatcgaattaaaagacggctggtgaagtcggaacgattgttttcgcttgccgaaacggctgtggcaagcggcgagatgggggctgatcgctggtatcagtaccacaagaaaaccgtcaccagacttcgggagttagtcgctattttagaagagccagatattgaaaatggtgcgcagattaagcttcggggcaatgatttcagtcagcttcggcgtgttgcagaaaagaagtccattgagtccattgagcagaaaggaaaagcaagcgaagaagctgtgatgttagatgatttgacaacttttctaggaggtggttttggctaa

SEQ ID NO: 145495 - DNA, 2487 bp, Enterobacter cloacae
atgagcaataatttttctgttggtgtgatgattggcggcattgtcgggagcagcttccgttccgccgtcagcggtacacggcgggcgctggattctctcggcgacacatcgcgccgactgacggagcagcaaagcagcctgtcacgcgccatgcagcgttacggtcaggtaggttctggcgtagcctcacgtctgaacaatgacctgcaacgggtcggcagaacgctggagcaactcaaccgccagcagtcccgcctgtcggcagcgtctgccacaaccgatgctctgagagccaaccggatggcgctttatggtcaggggattgagacgtgggcgcaggccaaagccgcttacagcctcgtttccccggcgattcagcagtcagcctcgttcgacgacaagatgattgatatgtcaatcacggcgaaatatgacgataaaacccgcgccagtctggggcagcaaatccgtgactggtcgctaaaatacaaccagtaccagagcgacttacaggaggcagtcggttcgcttatcagtgacaatatcgacagcgtgtccgaaattggcagcttcatgcccaatatagcccgcgccgctactgccacacgcaccacagggacggaatgggcgaaggttgccgccgtctggaaaaactcgatggatggcagcgctaaagagtttgccaaagtacagaacatcatggcctttgcaggcgaccaggggtcttttgaaatccctgaccaggtgaaatggatgccatctcttgccccgatgatgcgcggtattgccgaaggtaaagaggcgatggcggaaatcggagcgagtttacagatagcccgaattggtgccgggtcatctgacgaggctggtaacaacttccgtaacttcctcaccaagatttttgcccgcgacacgcagaaacagtttgccgatatcgggattgaccttcaggggtcactcatggcttataaatctgctggcgtctcacccattgagggcatgataagcgtcatgggcaggtatctggaggccaaaagcccggaagcgctggcaggcttcaagaaagcaatgaaaatcaaggacgataactcccgcgaccttgcgttacaggaactggcgaagaatttcggtctgggtgagatgttcgccgatatgcaggtcatggcgtttgtccgtccgatgctcgccaacatggacaaataccgcgaaatcagggctggcgcacttaaggcggcggataaagacctgctggcctcatcctacacggagcggctgaaatcgccactggaggcgaccaaagcgctgatggtcagcacccgcgaactgtccattacccttggcagtcaactgtctccctcgttcgtgtcaatgacgcagcaactgattccgctgattcattccaccgggcaatggatagcgcaacatcccggcattgttcagggtgtggcaaaaaccgtgggcgtactgctggggctgaaaatcgccactgtcgggctgaaactcggcctgaatctgctggtatcaccgttcgccgggttgtggaaaaacgccgtactgctgcgcactaactggctgttgctcaaaaccgacctgagcgacggcggcaagctgcgctggctggctaccggattcagtacagtggcgaagggagccggaatgctgggtaaagcgctggcgggaggtctgttcaggggtgtaatggtcgtcgcaaaagcgtttctctggtttggtcgggcgctgttaatgaaccccataggcattgcgataaccatcatcgccgggggcgcgtacctgatttaccgcaactggggcgcgataagtcgatggttctcgcagcgatgggaggaagtgaaaaccgcctttaatggcggcgttctcggcgtgagtaagctaatcctgaactggtcgccgctggggctgttctacaaggcgtttgcgggggtaatgaagtggtttaacatcgaccttcccggccagtttacagagtttggcggtcatctgattgatggactggtgaacggtatcaaaaacaagtgggagtcactcaaaagtaccgtcaccgaaatgggtgacagcgtcggcggctggttcaaggaaaagctggggattcactccccaagccgtgtatttatgggcttcgggtcgaatatctcacagggtgccgctatcggtctccagaggactatcccacttgcagcactcgcagggcagcgactggcagaggaaatgataccggagattccccgccttcctccaccggaaattatgagagcagggtattcgggacaaggagcgggaattacagccagaggcaccagagggggaacatctggcggcgggattaacgtagttaaccatatctacattgatggcaagaacaaggcaccagcgccggatgtggctaatgcgcttaagctatccattcctgaactggaaagagcactggaaactctccttgcccgtaagcgccgggttgcttatgactga

SEQ ID NO: 145496 - DNA, 594 bp, Enterobacter cloacae
atgaaacctgttatttccctcattgaagcactgaacgccgttaaaaataatcttgcctccctgaatgagcagaaagaaaagctctctcgtcgcattggtgatattaatggcgaaataaccgcattacaggatatgccgttatcacttaatgattactgttcctttattcctgaatatattgagcgattcgggcaggaagaataccggtcattcaagcatgctctttgcaacggttccggcagtgaaggaaacgccgaacgctggggcaatcttgagagtgagaacggcgatatttccggcctgttccgtctggtggggctgggtggaaacatctccccggctgataccgggatggcggttatgcgcaagctctgctttttcttcccggatgtagtcgccaaccgactaaccgaagcacttgagaaggataaaagcgtggcatggggtaatgacaaacttccctcactggcagagcgccgtaagaccgtggcggcactggtcagcgaacgcaccgggcttgaaagtgaactggcagccgtcagcgaagaaattgccgggattaccggaatcagcggcctgtccctgactgaatga

SEQ ID NO: 145497 - DNA, 615 bp, Enterobacter cloacae
atgacagatatcaatattggtaactggagaactattgagatattcagggcggggacgcataccgcgatggaaggtcaggagatcagcttttccgatgaggatatcgacagcatagctgcggcctataatggctatcatcgcgcgggttatggtgcgccgctgtgtctggggcatcctgccagtaacggcccggcctatggtgaaacagccgggttgataagcaaaaatggcagacttttcgcgctggttaagcctgataacaggttgctggatatggttcagtcaggtctatataaaaaagtgtctgccgctttctacaagccgggagaagcgcgtaacccggccggaactggtgcctggtatcttcgccatattggttttctcggcgcacagccgccagccgtaaaggggcttgagcaggtggagtttatggaaagcgcttacccggtttgttttggtcacaatgaatcacacgtttatttctcagagttcgacggcatagccgacagccagagggcagcgcagcaccttttagtaaaggatgtgagcgaagcctgcaacgtctcctattccgaagcgctcaccctcaccacaccttttatctggagttattaa

SEQ ID NO: 145498 - DNA, 360 bp, Enterobacter cloacae
atgccggagtaccgtgaaagagcgcctaaagctgtttgcttcctgaatgaactgactgaatctattgagcaggcattagaaaccataccttacttttgttcgcaggccgaaatactctctcccgctatcactgagtgtctcagaaaaacgttttccggggtgaatatttatatccctatgggggcatcaaagaataccttcgacaggaatgcaaaagtactggctgatttctatcagggtacttctatctttgaattatctaaaaaacacaagcgttccattcagtgcatttatcagattattgccgccgaacgtaagaaaaacaaagcgcagcgcgatatgaaacaagggcaaatttaa

SEQ ID NO: 145499 - DNA, 276 bp, Enterobacter cloacae
atgaaaactactgctaatttcagagcctgccctcatgagtcacagggaacgtcttacgatgttctgtttgttaatgtggatgccccgagtacagaaatatgggaagccgcttttagccgccttgaggccgttcgtcgcctgaatgatgaacttgccgctgctgttgatgataaatcaacgcagacccccttagcggttgttaacagtattctgctatctgacgcaatggcgatggtcagcctgataggagatcgccttaaccagaacgacaagtag

SEQ ID NO: 145500 - DNA, 738 bp, Enterobacter cloacae
atgggtatcaacaagtctaaccgttcaggcatcgcaagccaagttgatgtacttcgcgaaaaaattttagatgctgtactccttttgccaaccccgactgaaactttagtgcatcgtggtaaagatatgctggcacttaaggaagcaacaaaaacaaatgaggaatttgcaaaggcgctttcagtggggggaattaaaaaacgtgaagcctataatgctatgcgcgttgcactggtatttggcgtaaccaatactccccgcgccgcaattgtcaaaacgggtatcggtaaaacgaagttaatcctgcttgcccgtctggatgaagaaaaattggatctccttgcctgcggtggggcgtacaacgattgcacgcttgatgatattcttcgcatgagcgccagagagttgcagcgcgtaattcaatctggcgaagatattatttgcgaaagaacactaaccaataaacaggatatcccgtctttgcatgttgaggataaatccgacaaagagacagatataaagcaatcaggtaaaaatgaagaaaataaaaaacaatattgccgtgaattactcaaggtggctttacgttattcagacgagagcgaacttaccgcaataacaaaattcattgaacatatgattgcctgtgcgttggctggtaaatacagtccggggctgaatgctgccagttatgaagtttataataaatttgccattagccggagggctgcaaaatga

SEQ ID NO: 145501 - DNA, 240 bp, Enterobacter cloacae
atgcgtaatacagcgaaactacaactggggttctccccgctatccaaaaagatcatgttggcaaaaatgcgcgatgttgacggcggtcgcttgcgtgttggcaatgacccagggcgtgacgtaacgaacgaagccgcgcagttagtttggcaactggtaatggcagaaggcggcgaaattagctgggatcttgatgatggtagccggatgatactgagggctgaaaagcaggtgaagtaa

SEQ ID NO: 145502 - DNA, 303 bp, Enterobacter cloacae
atggcctgtaactgctttaaagatatcaaagagcgtatggatgcgcgcttgcgcgaggctgtcgccagcaactgcgctgaggttgacgaatccgatttcgataatcgggtcttcattcttgaaaagggtgatttctgcaacgtaatgctgccttaccgctttcgctattaccgtcgtaagaagaatggcgaacccgagcagcgttgtacgaacgctgataccagaatcgcaatcaactactgcccattctgcggcaccaaattcaacggtaaagccacctcaaatgaggaagttaccgcatga

SEQ ID NO: 145503 - DNA, 153 bp, Enterobacter cloacae
atgcgttatcgcttaattcaatgcattttcgggttaagcaaatcgctctttaacaaacagaaccgcgtgacaggtaagccgctgtgctcctggcaaaacgaaatggcacccgatgggatcgaggtaagcgccgagtccgtatgcgtacggtaa

SEQ ID NO: 145504 - DNA, 678 bp, Enterobacter cloacae
atggcatacgaatacgatgttgttcagaaaaacataaaatacctaatggagaaagcaggtatctctagcgtgacggagctatccagaaaagtaaaaatgcagcagtctacgctgcagcgcatgcttgctggggaaattaaagatccgaagtacattaccctgaaacatattgctgagttttttaaaatctccccagtggatctggtggagtgcgacctgcaagccgaaaaaccacgaacagtagttgacgtggacggtgacccttatgattttgaattcagggaagtaccagtattgggcaatacccagctgggtaatggaggattctggacagatatgcaatacccagttggtaatggagacggtcacatcagatggccttcatatgatgcagatgtttacgcgctaaaatgcgttggcgattctatggtacctcgcatcaaagaaggtgagttcgtaataatagaacctaaccacggctaccacccaggggatgaagtgttagtagtcaccgaacagggtgaggtaatggtcaagacttttctttttgagcgcgacggcttttaccatttactcccggtaaacgaaaaccacgcacctatcagattacctaagagttctgtcactaaaatccagtacatagcaggcatagctaaatcgtcgctatggcgcccctaa

SEQ ID NO: 145505 - DNA, 201 bp, Enterobacter cloacae
atgattgagttaactcctaaagacatggttcagtccctgattgatgcagggtatacccaaagccagattgccgaagctactggcgtagcgcaatcctcaatttgccgactgcttaccggtgtgcatacagatccgcgcatatctaccgtcagggctttagagaatatgctgcgtaccgtcggcgaatctaaaaaggcgtaa

SEQ ID NO: 145506 - DNA, 2235 bp, Enterobacter cloacae
atggagatacgctactcaacagggcaacacgccagagacgcacgaccaaaaccggctgtttgcgagagctttgacgctttcgagcatttgtggctgtcgaaccggagaacgttgaacgttctgccgacggacacaaaagagcagctcagcgccaaaaaagaccggctgcattatttctgggtggacatgctggacccggctgttggccgtaagaaagtcaatgcgggcaatagctacatgctgcggtttgatatggacggtaccaccgctacgggttgggagaccctgcgcgaactcttcaacgagtatcgcgggtttgcttactcaactgccagccacgaacaccccacggcgagcggagaacagcgctggcgtattgttctggcggtatcccgcccggtctcgccttcggagctggagcgcatatctccggttgttcagcaggacgtcatggatatttacgatcttatctgcgacgagcctgtagagtgggattcgcgggtatataacgcggcctggctgctgttcggaccagatgaacgagcgaataccgtttcgtttaccggcgcggtcgttgatgtggacgaggtgctatcccgtgctgcgcctgctgacagttctgctgttcgcttccgggatcctgcgcagataaacccacttggtaccgacgatgttgccgattatctgatcgcaaacggctatgccactggtgatctcatcgacggcataaagctgccaattatgtgtccctttgaggatggccacagctcatcgaaaggtgagggggacacctctacggtttacctgctggaaaagaccagcggttttgatctcggtaaatttgtctgtctgcataacagctgcaagcatcgtgctcaggaagacttcctggataaaataggctaccgcgtggcggccttcgaagacctgaccgcagataaagaaggggataaaccagagtttgtggatatcaacaccgacatgaccggccatttccttgagcgctttatttatgttatcgagggtgatcaggtgtgcgacctcagtcgaccaccataccagtgcataatgggtatgaagtcgttcaaaaacctgatggctccttaccagttccctcctgtggggaaaggactaccaacaccagcaactaaacgatggattgaacaccgccataagaaaatagcggagacaacaggctataagccgggggcgggtcgtattatcgagcgtttcgacggccggtttgagattaacgaattctatatgcctgagcacccacgtaccgcagatacgagtaaggtgtccacgttccttaaccatatggcttatctggtgcctgacgcctggcagcgcgagttcttcatcgctcgcctgggctggatggtacagcgccctgaaaggcgttgcccgatttccattctccacgtcgccaccgcccacggtacgggcaggggatgggtcagccagttgatggagcgcgtgctcggcccgtggaactgtgcccgcactcgcatgaagatcctgtgcgataatcagttccatgactacctgtacaatacgctgctttgcaccattgacgaggtgcgcgaaaacgataagcggtatgaggtgaacgataagatccgcgacgtgctgacagaaccacggtttgaagtgaaccgcaaatatggcagcaaaaagacgatggatatttataccggctttctgttctacaccaaccacttcgatgcgctggcgctaccggaggaagaccgccgtatcgccgtgcttggtggccctgatttcgctgcaagcgaggagcactacgccagcctgtatggcgcgctgagcgacagtgactttatcgcccaggtgtactggtatctgatgggtgttgacctgtcccgcttcaactggcagcgcgcacctgagacgaaagaacgcctgttgatgattgaaagtaataagagcgacgttgaatctgcacttatcgaaatcctgaataacccgccagcgcctgcaatgacataccagcaaatcgttaacgtgatactggcagaagcaggaatggatgtagaaattaaccagaagcatattactcgcgttttgaaagaaagaacaaagcgggaacctgtacgcgtaaaaattgacgggttcacaaatagattttggttacttgaaaaaaatcgcgagttcagcaacgaggaattacgcgaaatatataaaacttgcgatattttgcaatctggattgtaa

SEQ ID NO: 145507 - DNA, 228 bp, Enterobacter cloacae
atgaaagtttcaggattaaaaaaccacattgacggaaataacgaaatcacttgtccacgttgtgctaacagcagtgtgtttattcgtaatgtcgccatgcgagcgcacgaaaacggtatgactgtagagattgatttaggctgcacaaactgcgatgacaaattccagcttgagttaaccgacggcactaataccagtgtttacggttatctaaaaatcgaggagtaa

SEQ ID NO: 145508 - DNA, 16434 bp, Enterobacter cloacae
atgagtaacataaaagttgttgatgtcatcattcgcaaaacggcggagaaaaccaaatttaccggcgaaggaaatctgtcggtctctatttcatcgccgagcgtgattgaaattcagggctctgctcaggatgtggcgcgttatgtccgtcaggggaaagacctcctcatttatatgaaagatggcagcgttattcgctgcaataactattttgttgaagatcctgaaacgcaaaatcagtcagagctggtgttcaacgaccgtcaggaactgacacatatttcttttgccgatgccggggaagcgtcaggcgttgcggtgaccgagttaaccgcgcaggccacaccgattagcagcattcaacctttcctcgagcaggaaagcgttttaagcgacgcgccgtggggctggattgcgggggctgcgttaggcggcggtgccatcggggcactgctggcaaacggcggtgacggcgaaactaaaacaaaagtcattgataatacaaaagaagttgaaagcgccacgccgaccttcctgctgtcggataaagcgggtgacaagcagggcgtgctgagcgcaaacgagatcacggacgacatcaacccaacctttagcggcaccggtcagccgggcgcgaccatccagatcaaagacagcagcggcagcaccattgccagcaccatggtcggtacagacggcacgtggacggtaatattaccgacccagacggacggggagcacacctggtcggtcgtgcagatcgacggcagtaaaaccacctctgcgggcagtatcaccgtgacggtctctaccgccgatgccgccattacgctggccaccacggcgggcgataacgtgctgaacgccagcgagcaatctgcgggctttacgctttccggtgccagcaaaaacctggcgcagggtaccgaactcaccgtgacgctgaacggcaaaacctacgcggctgaagtcggggcagacggcgcgtggagcgtcaacgtacctgcggcagacgcgcaggcgctgggcgacggtacctggacggttaacgtgagcggtaaagacgcggcgggtaacaccgtcagcggaagccagacgattggagtggataccaccgcgccaaccctctctgtcgatactctcgcgcaggacaacatcattaatgccgctgagcacaatcagccgctgaccctgaccggtaaaacgaatgcggaagccggtcagatcgtcacggtcaccctgaacggtaaaaactataacgccacggtgggcagcgacggcacctggtccgtcacgcttgccgcgagcgacgtgcaggcgctcaatgagggtaaccacaccctgacggttaacgtgagcgacaaagcgggcaacggctcgtccgtaacggcagaattcacggtggataccgccgcgccggtcgtcaccatccataccgtggcgggcgacgatatcctcaacatcagcgagcagggccaggcgcacattatttccggccaggcgagcggtgccgccgcgggcgatgtggtcaccgtgactcttggcggccagaccttcaccggcgtggtgctggcggacggcagctggagcgtcggcgttccggcgtccgtgctgggcgcgctgggtgaaggcaaccacacgctttcggtttccgtcactgacgcggcaggcaacaccggcagcgccacgcacggcattacgctgagcggacacccgccggaatttacgattgatgccatcagccaggataacgtcctgaatgcccaggaggcgatgcagccgctgagcctgaccggcaccagcaacctgccggacggcaccaccgtcaccgtgacgctgaacaacgtcagttatcaggccaccgtagaaaacggtatctgggcggtccaggtgccggtttccgacgtcctgaatctggcgaacacgctttacaccgtcagcgtcagcggtaccgacagcgtgggtaacagcggttctgccgaagcaaatctgctggtggataccgtccttccgcaggtcattatcaatacgtttgcgggcgacaacctggtcaataacgccgaagcgggcgtcgatcaaaccctcagcggtcgcgttaccggcgcggcggcgggcgataccgtctccatcaccgcaggcggcaagagctacaccgcaacggttggcagcgacctgacctggagcgtgaaaatcccgtcagcggatcttcaggcgttcggtgacggggatttaaccttcaccgcgtccgtcaccaacgcgcacggcaataccggcaccggcgagcgtgatatcaacatcaacgcggagctgccgggcctgcgcgtgaacaccatttccggcgatgacgtgatcaacgccatcgaacagcagcaggatttgagcgtcaccggctccagcagccatctggccgcgggcacgcagattatcgtcaccatcaacaacgttgagtacgtcaccgcggttaacgccagcagcagctggcagatcggcgttccggcggcggacctgcaggcctggacggctggcggcatgacggttagcgtcagtgcggtagatgcctggggcaatcccgtttcggctgaacacccgattgaactcgatctgaacgccgtggcggtcaccattgataccgtctccggcgacgatctgctcaatgcggcagaaaaaggcggtgatttaaccctttccggccagacgcagggcgtggaggcggggcagaccgtggtggtgaaattcgccgaccagaccttcaccgcgcaggtgcagcaggatggctcctggagcctgaccgtaccggccagcgcgatggaaaccctgatcgacgggcgcgcgcaggtgagcgtaagcgtcactaacgtcaacggcaacagcgcggacgccgcgcgcgtggtcacggtggatacgcagccaccggcgattacgctcgataacctgaccgccgacaacattatcaatgcggctgaagcgcagcaggatttagccttaagcggtaccagcactgcggaagcgggccagacggtcaccgtcacgctgaacggcaaaacgtatcagaccacggttcaggcggacggcacgtggcagctgagcgtgcctgcggctgacgtgggtgccctgacggacggcattgtgaccgtgacggccaccgtgagcgacgtggcgggcaacgccagcagctcggaccgcgtgggtctggtggacgcaaccgtaccgcaggtgaccattaacgactttgtcaccgacaccaacaccgttaaccagctcgcccattcacaggcgcaaatcctgagcggctccgtcaccggtgcggcagcgggcgacctggtcaccatcaccattaacagcgtcgactacaccaccgtggtggatgcggcgggtaactggagccttggcctgccggcgtccgtcgtgcaggggctgactgacggcacctggacaatcgacgtctccgtgaccgacaggtccggcaacaccggaagcagttcgctggatgtggtggtgaataccgtgatgcctgtcatcggtatcaacacgctggcggcggacgacgtgatcaacgcgaccgagaagggcgaagatctgcttctctccggcaccagcaaccagccggaaggcacgaccattacggtgatcctgaacgggattcagtacacggccaccgctgacgccagcggaaactggagcgtgaccgtaccggcctcggccgtcagcgcgctgggagaagcccattacaccgtgacggcgagcgtcacggatagcgtaggcaacagcgcctcaaccacgcacgatgtgctggtggacagctcgctgccggtggtgacgattaacaccctggcgggcgacaatatcgttaacgcagcggaagtggcggcagggcaaaccctgaccggtaaggtgacgaacgcggcttcaggtgacactgtcactattatccttggcggccagacgtacaccgctaccgtgcaggacgatctcacctggagcctgccgttaagcgagagccagcttaccgcgctcggcaacggcgacctcaccgtctccgccagcgtgaccaacgcgcacggcaataccggctcttcttctcacgacttcaccatcgacgcccagatcccgggactgcgtattgataccgtggcgggtgacgacgtgatcaacgtgattgaacacgctcagaacctgattgtgtccggcaccagcaccgatctggcggcgggcagcaccgtgaccctgaccatcaacggcaaaacctattcggcaacggtactggcggacggcacctggcaggcggcggtaccggcggccgacgtgtcccagtgggcggacggttcgctggatatcaaggccagcgcgcaggatgcttccggcaacccggtgaccatcggcaccgtcgtggacgtcgatctcgcgcctgttgccatcaccatcagcagcgtgaccgacgataacgtgctcaacgcggcggaaaaaggtcaggacctggtgctttccggcaccacctccaacgtggaagcgggtcagaccgttaccatcaccttcgcaggtaaaacctataccaccacggtggatgccaacggcgactggacctggaccgttccggcagccgatctgagcggcctgaaagacggtgacgcaagcgtgcaggtaaccgtcaccaacgtgaacggcaacgcggcgtcttcggcgcaggaattcagcgtcgataccacagcgccgacggtgaccatcaacaccatcagcagtgacaatatgctgaacgcggcagaggcggcgcaggatctgaccctgagcggcacctctactgccgaagcgggccagacggtcaccgtgaccttcaacggcaatcagtacaccgcgcaggtgcaggcggacggcagctggacgctcgacgttccggcggcggacatggctggcataaccgacggcagcgcggcggtcacggcgaccgtgtccgataaggcaggcaacccggccagcgcgggctcctcggtgctggtcgacaccaccgtaccgcagatttcgttcaacatcgtcgcgggcgacgacgtcgttaatattgccgagcacggccaggcgctgatcgtctccggtaaggtcacgggcgcgcaggcgggtgacgtgattaccgtgaccctgaacggcaaagactacaccgccatgctggacgcgtccggctgctggagcgtgggcgttccggcggcggacgtgggcgcgctggttaacggcgaacagaccatctccgcgacacttaccgataaagccggtaacagcaccaccgcgacgcacgagtttgacgtctctctgaccgcgccggtggtagccatcaacaccctggcgattgacgacgtgatcaacgcgaccgagaaaggccaggatctgctggtgtccggcaccagcaaccagccggacgggaccaccattacggtgaccctgaacggtatcagctatacggccaccaccgacgccagcggcagctggagcatcaccgttccggcggcaaacgtctccgcgctgggcgaagcaagctacgtggtgacggcgagcgtaaccgacgcggcgggcaacagcgcaagcaccggccacagcgtgctggttgacagcgcgctgccgcaggtcaccatcaaccctgtcgccacggacgatgtcattaacgcagcggaagtggctgccgggcagactctgagcggcaaagtgagcggcgcggtgagcggtgacactgtcacgatttcaatcggcggcaatacctggaccgcgacggttcaggacgatctgagctggtcggtcaacgtgccgtccacggtcttaaccgccatcggtaacggcgatctgaccgtgttagccagcgtcaccaacggccacggcaacaccggcaccggcgagcgcgacatcaccattgatgccaacctgccgggcctgcgcgtcgataccgtggcgggcgacgatgtcatcaacagcattgagcacgctcagaacctgattatcaccggctccagcgaaggcctggcaacgggcgcggcgttaacggtgaccgtcaacggtaaaacctacgccgcaaccgtgctggctgacggcacctggacggccgccattccggcggcagacgtcagcgcgctgaatgcgggcacggtcaccgtgaccgtggacggccagagcgcggcgggcaatccggtttccatcagccatgaggtgaaggtggatctggctacagtcgccatcagcattaacccgattgcctcggacgacgtaatcaacgcggctgagaaaggcgcggacctggtgctttccggctctacctccaacgtggaagaaaaccagaccgtcaccatcaccttcggcggcaaatcgtacaccgcgacggtcgatgccagcggcaactggacggcgaccgtaccgtccgccgatttgggcagcctgaaggacggcgatgccagcgtgcaggtgagcgtcaccaacgtcaacggcaacagcgcgtccgcgggccgcgagtacagcgtggacgccaccgcgccgacggtgtctattgaaattgtcagcgagaacaacatcatcaatgctgctgaagcgcagcaggatctggtcgttaacggcgtgaccaacgccgaagcgggccagaccgtcaccgtgacgctgaacggcgtggactacaccaccaccgtgcaggcgaacggcagctggagcgtgaccgtgccgtccgcggatctgagcggcattaccgacggcaactacaccatcagcgccgccgtgtctgataaggcgggcaactcggcctctgcggatcgcgacgtgctggtggataccaccgtcccgcagctgaccattaacaccgtttccgacgacgacgtgatcaacagcaccgagcatgcgcaggcactgattgtcacgggttccgtgaccggcgcggcggcgggcgacgtggtcaccgtcaccctcaacggcaaatcgtacaccgccaccctggatgcctcaggcaactggagcgtgggcgtgcctgcggcggacgtgaccgcgctggccgcaggggattacaccattaccgcggcgctgaccgataaagcgggcaacagcaacagcgccacgcacggcgtggaggtgaacctgaccgcgccggtgctgaccattgacaccgtttccggtgacgatgtgatcaacaatgccgagaaaacccaggatctgacgatctccggtacggcttccggcctggcgacaggcgcggtggtgaccgtgatgctgaacggcaaagcgtacagcgcgcaggtggacgataacggaaaatggacgactaccgttccggcggaacaggtcggcgcattgggtgaagcgttgtacaccgttaccgcatcggcaacggacagcgtcggcaacaataccagcacgtcgcacaccgtgaacgtggaatccgttctgccgggcgtgatcgtcaacaccattgcaggtgacgacgtcattaacgcggcggagctggcggccggccagaccatcagcggtaaggtggtgaatgccgaagcgggcaacaccgtgaccgtgaccattggcggtaacagctacaccgcaacggtgcagagcgatctcacctggtccgtgaacgtgccgtccgacgtgctgaccgcgctgggcaacggcgatttgacggtgtcagccagcgtcacgaacggcgtgggcaatagcggaacgggcgagcgcgaaatcgtgatagacgctaacctgccgggcctgcgcgtggataccgtggcgggtgacgacgtgatcaacagcatcgaacacgtacagaacctgattatcaccggcaccagcgacgggctggcggcgggcgcggcgctgaccgtgaccgtaaacggcaaaacctatccggcgaccgtgctggcggacggcacctggagcgccgcgatcccggcggcggacgttggcgcactgagtgcaggcacggttaccgtgaccgttgcgggccagagcagcgccggtaacccggtttccatcagccacgatgtgacggtggatctggcgagcgttgccatcagcatcgacgccgttgccaccgatgacgtgattaacgcggccgagaagggcgcggatctggtgctctccggcacaacctcgaacgttgaggaaaaccagaccgtcaccatcaccttcggcggcaagagctacaccgcgacggtggacgccgacggcaaatggacagctaccgtgccgcctgcggatctggcggggctgaaagacggcgacaccagcgtgcaggtgagcgtcaccaacgttaacggcaacagcgcctcggcgggccgcgagtacagcgtggatgcgaccgcaccgtccgtgactatcaataccctggcgaacgacgacattctgaacgccgctgaagcgcagtccgatctgaccgtatccggcaccaccaccgctgaagcgggccagaccgtgaccgtatcgctgaacggtaaagactacaccacaaccgtcagcgcggacggcagctggacgctgaacgtcccggcggcggatctggctggattcaccgacggcagcgtgaccgtcaccgcatcggtcagcgataaagcgggtaacccggcctccgtggatcacaacctggcggtagatatcaccgcgcctgcggtgaccatcaacaccgtagcgggcgacgacgtcattaacatcgcagaacacggccaggcgcaaatcatcagcggcaccgccaccggcgcggcagcgggtgataaggtcaccgtcacgattggcgggcagacctacaccaccgtgctggacgcggcggggaactggagcgtgggcgtaccggcgaacgtgatttccggcctcagcgacggcaccgtgaccgtcactgcgtcagtcaccgacgcggcgggcaacaccggcaccggcacgcataacgtgaccgtcgataccggcctgccatcggtggccttcaacgccatcagcgatgacaacgtcctgaacgcggtagaaaaaggtcaggacctgagcgtcagcggcaccagcgctaacctcgcggaaggcaccttggtgaccgtgaccctcaacggtaaaaactacacggcgacgaccgcggcagacggcacctggagcctgacggttccggcagcggatctggccggtctcggccaggccaactataccctgaacgcgaccgccaccaacggcgtgggcaacagcgtgagcaatacggcgaccctgctggtcgacaccgcgctgccgaccgtcaccatcaacaccgtggcgggcgataacgtcatcaacgcggcggaagtggcggcaggccagaccctgagcggcaccgtggcgaatgccgaagcgggcaataccgttaccgtcacccttggcggcaacagctacaccgcaacggtgcagaacgatctgacctggtccgtgagcgtgccgtccgacgtgctgaccgcgctgggcaacggcagcctgagcgtgacggcgaccgtcaccaacggccacggcaacaccggcaccggcgagcgcgagatcgctatcgacgctaacctgccgggactgcgcattgataccgtcgcgggtgatgacgtgatcaacaccatcgagcacgcgcagaacctgatcgtcaccggttccagcgacgggctggcggcgggcacggcgctgaccgtcaccgtcaacggcaaaacctatgcggcgaccgtactggcggacggcacctggagcgcggcgatcccatccaccgacgtgagcgcgtggccggaaggcaccgtcaaaatcagcgttaccggcgacagctctgcgggcaacccgattaccatcagccacgacgtgacggtggatctggcgaccgttgccgtcagcatcaattccatcgctaccgacgacgtgattaacgcggcggagaagggcgcggatttggtgctgtccggtgcgaccaccaacgtggaagccgggcagaccgtgaccatcagcctgaacggcaaaatctatagcgcgacagtagacgacagcggcaactggacctacaccgtaccgtctgaggatctggtacacctcaaggatggcgacgccagcgtgcaggtgagcgtcaccaacgtcaacggcaacagcgcctcggcgggccgcgagtacagcgtggatgtgaccgcgccgtccgtgaccatcaacacccttgcggctgacgatattctgaatgccgctgaagcgcagtccgatctgaccgtgtccggcaccaccaccgccgaagcgggccagaccgtgaccgtgacgctgaacggcaaagactacaccacaaccgcaggcgcggacggcagctggacgctgagcgttccggcggcggatctggcggcactcggcgacggcagcgtcaccgtgacggcgagcgtcagcgacaaggcgggcaacccggcgtcggttgatcacactctgacggtcgacgtgaccgttcctgcggtaaccatcaacaccgtagcgggcgacgacgtgattaacatcgttgagcacgctcaggcgcacatcattagcggcaccgccaccggcgcggcagcgggcgataaggtcaccgtcaccatcggcggccagacctacaccaccgtgctggacgcggcgggtaactggagcgtgggcgtgccggccagcgtcatttccggcctcagcgacggcaccgtaaccgtcactgcatcagtcactgacgcggcgggcaacaccggcaccggcacgcataacgtgaccgtcgataccggcctgccgtccgtggcgttcaacgccatcagcggcgacaacgtgctgaacgcggtggagaaaggtcaggacctgagcgtcagcggcaccagcgccaacctggcggaaggcaccgtggtgaccgtgactctgaacggtaaaaactacgcggccacgacggcggcggacggtacctggagcctgaccgttccggctgcggatctggcggggctgggtgaagcgaattacaccctgaacgccgccgcgaccaacggcgtgggtaacagcgtgagcaatacggcgaccctgctggtcgacaccgcgctgccgaccgtcaccatcaataccgtggcgggcgataacatcatcaacgcggcggaagtggccgcgggtcagaccatcagcggtaaggtagcgaacgcggaagcgggcaataccgtcaccgtcacccttggcggcaacagctacaccgcaacggtgcagagcgatctgacctggtccgtgaacgtgccggaatccgtcctgaccgcgctgggcaacggcgatttgaccgtgtcggcgaccgtcaccaacggccacggcaataccggcgcgggcgagcgcgaaatcgttatagacgccagcctgccgggtctgcgcattgataccgtggcgggcgacgatgtgatcaacagcatcgagcacgggcagaatctgattgtcaccggctccagcgacgggctggcggcaggcaccacgctcaccgtgaccgtcaacggcaaaacctatgcggcctccgtgctggcagacggcacctggagcgcggcgatcccggcggcagacgtcggggccctggcagcgggcacggtcaccgtgaccgctgcaggccagagcgcggcgggcaacccggtgagcatcagccatgacgtgaccgtcgatctgtcagcagtggctatcagcatcgatgcgattgccaccgacgacgtgattaacgcggcggagaaaggcgcggatctggtgctgtccggcagcacctcgaacgtggaggaaaaccagaccgttaccatcaccttcggcggcaagacgtacactacgaaagtcgatgccgacggtaactggacggccaccgtgccttccgccgatctcgcgggcctgaaggacggcgatgccagcgtgcaggtgagcgtcaccaacgcgcacggcaacagcgcctcggcgggccgcgagtacagcgtggatgcgaccgcgccagccgtgagcatcgataccgtcgctggcgataacgtgattaacggcagcgaagcggctgcgggcgtggccatttccggcaccaccacggcggaagtcgggcagacggtcaccgtgacgctgggcggtaagagctataccgcgcaggtgcagcagggcggtatctggagcgtgaacgtgccgggcgccgacctgtccgcgctggcggataacggctacaccgtgcaggtcagcgtgagcgacgccgcgggtaacccgggcagcgcgggcaaagcgattacgcttgataccacgccgccgaccgtcagctttaacgccgtcgcgggcgatgacgtcatcaacagcgtggagcacgggcaggcgcagatcgtcagcggcacggcaaccggcgcgagcgtcggcgataagctggtcatcaccatcggttcgaaccagtacaccaccaccgttgacgccagcggtaactggagcgtgggcgtgccggccagcgtgatttccgcgctgaacgacggcaccgtgaccctcagcgcgacgattaccgacagcgcgggcaacagcagcacccagacccacgatgtggtagtgaacacggcctccgtggcgctgaccatcaataccctcagcggcgatgacgtcatcaacgcggctgaagccggttcgtccctggtgattaacggctccagcgcccagttcgccagcggtacgcaggtcaccgtgacgctgaacggcaagagctatacggccaccatccatagcgacggcagctggacgaccaccgttccggccgcagacgtgggcgccctggccgatggcgcgagctatcaggtgtccgtgtcggcgcaggacagcgcgggcaacagcgcgtcggcgacccacggcatcagcgtggataccactgcgccggtcgtgagcattgcgacgctgtcggctgacgatatgctgaacgcggcagaagcacagcagccgctgaccgtgcgcggctcttccagcgcggaggcgggtcagaccgtcaccgtaacgctgggcggcaaatcctacaccgcaaccgtcgcgaacgacgggacgtggacgctggatgttccggcagccgatctggccgcgctgagccagggcgcgctgacggtgaccgcctcggtcaacgacaaagcgggtaataacggccagaccacgcacaccttaacggttgataccgtcgcgccagccgtaaccatcagcaccgtggccgatgacgatatcgtcaacaacgcggagcagctggcgggtcagaccatcagcggcaccaccacggcggaacagggccagacggtgaccgtctcctttaacgggcacagctatcaggcgaccgtcggggcggacggctcgtggtcggtcttcgtgccgggccgtgatttcctcggcctgagcgacggggattacaccatcaccgcttcggtgaacgacagggcgggcaacccgggcagcgcaacgcacgacgtgacgctgaacggcgatgtcccaaccatcaccattaacacctttgcgcaggacgatatcgtcaacgccgccgagcacggtacgccgctggtcgtcagcggcaccaccgacgccccggcgggccagacggtgaccatcacgctgaacggtaaaacctacacggcgaccgttcagaatgacggcacctggagctatacggtcggcagcgcagacgtgaccgcgctggcggacggcggttcgtacgtcattaatgcgcaggtcagcaacaccatcggcaacagcggcagcgataaccacagcgtcaccgtggatctcaccgcgccgtcgatggggattagcattgattcgctgcaaaacgacaccggcctcagcgcgagtgatttcatcaccaacgacgctcaggtggtggtcaacggctcgctgagcgcgcagctcggcaataacgagaaggcgcagatcagcctcgacggcggtaacacctggattgacctgaccgtgaccggcaccacctggcgctacaccgatggccgcaccctgacggacggtacgtatcagtaccaggtgcgcgtgatcgataacgcgggcaacgtgggggcgacggacagccaggacgtggtgattgacctgacgaagcctgtggcaacgacgattacggtcgattccatcacccaggatacgggtctgtccggcagcgactttatcaccagcgacaaccagatcagcctgaaagggacgctcggcgcggcgctgggcagcggcgaccacgcgcagattagccttgacggcggcgttacctggaccgatgtgagcgtcagcggcctgagctggacctatgtcgatggccgcacgctggccgacggggattataactaccagctgcgcgtgattgacgacgcgggcaatatcagcgccaccaccagccaggtggtgaccattgatacggttgcgccggatgcgagcaaaaccatcgccttcgacagcatcagcgacgataccggcctgagcggcagcgactttgtaactaacgatacgtccctgacgctgcacggctcgctcggcgcgacgctggccgacggcgagtatgcccagatcagcatcgacggcggcgtcacctggcagaacgtgatcgtcaccggcaacagctggtactacgtcgatagccgcacgctgggtaaccagacctatgactactacgttcgcgtggtggatgcggcgggcaacgtgggggctagcgcccatcagcaggtgaccgtcgatacggtcgccccggacgcggcgattacggtgaccgtggataacatcaccgtggataccggcttcgacaataacgacttcctgaccagttcgacctcgtacacgctgcacggaacgctcggcgcagagcttggcgcgggtgaattcgtgcaggtgagcatggacggcggcagcacctgggtgtacgccaccgtcagcggtacgcagtggagctacagcgacacgcgtaccctgaccgacggcagccataactaccaggtgcgggtcgttgaccaggcggggaacgtcggggccaccacctcgcaggcggtgacggtggatacgcaggcgccgcagtacggcgtcaccatcgacagcatcagcgaagataccggccagtccgggagtgatttcatcaccatggacaccacgctgaccatcaacggttcgctgggcagcgcgctggcaaacgacgagcgcgtacagataagcctggatggcggaaatacctggctcgataccacggtcaccaaccagcgctggagctacaccgatacccgcgatctgcctgacggagactacacctaccaggtgcggattatcgaccaggcgggcaacgtcggctctaccgcctctcaggtggtaacggtggacaccacgccgccaaccacggtaggcacggtagtgagctataccgacggcgaaggcgagcgtcagggcacctttggcagtgcggtagcgacggacgataactcgccgctgatcaacggtacgcttaaccgcgccccggacgacggtgaaattgtgcagctctatcgtgacggggtcctgctcggccaggtgaccatgaacggcagcgcaagctggtccttccaggacaacggcctgagcgacggcaaccacacctacattgtgcgcgtcaccgataaggccggtaactacacggaatccgacggctttgtgctgaacgttgataccagcatcccgaccaccacggcggcgattaccgcgcagaccacgtcggacaccacgccgatcgtcagcggtaccgtctccgctgacctggtgaacggtgaatacctggtggtaacggtgaacggaaaaacctacacctcccagaccggcggcgcggtggtggtcgacccggatcacaacacctggtatctgcagatcccggacggcgatgcgctgagcgtgtcgagctacagcgtgacggcgcaggtgaagagcagcgcgggtaacggtaataccaccggtacggcgaccggcagcctggtgattgataccacctcggtgaataccgactgggcaaccacggcggggaacagcaacaactccaccatgaccctcggcatgaacagcagcggtctgtggaacatcattgctaacggccagtcctactccagcagcgatagctcgacctatgccgggaatacgctgaccaacacccgtagctactacgtggtgagccagaccgccgccgactttgaccgtaacggcacgcaggatatcttcgcgacggagaacacctactcgggctctacgcaggtgatgtggacctacgatggcagcacctataacgccagccagctggcgatggggaccaccatctggtacggcggcgtgattgcgtacgataaaaccggcgatggctatctggatctggcgtacggcgatgccggcatggactcactgacctacctggtgaacaacaacggcgttctgtcgccggacggcaccggtggcgaaggcggtttctacggtcagttcgattccggacgcgaaatctccggcgtcgacctgaacaacgacggggtaatggtgccaacttactga

SEQ ID NO: 145509 - DNA, 1338 bp, Enterobacter cloacae
atgacgatattacgaaagcctatgttacgccgatttacagcagcactggcattcatttcattagccataaatacggctttcgccaatagtaatcaggtaggtattgccccggtggcaaccacaaccttaaaagaaagtattctttttgcaatcgatcgcgatccgtcaattagccagcaggccgcgcaattaggtattggccaggcacaaatagatgaagcgcgcagcggctggatgccgcaaatatcattgaacgggagtacgggacacagccagaccaccgattccagcgggtcgctgaagaattcagccgcctgggggctgagcctgacgcagctgctgtacgattttggcaagaccaataacagtatcagccagtcctccgcccagcgcgatagctaccgctatcagctgatgggcacgctttcggacgtggcggaaaaaacggcgctgagctatgtcgaggtcaaacgctattccgatctgctgcaggcggcaatcgaaaacgtacaggcgctcaaaaacgtcgagcagctggcaaagctgcgcgcagacgcgggcgtgagttccacctccgatgagcttcagacccgcacgcgcattgccggcatgcaggcgacggtcgcgcagtatcacgccgccttaaacagcgcgcgcgccaggcttgcggtattaaccggaatgcaggcagaggcttattcgccgatgcccgcgaatcttgccgtggagccggactcgctcaaccgcatcgattattccctgataccggcggtgatggccgcgcagaacatggaacgttcggctcagtatggcgtggaaacggcgaagtcccagcactggccgacgttaagcctgaagggggggcgcacccgttacgaatcggacaaccgttcctactgggacgaccagatacagctcaatatcgacgcaccgctgtatcaggggggcgcggtttcagctcgcgttcggcaggcggaaggcgcacgggccatggcctcctctcaggtcgatcaggcgcgtttcgatgtactgcaaaaagcctccgtcgcgcaggctgactggaccggcgcacggggaagaatggaggccggaaagcagcagctggaaaatgcgctgcgcgcccgggatgtttataaaaatgaatacaccctgagcaagcggagcattaacgatctgctcagcgttgagcaggatgtctggcaggccacctcagcgaaaataatcgctgagtatgacggctggagttcggcaattaattatgcttccgcggttgataatttaatgccgcttattggaatagagaaaaacgctgccgcaaaattacccgacttgagttaa

SEQ ID NO: 145510 - DNA, 1116 bp, Enterobacter cloacae
atgaaacacttaaagatacttgcatgcctgtttatttctctttccgctagcgcggagcttccagcgctggctgataaatacacaacgtgcaatgatgattcttgcagcaattatgtcgttaataaattcaacatccacccttcattctttggtggtcattatgtttattcggacatggtttatgcatccaaggaatacaagaacgaagggttgctttttactcctgaaggtccagtgatgatgtttaatcagatgacaggcaaacttttagttgccggtaaagatttttccgtccatggcgatcatgtgtcgttcccttcttcaacaaccgttgaccttgcacctgttggtttcagcaagccggataaagaagataaggattttaacgtaagagtcacacttgaatatccattccatcagatgtctgtgtcatacaaaaaaaatgaaagtatgcgccttttaatgagtggtagcattacagacctgagaaaaataattaaagataagaaaaacctaaagataacttacttcggggatagcataacgtttggcgcaaatgctactgggatctactccgctcccaaccaaccaccttttactgaccttacttcagcgtaccttgcgatgattcgtggcggggatgtgcagtggtacaatccatctgtaccaggatggaacagtgctaatgcagttagcgatgaaactggtcgaatgctaaagtttgattcagatgtgtatgtgattgcatttggcgtgaatgacagcaatgatatagaacctaaaacattcgttgctaacattgaaaagcttatcaaagacattaaaaccaaaaataaccatgcgcgaatcgtattaatgtcaccaacacgcccaaacccagaatgggtattgcctaagaaagagtactttgaaggatacaggaaggggctgagaggactctcaaaaaaatatgagcgcaccaccttcatagatattacagatgtgtggaatcagattctgaaacgcaagaatatatgggcaataacaggaaatggggtaaatcaccctggtgattttggtcacagagtaatagccgaggcgctactcaccgccttccttggcgatgacttctcttaa

SEQ ID NO: 145511 - DNA, 1737 bp, Enterobacter cloacae
atgtcggtaccgaaccagactccgtacataatttacaacgctaacggtctgacgaccgtttttcccttcgaattttatattatcaacgccagtgatatacaggtgaccattaacgggacaccggtcaccagcggttatagcgtctcgggtgcgggcaacgtcggtggcggagatgtcatttttatcactccacccgccaacggttctgtcgtgatgctggagcgcgtggtaccaacataccggctcacagattaccaggacaacggcgacttattggctgatacggttaataaagactttgatcgtctatggatggctattcaacggtcatttatttatcttgggctggcacttcgccggccgcttttcggtggtccatttaatgccgaagggtaccggattgaaaagcttgcggatccggtgaaccctcaggatgccgctacaaaaaattatatcgataatttcagcctggttcgcactttgcgagtgcctgaaagttcgattggtatgctgccaggagtgtctggcaggcgaaacctgcttcttgcttttgatagtaacggtaaccccataacggtcctgcctgagagtggtagcgcagctgacgttctcattttattagctgagctggacggtctgaggcggatcggcacgaaagttaattatgggattccggcagggtcttcactgacagaggggcttacattcgcatttgataatgtaaaaggctggcttcgggttggcggggctgacgttttgccgctggatgatgagagaaacttctggcgcggtcttccagatcctaaaaattcatggtggaaccctgctctgattggggattattcggtttcatttaaccgtaatggtgctgcttacgcagtttactcatctactttcgggcatgactgcgttacttatggtgttgcctcattagctggtggtgccggtagtgcttctggtgatccggataacccaatcaacccatccgaatctcagggatattgctcatttgccttcgggaaaaatgttatcgcccttggcgcaaaatctgcggctttctgtgaagaaagcgatgctttgtctcgagctgcattcgctgcgggttacagaacgcaggcgcgtaaagggctaagcacagacccgggcggtgaggcgagcgacggtatcggagctacagctttaggtgagaatactcgagctgcaggtgatggggcctttgccgcagggaaaaacgttcaggcttacggtggctcgattgcgattgggagtggtatcaatgacggtaatccagcagtcaattcacataaagactcagtgatgctgtttgcaaaatcgcttattccaggtattgccgttgtacctggtggcggcgggctgggggacccctcgcgtgtaggggtgcacacaaaataccctaaagaaatcgtggacgtcgtactggaagggggaggccgcgcagccctcagaataccagggacaggaactggtaagctcttgctgcaagggacagataacaacggcaatccacttactatcgcgacgcttgaatggacaagtgccaatggtggtagcgcagtaggaaccctgaaaatcaatatgaacaatgatgctgcatgtattgagctatcgaccgctggaatggttgcgctaaagaacgttaaaacactgggtgaaatatctggtgccccggcgggcaccatttacaaagacgcttctaacttccttaagattgtttaa

SEQ ID NO: 145512 - DNA, 450 bp, Enterobacter cloacae
atggtacgtaacgcaacagccggggatatcccggcgctgatcgagctgggcgcgcggatgtatatcgaatcccggtactcgcaaaactcaccattcgatgaagaaaagtgtgcagagcttgcccgaagcgttatcgcgtcgcccgcagggtgtgtactggtggcagaaaaagagggggtagtcatcggctggatggctggtggcattgctgagcagtggttcagccgacagctgatggcctttgagtatgggctctttgtcgctccggagcatcgcggcggcactgcgggcccgcgtctcgctaaagcttttatcacctgggcgaaagaacacggtgccgcgctcataaacatgggcataaccacgggcgtacatgaagaacgcaccggcgaaatgtattcccgtcttggtctgaaacgttccggcctgctgtattcaatggaggtttaa

SEQ ID NO: 145513 - DNA, 240 bp, Enterobacter cloacae
gtgagcgaagcaaaaccacaagatggtagtaccgttaagggatatcgcagcctgaccgagacggaaatcggcgcaatgaacgatctgaaagctattagccgtaatttcctggctgagattgaaatgctgtctaccaacagtgaatacgatcgtcgttggttagccatcgcgaaaaccgatatgcagactgcatgcatggcggcctgtcgtgccgttgctcgccctgatgcggattgctaa

SEQ ID NO: 145514 - DNA, 234 bp, Enterobacter cloacae
atgagaaccaaagaggctacacccgcagattacaagcggatttttgaagaaatgccaggcggtgcgcctgtgctggaagaacttaccaggcgcttcggtcgcgaagcgtacgtgaaaggcggtaccgaaggtgaccgcgaaacatgttaccgggccggacagcgttctgtgctcgatttcattctcagtcagatcaacagagccgatggagtagaagacgatgtggaagcttaa

SEQ ID NO: 145515 - DNA, 1626 bp, Enterobacter cloacae
atggatgaactcgccgttaagctgattaagcgttccgacacgctgaaagccaaccgccagcagcatgaaagcgtctggcgcgagtgctatgactacacctatccgctgcgcggcgcgggattctctgacgaagtgctcgacgctcagagcgcaaaacacaaggtggcgaagctactggacggcaccgccaccgacagcgcacgcatgctggcctctgcgctcatgtccggcatgaccccggcgaacgcgcaatggctgaacctcgacagcgaatcgctgccggacgacgccaaagcctggctgtctgagtgtgccacgctggtttgggaaaatatccacgccgccaacttcgacgcggagggctacgaggcaaatctcgacgtggtgtgcgctggctggtttgttctgtacatcgacgaggatcgcgaagagggcggctacaccttccagcaatggccgctggcgcagtgctatgtcacgtccacccgcaaagacggcatcgtggacacgatataccgccgttaccagctgaccgcagagcaggccatcaaggaattcggcgcggacaaggtcagcgagaagatccgcgacgcggcgaagaaaaagcccgacgataaattcgatttcctgcactgcattttcccgcgcgaaacctacatggtcgatgcccgcctggcgaagaacatgcgctttgcgtcgtacaacgtcgacgtgagcaacaagcagattgtgcgcgaatctggttatcacgaattcccgtgctgcgtgccgcgctggatgaaaatccccggcggttcctacggcatcggcccggtgtacgacgcactgccggactgcaaagagctgaacgaaaccaaacgcatggagaaagccgcgcaggatctggctatctccggcatgtggattgccgaggatgacggcgtgctcaacccgcgcacggtcaaggttggcccgcgccgtatcatcgtggcgaacagcaccgacagcatgaaaccgctgctgacaggcgcagatttccaggtagcgtttaccgcagaagaccgcctgcaggcgtcaatccgcaaaatcatgatggccgaccagctgcagccgcaggacggtccagccatgaccgccaccgaagtgcatgtgcgcgtcgcgctgattcgccagctgcttggtccggtgtatggccggttccaggctgaatatctccagttgctggtggtgcgctgttttggcattgcattccgcgctggcgtcttctccccgccgcctgagagcctgcaaaacgccaatttcaatgtgcgttacatctcgcctctggcacgcgcccagaagctggaagacgtaacggcaatcgaacgcctctgcgcgaacgtggcaaacctcgcgggcatcagccaggacgttgttgacctcatcgatacagacgaagccactcgcgttgtggctgaggctctcggcgttccggcaaaagtaattcgctcatccgatgcggtggcggatctccgcgaccagcgccagaaagcacagcagcaggccgctcagcagcagctcatgatgcaggcgggaactgaggctgcaggagccgcagggcagacagcaggcgcggcaataggacaacgactggcaggtaatcaatga

SEQ ID NO: 145516 - DNA, 192 bp, Enterobacter cloacae
gtgattgaaaaaacggagattggggatcatcttcccgataacggccgcgtactcgtgaccctcagaaacggcaaaatatctgccctacgaactgctcatgatgatgagcaccttgcatcacttaagtcgttgtttgaactggcggaattgtctggttttaccattgtcgaaaaagacaaaactaaggtataa

SEQ ID NO: 145517 - DNA, 339 bp, Enterobacter cloacae
atggctaagaccgcagctgaacgtaaaaaagcgcagcgcgcacgccaggccaaaaccggtaaccgcaagctggagctgcagctcgatgcgcaggaggttgaaatgctcgagcgcaactgcgccggccggcgccctggtcgtgcgccgtatgacatgaccgagtatatcgcgctgctgatccgccaggatgatgcacggatgcgcaaccgcattaagcgtgtaagcaccaccaaatgcaccaagtgcggcgacgcgcttccggttaaaagctgcatcatgtcaggtgattcgcagtgctggataacaggtggctggaaaaaattcatactgacagtatga

SEQ ID NO: 145518 - DNA, 246 bp, Enterobacter cloacae
atgagtgaaaaccaagcaatagtgtatcgtgacgagaataatcgcgtcatcgttcttgaacagggaggcaaccgtagggagttcactccaaatgagtggcgagtcatctgcatggcggcagacagcgacatggagaatcgtgtctataccgccaccagagctatggagttacgccaacagcgatgggaggaagaacggaaaaagttgatttctcgcattgccgaactggagggcgctaatggctaa

SEQ ID NO: 145519 - DNA, 363 bp, Enterobacter cloacae
atggctgagcaaaccgttctggatatgtgctgcggttcccgcatgttctggttcaataaacgcgatacgcgcacgctcttcgccgatattcgcagcgaagagcacgaattatgcgacggccgccgcctcgttatccgtcctgatttgattgcagacttccgctcgctgccgtttgctgatgcgtcgtttccggttgttgtgtttgatcccccacaccttgagcgtgtcggccaaacggcatggatgggtaaaaaatacggacgcctcaacaaaaaaaacatggcgggcggacattcgcgcggggttcaaagaggcttttcgcgtattgcggccacacggcgtactcattttcaaatggaatga

SEQ ID NO: 145520 - DNA, 405 bp, Enterobacter cloacae
ttgaataacaaagaattagtcaaatccgggcacgaactggcaaaagcaatcagcagtgatacgccgctgatcgagatcgcgaagatggtttctaatctcgccactcagttggatgttcaaatcgcacgctctcaccaattatcaatagcactggaagccgcagagaagcggaccgccgagctgaaagcgaaaaaagtaaagattaaactgcctgaatcattctatccggacggtgatatcgactgcccgttagttatcaatgaataccagattattgaggcgattgttgcagcaggctgcaagccgttcgcagtctgcccacgatgcaagcgtgagctcgatttaacccacaagcctgacggggcgcattattgccacgccgctgataccgctaaaggagagtga

SEQ ID NO: 145521 - DNA, 246 bp, Enterobacter cloacae
atgcaaactgaaaggttcattgagaaagtgatgagcgctgggttatcagtgcttgagcatgaaaataatggtgatttcggaagtggcgttatgcatttaaccattgtcggcggagtgagacgcgttgagttctaccctaccaccggcactgtctacgccaatgcagttaaagggaaataccccgtttttaagcagaaaaaagccgggatcaaagtagctatccgacttgcaaaatcaggcgcctga

SEQ ID NO: 145522 - DNA, 558 bp, Enterobacter cloacae
atgattgccctggctctgtgcctgatttcggtacctgtctcccgttatctctctccccgcgcaattgttaatggtcacgacgtttatttagcatggttacctttaagcgtaatgctggcggtgattctgctatttgggcgcagggctattcttcccattttgttaggttttactgtcactaatttattctatgtaaatttagcgccgctacaatattcagtattactgttctgtcagacctttgcgttgttcgcggcgtgcggccttctgcgtatcatgctgggtaagcgttggcgttactgcatccctaacaagcacatcggattacggatattctggctcggttttatggtgccgataggtattaaactgtcgatgtatttggccggctatttgtttgattttccggtgacaatttcgacctttttcggcgaagggacggttatttataacgttgtggatatacaaagcctgatatgtgcggcattgatttttaccatgatgttctattacccgttaagaatgataattaatcctcgttatgcaataaatttctga

SEQ ID NO: 145523 - DNA, 540 bp, Enterobacter cloacae
atggatattaaaaataaaatcaatacagtattactttgcgacatcgccattcatcttggcatcgatactgaccttgatccggaaatcgtcaaatatgcgattacttccggtcaagattggatacttgacgcaaaatactcaggcgcattctccgaaggttctgaaaaagcagagcgcgattttgtagtcgaattattgtatgcatatagagggctttctaaatcttaccgtttgcttagcttaacagagcaagctgagctgaagaagaaacaccgcctgaatattattgatgacaatattcaactacctggcttcgatggaaacaacgaatatgtatacgaaggtatcatcgaagcattccagaaaattgatcgcttccctgaacaaaatctccctcttaataatacccattcacatacagtgcatcattacaatgcactgatcgaggcatgtaaaaaaattaatgccttagatcgccaatgggaactgagtgctgaagaggttagtgaaattttatctcatgccccgctaactatttaa

SEQ ID NO: 145524 - DNA, 237 bp, Enterobacter cloacae; identical to SEQ ID NO: 145408

SEQ ID NO: 145525 - DNA, 570 bp, Enterobacter cloacae; identical to SEQ ID NO: 121264

SEQ ID NO: 145526 - DNA, 204 bp, Enterobacter cloacae
atgacggtgcagcaatctaaaagacggcctttaagccgctacctgaaagactttaaacacagccagacgcattgcgcccactgtaacaagttactcgatcgtatcacgctggttcgccggggcgaaatcgtcaataagattgcgatttcgcgtctcgacacgttgatggacgaagcagcatggctcgaagagcaaaaagagtga

SEQ ID NO: 145527 - DNA, 375 bp, Enterobacter cloacae
atggttttttcaggtgccgaaggcgcagtcattcacgtcctcgaaaacagtgatgcggtacataacatcgttgtttgtacgctgtgctcctgctatccgtggccggttctgggattgccgccaatctggtttaaatctgcacagtaccgctcccgtgtggtgattgatccaagaggcgtgctgaagaagttcggtactgagcttccaccggagaaagaaattcgcgtttgggacagtaatgccgaaatttgctatttcgtactgccgcaacgcccggctggtacggagaacctgaacgaagaacaactggccgcgagagtaaggcgtgattcaatgattggtacgggcctcctctaccggcgtaggcttcaataa

SEQ ID NO: 145528 - DNA, 174 bp, Enterobacter cloacae
atgaacaacacctaccctgacgacatccttctgctgaaacagcgcctgtccgaacaggaagcgctgaaccgcgccctgctggaaaagcaggccgaccgggagcgcgaaatagaccatctgcaggcgcagctggataagcttcgccggatgaacttcggcagtcgttctgaataa

SEQ ID NO: 145529 - DNA, 1875 bp, Enterobacter cloacae
atgagcacaatcaccccccactaccgtaacgtacagcagttgctgcaaagccaatccttttctatcgatgagtatcagcgtgagtacaagtgggagaaggagaacattgacgagctactgtctgatcttcagggaaaattctataactactacaagcagggtgatgaaaccagcgctataagtaattatggagagtattttcttggctctatcattgtcagcaaacgcaacaacaaaaattacttgatcgatggccagcagcgagtcacctctttgacattgttgctgatttgcctgtaccgatctgctgaggaacagaggctgccggtagcccaaaccttagccccacttattttcagtgacaacctcggtaaccccaagttcaacctcgacatctctgagcgacttcctgttatcaatgccctattcaagggggaagcgttcaatccggatggtaaggatgaatccatacaaaccatgtacgcccgttatagcgatattgaagcaaacgacttgatggcagagattggaaatgcattgccgcatttcatctactggttgttgacacgggtaggtttgatagagattgccactgataacgacagttatgcttacgccatttttgaaacgatgaatgatcggggtaagccgcttagtccggtagatatgttgaaggcatatttattggctccgattaaagagcaggatgcgcgactacaggccaatcaaatctggaaacagcaagtcctggaattgatctcctggggaggggagcacgaaccggagcgagatgccaactgtattaaggcgtggttacgagcacagtacgcagaaagcatccgtgaacgtaaggcgggagcggtcgataaagattgggagttgatcggttcagtctttcaccgctgggtacgagaaaacaactctcgcctgggtttggggaaagctcaggaaaatcagaatatgatggctgtaagctttccattttttgccaaagcgtaccgacgtatcctaaacagcagtaagcattacactccgaagttacgagcggtctactacaacgctcacaatgattttacttggcagaatacggtgctcctggcatcgttgatagaaactgacgacgatgagacagtggaccgcaaactggcggtcacagctacttatttggacatctggttgatgcgtcgagtagtgaattatgtccgggttggatactcaagtgtgtcttacgctatgtggttattgtgccgggagatcaggcgtaaaccgctatcggagttggtagctatcctccagaagaagttggcagatgatgatgttacgttctccggctatgcagtaaaaggacgagcgggtattgatggtttagggctcaatcaattcagtcgccgttatatctatcatttgctagcacgactgacagaagcaactgagatcggcgcagggcgtactgagacatttgatcgattggtggaccgtactctcaagaacccattcgacatcgaacatatctgggctgatgattacgaaatcgtgaaagatcagttcagtactgagcaggaatttcaagattggcgcaatcatgttgcgtcacttttactcttaccagcagatgttaaccggagcctgcaggacaaaccgtttcccctgaagcgggtgcactatgccaaacagaacttctttgccgcaagtttggactccagtgtttacgaacatcagccacagtttcagcagttttctatcaaatatgagctgcctttcaaattcgctgaggtattcgataaagcggaacaacaggtacgccggaaactgattgcgggattagtagaattaatttggtcaccgaatcgtttatatgaggccgcccatgtctga

SEQ ID NO: 145530 - DNA, 1938 bp, Enterobacter cloacae
atgtctgagcaaccactacagaactcactttttgaggacgattacctgctacgggagcttggacaggtagcacatgttccgcaggtcgctttaacagagttagttgccaacgcctgggatgcaggagcgtcacgagtggacttggttttacctaccgaaattggtggattattaactgtgacagacgatggtcatggtatgacaccggagcaatttaaaaagcgctggatgactttgcgctacacccgcgagaagtatcaaggtttcaacgtagagtttcctgccgaacgaacggcccgcccgcgaaaggcttatggtcgcaatgatattggtcgccatggcttgctttgttttgctgacgaatacgaagtgaaaacctggcgcgatggtattttggcaaccttcattgttggcaccggagctggttcaagcccttttgtgtgccgaagtgagactgaggagaaacacataggctgcggtacacggttgcaggtacaggtaacacgcaagctgcccgatgccgatgaaatactcacagtattatccgcccgcttcatccatgatcctgagttcgaggtgcgcgttaatggcaagtcgcgcccctttactgagattaatgggcgaataagtgaagaaacactgtacctcagtgctggacgtcatgccaaagttgttgtcatcgactcaactcgtttgaatcattcttctttgcaccaaggaatcgcattttgggtacaacacagattagttggaaccccgtcatgggcggttggacatatagccaatttcgatggacgtactcgctttgcccggcgttacaaggtaatcgttgacacagaaggtttcgaatctgatgttgaacaagactggacagcatttcgtgccactgatgccgtaaatgaattatatcaggctacagctgagcatattcgtgaggttgcacaaaggcttgctgtagaatttattgaagttacatcagaggacgctctgatgcaaaaccgctcagagttagcaaccttgggccagggggcccgtttgggtgtggctgaattcactacagcggttgcccaagagcatccgactgtctccccagaatttcttgccacagcagttaaggcgcttattcatcttgaaaagaccaaaagtggagccgcattactggaaaagcttgctactttgcagcacgacgatatagagggtttagataggttattggctgaatggacagtcaaggacgccttgcgggtccttgatgaaattgacagtcgactcagcgtggtagaaacaattcagcgtttggctgatgatcctgaaacggatgagttacacaccctacatccgttgattttgcgttctcgttggttgtttggtcctgaattcgaatcgcaagaatattgctcgaatatgacattacattccgtagcacgcgagctcttcaaaagccctgatgctcaatttataaacgagcgcaatcgtcctgatattgtcattttacctgaaaaaacaacgtggcaaatgactggcatcgagtcatttgatccagtagatgtgtctttagttcaaatgcaacaggttttggtaattgaactgaagaaaggcggatttgagctcacaagaaaagaggtgaatcaagctgatggctatgtacaggacattgctgcatcaggtttgataacaggaacaccatttattaacgcttgggtcgttgggcaaaaggtagcggctggtgttgcccgtgagaaagttgttggtgatggagaacgcaatccgtatgggagagttcgcgctacgacttttggttctttggttggaacagctaatgctcgattgatgaaactacgccatgttttggcagacaggtacgaaagcacatctacagatgcccttatcaatcgagtgttatgccaacccgttcagtcaggcttgaaatttaaataa

SEQ ID NO: 145531 - DNA, 1407 bp, Enterobacter cloacae
atggccgttaatcaggcaaaaatatttgaacaactcgagcaacttacccgtgaactagaccgggatgagttcatttatggatttatggcagcctttgacttccctaaagcaacgatcacacaggttcgacaaggcagtagccgtaatgttgccaaggaaactggtcatgttggtttgaaaaataaactctattttcaaagtgtcaatgacaaagaagaccttgatgaggcttttgagttacgtatcgttgatccagtcatagcgaaaaacaagatacgttttgtattagttactgattatgttagatttttagcgtgggatacctgtagtaaagagagactcgatattgagctagatgaactttatagcaactatggctttttcttacctttagctggtttagaaaaggcaattataagtagtgagaaccccgcagatgttaaagctgcagagaagatgggcaagctgtttgatctcattcgtgtccacaatgatctcagtaaaccagaagatattcatgctcttaacgtcttcctgacacgtttgttattctgtctgtttgccgaagatacaggtatatttgaaccagctcagttcacctctgccatcaaaagttacaccgaggaagatggtagcgatctcgataccttcctgtatcaattattcaccgtccttaacgcggctccagctagccagcaacgacaaaagatacctactcatttagcggcatttccttatgtaaatggtgggcttttttccactgacgagcctattccagaactaggcaaaaagggccgtaaaatactgcttgaatgtggcacgatggactggagtgaaataaatcctgatatctttggcagtatgttccaggcagtaattgatgtagaacaacgtagtcgcttgggacagcattatacttcatatagcaatatcatgaaggtgataaagcctttattccttgagccgttagaagccgaactagataaacaacgccgtagcgctaaaggtttaaaggctctgctggttcgtctgtctgagataaagatatttgatcctgcctgtgggtcgggaaattttctaatcgtatcttataaagaattgcgcaagctggaaatgaaagtcattgaggccttaaaagaactagagcctcaagggttttcaatgagtggattacatctctcacagttttatggtatcgaaattgatgatttcgcatgcgaaattgcacgcttatctctttggcttgcagaacaccagttaaacagccagtgggaacaagcattcggtttcgctccaccagcattacctttacgtgaaagtggaaatatctgtagcgggaatagcttgcgattagattggcatagtgtgtgccctaaaggcctagggaaggtgcgaacaagtccctga

SEQ ID NO: 145532 - DNA, 237 bp, Enterobacter cloacae
atgtcacataccatccgcgataaacaaaaactgaaagcacgtacaagcaagatccaggggcaggttgctgcgctgaaaaaaatgcttgatgaacctcacgaatgtgccgctgtactgcaacaaatagccgccatacgtggtgccgtgaatggtttattgcgtgaagtgattaaactgaacatattgttcatgaaagtgaagaacagaaacgagaagaagacctggacgttgtgctga

SEQ ID NO: 145533 - DNA, 288 bp, Enterobacter cloacae
atgattgatttatacatccatacagcacaagcgttaagccataccttttatggtattccatactttttgtttaacgtagttttatctttagctttcacctttttggttgttttaccttttggcaaggtatctcaatctggtaagttccagcatgtaagcactaataatgctgttttcgctaagttagttggttttccacttttgattggcgtgttgttaacatatggtatgactctcatttctttattgagtgtattcaacaagattttcgatttaggctggttctaa

SEQ ID NO: 145534 - DNA, 1182 bp, Enterobacter cloacae
atgtgtatgaatcctttcccgcagcaaaacaaaagctatcaattctattacgatgaatctaataacgttcgtaaactatatctttccaaacaaattgatggttataatattgaccatgatccagacaagcacaacagcgtaaacttcgtgttagccggtgttgctcatactggttcctcatcgagtgctgactttgatgatttacgccagcgcatacagctacaagccaacgccaaagagttcaagctgaaacacttagccaaaggcgacttcctgactatgctcacgtctaagaagctcacagcgttctttgagtggcttctctatggtgatctatacctacactatttccacctgaatatggagtactggggatacgtggacatcattgatgattgtatcctgtttggacgtgagaagggcttcatcccggaaatgagtgatgaacagctctatggctacatgttggcaaacaaggacgctctacacacctacgttaaggctaacaaggttcccttcatccagttcctaaagtcctatgacttcccatacatcgaggggcgggagaaggatttcatacaagggctatcaagccagatctccactcattgcgtaaacctctatacagctaccaataaagatgatttccagctccggttagctcatggcctcctgcagctcctgatggcctgctctgaccaaaacatagatgatatgacactcactatggatattagagatgaaccgcctgcagacgacgacaaccgccttgttgatggttttgctatgttctaccagaaccgggcgcaaatgttcgaggcttccagtcatatctttgacatagagaaagtagtggaagcagatcttgaagatgcagcaaaggccaaccctaatctaacgcttaattactctttcgctgattcaaagctaaatcctctggttcaagtgagtgatgttgtggctggctttatgcagcactattttgattacctcaatagcaacagctatgaacagattaaaaatgacagaaacagccttaacgataaacaaagattaaatatggagtttttacggctcctgataaacaaatcccatgataacaatccaacattattacattatgtcatgtcagctttagagcatgaaaaacataaagcatttacttacccggatgaaccataa

SEQ ID NO: 145535 - DNA, 648 bp, Enterobacter cloacae
atgggtaaacagtataaattagttagcattaatgatgttttagaaaacgcagcattacaaacaaaagaatataacagcaagcaagaatattatgatgatgataaaacctattttcaaatgttccatgataatgctgaaggtataataaaatccactccatccacatctaaatacacttctgatgaaacaacaggtgatttagttcttgatcttggcaataagaagattgatatatctaactatacagaggaagattacaaggctttatctgatgatttatcacatgaacttgccgcaaaagaaatagaagatactataaaaaccgatcctgaactttctgatttgaatagaagattatcaaatggcgagatttcaattgataccgatagagaatatgcgtcattaagtgatagtaatggtgagcttgttttttcaatagaatctaataaaaatcataatccttctaaatctttaaattctgatgagggattccgttttatagcatgggatggtgaatatggcggtgatcagcctacattaagtgatggtttaaaatccgcacaatcaaatatccagacccttgaagcagaggcggcattagagatagatgaaccagaacaaaaatcaagatcatcatacagagcataa

SEQ ID NO: 145536 - DNA, 1968 bp, Enterobacter cloacae
atgatgaaaatacttggtgaaaaatcaaaaaaaggggtaataagtgatttaaggcattctgagagtttcaaagaggcttctcacgatggtgctttactttatgatccagtatcaaagacatttattactgctgaaaacagtaaagaacttattgataaatacatcggctatcgtaataccgaaacaggagagtatattgatggtttgattaaaccagaagactttccaagcgatgagttatttataaaattacaggacagaccgggatataacacgaaaagaagaataggtgatggtgaatctgatgtagagtttactcacttgttaattcaaatccctgaaggaactccggtagaaaaatggcctgacttcaaaaaagaagttattgaagctttcgcacaccctaatgagtggtataagaaaggtaaaggtggtggtcgttatacgccaactgttcatattggtgattgttttgtagctgcttctggcactcatgttagccaagacggtaaaagtgctcatttccatatgattgttggttcacgaactttaaataacaagaactactatggaatagaccataatgatcagccaatcatcctaccaaataatccagactggagaagtattacaagacgctctttacttggctcagaagctgaatggcgagaactaaaaagaaaacgcattaacgatgcacttgaagcgcttggacttccaaaaactcattggttaaataaagatgagaagatggatgaaagtaaagctaaagctaaagatgctttacaggatgctattaaagatgaagagcaagaagaattaaattcagaattagaaaatcttaaaatatctaaagagcttgctgtaaaagagttctcagataaagatattcaggatgctgaacttcataaaagtatcattagtgggcaaaaattacttgctgatatttctaaacgtgccgaagaaaaacttgccgaggcttacagggaaatagagcttgttaacattacacgttcttctgttgaaaatgctattgccttagccaccataaaacagaaacttacctctactgaacagcttttagaaactacagaagcaacattaaaagctgaagcagaatcaagagaagcttttgagaaacaactcaatgatacaaatgttgttcttgaaaaattaaaagaagaacatgaaaacctcaaaaccaattatactgaaattactactcaatatgatgagttagatactctttattccactacagtagcaaaacatgaggttgagatcactaacctcacgactaagcatactactgaaataacagctaaaaatagagagattgaagagcttaagtctactcatgaaagagagcttcaggaacaagaattgttctatgaaggtgcgttagaaaatcagcaaaaaacgtttgacaatcttttagctgataaagaagaagaaataaaacagcttaaaactactcatggtaatgagcttaaagaacttaacgctattattgttagcaaagataccaatattgcagatcttgaaagaaaaaatacagaactggaaaataatcttgctactctgaaaacagagaaagataaacagcgtaaagatttcgatgatttaattgaaaaacttaaacaaggtcatttggaagctatcgaagcgctcaaagcttcaaataaatcattaaccgatgaaataactaaacaagttgctgatgtaagtaaactgaaaaaagagaaggagcaacttcaaactgaaaacaacggtttgaatgaacaactcaaatctgttcaaaaagaaattgaagaacttaaatccgacaaagcgaaattagaagttgataataaagacctgaatgacgctctaaaggtttatgaagatgataataaacaacgcttagaacaagctaaagatagcaagaaagataataatcctgaccctaagaaacctaaaaacaaataa

SEQ ID NO: 145537 - DNA, 579 bp, Enterobacter cloacae
atgatgaatagaacagaacaagcgaggatggctatacaatccagaaaagaagcagaagcacaggaaccacagccagaagttgaaataaccgctacaacctcaaatgttgaggttgattatggttcattgcttggatatgtctggaagaacagaactgacttatcaaggaaagaaaaaattattttcagacactcattaccatttaatgacaataaaacacttattgttgaagaaggtataaacagttattcactatatggcgatgagaattttacttgtcagcaggtaaatatgttcattgattattttggttcaaagcttaaaaagtggggttgtttcaagccagaatcatataatgatgagtttttatatttctttttcaaggaatgtatcttaagaaacttacctgtggcagtatcaatattcaacgttgatcaaaataaacagcttgaagtaataaaagatgtattaaatgacattcaaaatgagtatggaaatacagccccgaacaatctttctaaaatctatatagaaaactacgtttataactggaagcgaaatttaaaggcgattgcttaa

SEQ ID NO: 145538 - DNA, 2127 bp, Enterobacter cloacae
atgaatatgagaacaatcaaaagtgaactatcaactgatatagtttaccatgaagaagaacaatataccgagaagcaactaatagagacttcttattttgctgctcgtgattatatcattcacgaaacaggtatatataaattagcaaagagcaacccagccaaagacaaaaaagctaattactactggattaaaattacagactattatatttatcctgttcagattctatccacagtggatttagaaggcgataacaatgatgctaacaaagatattaatagcatgtatgttaatgtagcttttaaaaacatccgtaatgaaaagaaaattctttctattccactcgaccaattttctgatctcaaatcatctaagctaaaaaaggccgggtatcttttaccttacagcgataatcagcagttaaaagagatacagaaagcagtgagcaccgtccttgctactgctcagagtccttataaacgtttggatggtaaaatcattgatgatgaaaaccagctcattgattgtttacctgcttacacaaagcgaggctggattgttgatagcctgatacacataagagaaagccatccacaattcgtaggtgtgtccaagaccagaactaaacgtgttggtaatgcttctatacagatcaccgtattccaagaactgattaagtcctcacgccttgcaagcatatttatatctgttgcttttgcttcctatacaaaggggctgatacgtaaaacagccaacttctcacctatctacaacattttcggtgagaagggtaaagggaagtctacattagaggccatgatagccagtattgagggagcgcctaaccgtgagtatggtcttatcagagacagtaagaccacgttccccggactcgaagaactcttggcatcttacaccaatggctttttcgtcattgatgagattgatgatatgttccgtggtagcgccagtgatgcgatctctaagctcatgactattgctaacaatggtgggcgttccaagtatgataaagatacagaagtttcagaaggtaaaatgtggaacagtatctttttcactaccagtaataaatccctttatgaactaacaagaggggatatgaagcaaagcgccattgactcacgtatctttgagtttgacgtagaagatccagagataaacatctttggtattaacttagaagaagggcgtggtgatgttgttgaatggtggctaaaccagcttgaccagaattttggtcatttatacccccttattattgattatatcgttaagcatgtagatgagttgagaactaatatttatgcttatgagggtgagttaataaatgaccctaactataaaatcattcatgatgaaagaagaaccattcagacaatagcactttcaaaaattggtgctgatattgtgggagctattcttggtgaagaatatggcatgatttgccatgaagctattgatatacacaaatcaagattctcaaataaggacattcctcaatttgatgtaaatgagaaacattgggataatatggacattctcaaactcatgatcaacgccaataaagcttcttttgtttgggaaacttacgcttattctgatgatgattcctctaacagagtagcggctcaaaaatcagaagcgaagcgttattctgatatggctcagtcaaaaggtaatgttttaggtattattcatttgaatagccctatggaaacaccaaatgattttgatggttatgttattttaaatacgatgggtgatgaacacctaagacgttcattcaaactcgaaattacagagcttgtagcttctgctaagaaacttgaactctatgatactaagcgagtcaggggagcaaaacaattgcttcttggttcaacatctacccgtgaaaaaacatttattcttaagaacagacctgttgtgattgaaacagaaagcgaagaggccaaaaatgcgcttcttgacgaagcttttattaacaactctattgatagtaaagctgatcttgaggaaatcattaagtatgcgcacagcaatgttgatacagtagtagatggagaaccattagagttagacgatgattttgtgcctttttga

SEQ ID NO: 145539 - DNA, 330 bp, Enterobacter cloacae
atgaaaactctacctgctacaatttcgcgggcggcgaagccctgtctgtcgcccgttgcagtctggcaaatgttacttactcgtctgcttgagcagcactatggcctaatgctaagcgacacaccttttagcgatgaaaccgttataaaggagcatatcgatgccggtatcactctggctaatgctgttaattttctggtggaaaaatacgaactggttcgtatcgaccgaaagggattttcgtggcaagaacaaaccccgtatctttccgtagtggatattctgcgagcaaggcgctctagcggcttgctaaaaactaacgtgaaataa

SEQ ID NO: 145540 - DNA, 237 bp, Enterobacter cloacae
atgcctgaatctcaattactgccgtcgggttcattcactcgccagcaggccgaagctgttacccgccgctatcacaacatcgccattgaagacgaccagggcagtcacttccgtctgatagttcgcgaccccgaaggccggatggtctggcgggcgtggaactttgaaccggatgccggtgaagggcttaaccgttatatccgacagtacggcatcctcagaacatcctcctcctga

SEQ ID NO: 145541 - DNA, 864 bp, Enterobacter cloacae
atgaaaaattctgacggcctgctgcccatgcagaactcgctttctggtctgccccagtgggtatctgaacgcattctgcagcagataaatcagttaacccactacgagcctgtaataggcattatggggaaaaccggcgcgggtaagagcagcttgtgcaatgccctgtttgccggggaggtgtcgccagtcaatgatattacagcctgcacacgcgagcccttgtgctttcgcctgcagctgggaaagcgctatatgaccatcgtggacctgcccggagtgggcgaaagtggcgttcgcgatagcgagtatgccacgctgtaccgtgaacaacttccccggctcgacttgatactgtggctgattaaggccgatgaccgggcactggcggtggatgaatatttttaccgacaggtgataggtgaggcataccggcataagatgctatttgttatcagtcaggcagataaagctgaacccaccagcggtggtgataaattatccactgaacagaaacaaaacatcagccgcaaaatcggcctgttacatgagctattccaacctgtaaaccctgtctgtgcggtgtcggtacgtttgcagtgggggctgcgggtgatgtctgaacggatgatccgttgcttaccacgtgaggccagcagtccggtggcagtacagcttagtgctccgcttcgtaccaatgccgttaataaaaaagcgcgtgacgattttggtgaaacggtcggctcggtactggacacaataagttccatgccactgataccacccccaatacgggcaatcattcaggctgcacgcgacaccgtggtatcggtcgctcgtgccgtctggaatttcttcttctga

SEQ ID NO: 145542 - DNA, 285 bp, Enterobacter cloacae
atgatgtcaggtcttgatggtggaaattttatccttagctcaatggctaaggaaagggtcagatcaggtctacttgatagagcaacaatacaaggctctaaaggcgagtataccgtgatttttgatggttcagagtgggaaggtaagccattagtcttatgtagctcaagacagccatacgaagcacggctcttcaaaagcattgatggtgcggtagccgaactaatgcgcataggtttaagtgaagcttcaatcaaaaacaccaccaaatcgaacaataaataa

SEQ ID NO: 145543 - DNA, 237 bp, Enterobacter cloacae
atggtaaacttttgcttttgttacgagggtgaatacgagagtcttacattggtgtgctactccagaaatgacaaaggggcttatgccccttgtttcgccattttgataaaatcttttatcactttaaacattagccagttcagatttaagggatttcaactcgttttcaattttagcaatcatattcataagcgtattaaccttgtcttctttactgtcgtcttcaacatgctctaa

SEQ ID NO: 145544 - DNA, 477 bp, Enterobacter cloacae
atgaaaatagaaaacatacaagaagaaataaaatcagcatttgaagataaaagaatagtagttgtgcgtggtggaaatatgtctcacagagatgagattatgttaggcttgaaggatttaaatattgaaggaatagataacatagttttctataacgattctaatattacaaaagctgctctcagacgagtaatgatggaatctataaacaccttatttgtttttgaccatctcgatattagtatatctgaaaaaacttatgacaagcactttggcggagaggtagatcaaataagaggtataggttatagctattttgctatggttaacgataacagttatgcaaatcgaatatttgaaaagccatctaataacaacaaggttttatcatttacgaatgataaggtttttttaagtccatatcttgaacaacacacgaaagaaaactatggcatagaagttatcacaataaaataa

SEQ ID NO: 145545 - DNA, 255 bp, Enterobacter cloacae
atgaaaaaagattatgagcacttagaattatcggaagaagacgatgagatcttacttacttgtgaggatgatgattttgaaaatgaatccagtaaggaaatgacctttgatgatttcattaataaacagtttgatttcatggcggcttttagtcttggttttcttatggtgttggcgttcattatatacttgccgttcttattattatcaacaaccgggtttgctttttacaagatgctcaagcaagtattttaa

SEQ ID NO: 145546 - DNA, 1071 bp, Enterobacter cloacae
atgaaaagaacagaaaagtattttgaaagaaaagcagaccaagtattaaaggcattatttggaaagtgtaatttagttttattaacaggtgatactgttttatgcggtaaagttgtttctgaattgaaagctaaatcctcattagaaaggaaggtaaaaacacccaaacaaaacacaaagactatttacaatcatagatcagagttgatttttgaatatgatattgaacatcctaagttttcagactgtaagagtgttgaagtagtattcattgaaagagctgattatacctatagagatggtgatataaatatagctcttgatgctttaaaagataaagatataaaagttgttttaacatccaataaaagcagaaaagaaattgcttacctcttaaaaaatagacctatgaagactattgaagtcaactaccttgaaaacaaagcttctaagagaacagcagcaaacaaagaagctatagaagcatttgacacggtagaaacgttccctgatgagataccactcccggaagtagataacgatgatgtgttatcggaacaggcaattaatgacatgcttaacatgtatactgaaaaaaataacactgagactgatgatttattaaatgagatttcatatcttaaatctcaactaaaggaagaagaggaaatatctaactgtggaagaaagttattagaagaggctgatgaatttatacagggattgattgctgaaaataaaaaactaaaagaagaagttaaagaacattccattgatttattcagattagaaatgattaatgatttgaatgaaagtgattctactatgtataaaaaagaatacaatcaattaaaggatgagaaagaagctttaacgttaagaatagaaactctggaagaggaaaagaataaagcagatgaggattatgattacattgttctcgaaaacatgactcttcaaagtgaaataataggtttagaaagaaagattgaagaattaaaaaaagagcatgatgaaaagattaatagtctatatggcgagttagagtatattataaaaaagaagaaataa

SEQ ID NO: 145547 - DNA, 705 bp, Enterobacter cloacae
atgaaaaaaacagatgaattacttaaaaagaaactgattaaacagattcaggctatcagtgataacacacacaaaagcttttcagcctttgcttttgcggcagctaccgccgcaagggatacaacccggctttatgtctctgagatcgaaacgggtgatttcttggtaaggccggatgtatacgcaagaacaagcaccagtgctatctgtgatgccataatgacatacatagagctggtatcagtctctgatccgtatacagacctgttaagccctatctacagtgaactcatacttgatggagcgccacaggccaagcgaaacgggcagttttacacacctgattctgtagctacagccgttgccgaaatgatggggaacagagtcaacatcatagagcttgatatgtgttgtggtatgggagctttatcactcgcaagagctaaatacaaactggagcaaggccagcagataaccaagatgatttgcatagatcttgatgatgtggctatagcctgttgttttgctcagttggcgtacaacaacctaatgaatacggtgatccactctatagagctatgctgtagaaacgctatcactgattacaatcaaggttatgaaacgacaatcagttatcgtttaaagattaatgaagctaaaaaataccgtcaagaaatggaatatttagatttagcaacagggtga

SEQ ID NO: 145548 - DNA, 696 bp, Enterobacter cloacae
atgaaaaaaacagataaattacttaaaaagaaactgattaaacagattcaggcaatcagtgataacacacacaaaagcttttcagcctttgcttttgcggcagctaccgccgcaagggatacaacccggctttatgtctctgagatcgaaacaggagatttcttggtaaggccggatgtatacgcaagaacacgctacagcaagatctgtgatgccatagagacatacatagagctggtatcagtctctgagccgtatacagacctgttaagcgatgtattccatcaactacagcttgattacgcaccacaggccaagagaacaggacagttccatacaccacgttcgttagctaatggcgttgcgagatttgtgggtaatacgttctacaaagcagaacttgatttgtgttgcggtatgggaacgttagctctggcaaggggaagatacgctctggaacaaggcaagagtatttgtgtaatgaaaggagtagatatcgatccaacttctatagcagcgtgttttgctcagttggcatacaacaatctaaaaaatccggtttttcatttgatagatttaaagtgcatgaacgctgttatgtattatggcgatgaatgggatattcactatcgaattaaacttgatgataaagaagtagataataacgataagtgcttagatatggcgataggttga

SEQ ID NO: 145549 - DNA, 462 bp, Enterobacter cloacae
atgaaaaaaacagatattattttaaaaaatgagcaaagcctcgttcttaaaatagcaaccataacaactaatatgttggcaaaatacatttatgaaggaataaaaaaacttgatggtgagagtttagctaaatatgaagacttagctgggtttcaatctcatgaggaagatatagatgtttatgaagttttagaggatatagaatcatatcaaaatgacgttatagattcattagaaacagatagtttttgtgaaaatataataactaacttttatgggaaaaatcatgaatatgaagcagtccattttgacacagaagaagagttaaacgagtttcttttagaagaagatctatttatcattaatgactctttaattattaatgatgtttccgatgatttagatgcttgctcacaagttttggaaatgcttgaagctgataaatgcgataacgatgaataa

SEQ ID NO: 145550 - DNA, 456 bp, Enterobacter cloacae
atgagttatatgtcattgaatgttgtaagcatccagattaagaaagaaaatgctgaaaaactcaccgcttgggttaaagattttcaaaacatatgtgaatatggaagtgcatcaaatatagatattattaaaaataataatagagaagaagatgctcattatataaaaacgaaaagatataggaaagaatggtttgatattttctttgaatcatctgatgaacttaatcatttctatcaagaaattttttcagaagggattgcaaggatgtttgattgctatgtaaatattagctcaataacatcttggtgctgtccttatcacgagtcatacactatgcatatgaataactggtatgaaccgttttataagaactttacaggagatgaaagtaaaagatggcctcggcatatacatatgtattttagcgattgggttgatctagaaaatatttag

SEQ ID NO: 145551 - DNA, 420 bp, Enterobacter cloacae
atgaaagaagatattttgaacgcgattgaaagtaaagttagtcccttgataaaagtttggatgaatgatggaaaatcatcattaaacataaataaagagagatacataaaagacagcattgatagtaaagaagatgttgatataaaacttctcgctgttaagtatcttttacttgagtatgttaatgaatatgctcctgatgattacattgaagaaatgacagaaaggttaaatcgcatgtttgatgatgtaaaccctatgtgttctcttttttatggtgtttttgatatcagaatggttagctattcattcgaatattatctttctcatttctattacatgctgatggttattagcggtgatagtgaagatgtagattatgtgatgaatcttattaaaaacaaagaggaaataaaatga

SEQ ID NO: 145552 - DNA, 423 bp, Enterobacter cloacae
atggatataaaagaagcgttaattacagcaataaaacagaatcgaggtgatattatctatgatcacttcatgtttcaaacattagaagttaaacttaatgcccttatttacttaatcagggtattgaaagaagacgaacaaggtaatcactttatcaatataatgattcagttaatagcaaaacctgaatatctgaatactgttgttgatacattaacgcctcttcaagaggctgttatacaggataaactttctttctttaacttcctgttaatgaatggcgcttcacttgaaaagcgaaataagcaaggtttgagcgggtatgatctcatattgaagattggtaatgaccgttttttagattttatcattcagtatgaaaatgttctgacagaagtttataagtccagaagatacaaatag

SEQ ID NO: 145553 - DNA, 363 bp, Enterobacter cloacae
atgaattctataaaagagattaaaacaatagctttagcgcatggaataataaacgacattagaaaaggcaggaatcacaatgaagttttcgcaagttcagaaagaatagatgttgattatttaactaaatatttaagcggcaagcttggtaagaaaataacaacattcaagaaacttgatggcatactttcatatagcaaaagaaaaaatgaaatagtagcgggttcagtcttcttttacgctcctgaaaatgatcaggacagtgagaaagaagctcagttcttaaagatgttaacgttcaagttagctcaaagtaattcattcttcatacattttaaagaccaaaataaaggagggttataa

SEQ ID NO: 145554 - DNA, 2913 bp, Enterobacter cloacae
atgtctaaagggttcacattcgaaaagaatttacctcatcaaaaggctggcgttgatgcggtgatgaatgtctttgtatctgccatacctcatcagacggataatgttgctattcgcctgttatctaatccagaactgaatctgtctgaacagcaatactacaacaacataaaaaatgttcaggagttcaatggtattgagcattcaaaagataattacgatgctaaaagcaacgtcattgacgtttctatggagacagggacgggtaaaacctatacctacacaaaaaccatttttgatctgaacaaatcttttggcgttaataaatttattattattgttcctaccctatcgataaaggccgggacagttaactttttaaaaagcgatgctttaaaagagcattttagagatgattacgagcgtgaactaaagacttatgttgttgaaagtcagaaaagctctggaaaaaacacaaaatcgtatatgcctcaagctattcatgattttgttgaagcaagtaattttaacaagaaatatatacacgtccttgtaatcaactcaggtatgattaactccaagtcgttaactgacacttatgatgtgggtttgtttgataatcagtttgatacgccatttgctgctcttagtgcggttaaaccattcattattattgatgaacctcataagttcccgacagctaaaaaaacatgggaaaatattgagaaattcaatgctcaatatatcatccgctatggcgcaacctttagtgaaggctataaaaacttagtttatcgtctcaccgccgtagatgcattcaatgaagaccttgttaaaggtatagatgcttacattgaagatatgattggtgatggtaatgccagtctcagatttgttaaatccgatgggaaagaagccacttttgaactgaatgaaaatggcaacaagaaaaaattcaaattagcaaaagatgaatcactatctaaaacacatagtgcaattcatgatttaacgctggatgccttgaacaagagcacggcagtgttgagtaatggtattgaactaaaaattggtggttcaataaacccctactcttacgatcagacgctcgctgataacatgatgcttaaagcagtcaaagaacattttaagttagaaaaagagtatctgacacaaagaccacgtataaagcctcttactctattcttcattgatgacattgaagggtatcgtgatggtaatgatattgccggaagcctgaaaactaagtttgaagcgttcattttggcagaagcgaatgaactgttaaaaacagaaaaagatgagttttacagaaactaccttgaaaaaactgttaaggatgtatcttctgttcatggtggttatttttcaaaagataatagtgataaggatgataaaattgaacaggaaatcaacgaaatccttcatgacaaagagcgtttattatctttagataatcctcgccgtttcattttctctaagtggacattgagggaaggctgggataaccctaacgtattccagatttgtaagctacgttcgagcggtagcaccacatctaaacttcaagaagtagggcgtgggttgcgtcttccagtgaatgaatacatgtgccgagtgaaagatcgcaattttacactcaactactatgttgattttacggaaaaggattttgtcgattctcttgtcaaagaggtcaacgatagctccttcaaagaaactgttccaagtaagtttactgaagagcttaaggttaaaatcctaactaagtatcctgagctttcatccagaacgctcatgaatgaagtttttgatgatgaaatcattgatgataatgacaactttaaagattctgatgcctatagtcgcttaaaagccaaatatccagcggcattccctactgggttaaaaccaagcaaaatcaaaaaagccactgatgggaaaaaacgcactaaaatgcgtattggcaagttcactgaactgaaagaactttgggacctgatcaatcagaaagcagttattgagtacaaaataaacagcgagcatgagtttttatccattttcaaatcattcatgcttgaagaagcagatagatttactaaatcaggcgttcatactcgcatagataggatttacatccataatgatacggcgatgtcgaaaagcattataagtgatgatgataactttgctaaactcaacacaatgagttatcgagaatttcttgataacttatcacaaaccatgtttgctaaacatgatactttgcataaggtattttgttatataaaggatactataaatatcactgactacctgaacattcagacaatcagaaaaattaaatctgggtttagtaaatatctgcttaacaattcgtttaacaaattcagtcttggatataatgttatttcaggatcgattcatcctacaaagttcactaatgaagaaggaagtcctctaaacgaggttttgtcgagtgatcttggtgtattacatgataatacgaaaccaccgttagattcttatctttttgaagaagttttttacgactcagagcttgaacgactcaacatcacagatggagagatccagtctgtagctgtttttacgaagataccgaagaactctattaaaattccggtagcaggaggatacacgtattcccctgactttgcttatgttgttaaaactacaagtggtgattacttaaactttatcattgaaacaaaaaatgtagatggtaaagatagtttgcggcttgaagaacaacgcaaaattgcacatgctcaggcattgtttaatcaaataagcaaaacaatcaaggttgaattcatgactcaatttgctaatgatgagatttatgagttaataaagaacgcacaagcttag

SEQ ID NO: 145555 - DNA, 1524 bp, Enterobacter cloacae
atgatttatattgatccgccatataacacaggttctgatgggttcgtctataatgacgatcgcaagttcacgcctgaacagctttctgagctggctggtattggtcttgatgaagctacacgcattcttgaatttactacaaaaggctcaagcagccatagtgcatggctgacgtttatttatccacgtttatatgtagctaaagaattaatgtgtgatgaaggtgttatatgcatttcgattgatgaaaacgaacattcccaattaaaaatattgtgcgatgaagtttttggtgagcataattttatcactgactttgtgtggaagaataaaaagggtggtggaaatgattctgttcatgtagcaattgaacatgagtatattttaatgtactcaaaaaataaaagtagtcttgagcgcttgtttgaaacgtacaagccagagtatttgtcaagatacaatcaagaagataatgaatcaaaatattattgggacacgtttaaaagaaaatcagggaaacaatattatccaataacttgccctgatggtacagtgctggaatatgatgataacggtaataagattagctggcttcgttcaagaaatagatttgaaagtgatttagaaaaaggagacgtcagattaatccaaaaggaagatggaggttggtccgtacaatttaaacaacgattaccaaaagggaaaaaaccaagatcaattctcattaatgaaactttacttgataaatcaggtacaactagcgatggaagtagtgatttgttagatttgtttgattttcatccattcgataatccaaaacctttaaagctactatctgatttgattaacatagttgtttctgatggcgattatgttcttgatttttttggtggttcaggttcaacagctcatgcaatcttagaattgaacaaaaatgacaatgcctatagaaagtttatattggtgcaaattgatgaaaaactgaaaaatgatgattttgcgtacgataaaggatataaaacaatctttgatattacaaaagatagaatcatcaaggccggagaaaaaataaaaaaagcaaatccagattataatggagatattggtttcaaaatctttgaaacagtaaatgatttccgtgcgaaaaatgaatcagagctaacactttctaaccttagtttcttcgatgatgttgtattgactcctgaacagtatgacaccttattaactacatggtgtgtgtatgatggtagtttgttaacaacaccaattgaagatgttgatcttgatggctacaaagcgcacttatgcgatggtcgtctgtatatgattgcgcctaatttcaccagtgaagcactgaaagctttacttcaaaagctggattcagacaaagactttgaccctaacaaagtcgtgttttatggcagcaacttcgaaagtgcgaaacagatggaactcaatgaagcactaaaaagttatgctaataaaaaatctattgatttagatttggtggtaaggaactaa

SEQ ID NO: 145556 - DNA, 924 bp, Enterobacter cloacae
atgaaaatttctctggtcgttccggtatttaatgaagaggaagctattcccatcttctataaaaccgttcgggagtttgatgcactcaagcagcatgaagtagagatagtctttgtcaatgacggaagcaaggatgccactgaatcaatcataagtgctatctcagttgcagatccgctcgtaatatctctgtcattcaccaggaactttggcaaggagccagccctcttcgccggcctcgatcacgcctctggtgacgcagttatcccgattgatgtagatctgcaagaccccattgaagtcattccgcatctaatagagaagtggcagtccggggcagatatggtactggcaaagcgttctgaccgctctactgatggcaggctcaagcgaaaaaccgctgagtggttctacaagctgcacaacaaaattagtaacccgcagatagaagaaaacgttggtgatttccgtcttatgtctcgggaggtggtagaaaacattaagctcatgcctgagcgaaacctttttatgaaaggggtattaagttgggtcggtggaactactgacgtagtcgaatacgcccgcgcagaacgcgttgccggaagcacaaagttcaatgggtggaagctgtggaacctagctcttgagggaattaccagtttttctactttccccctgcgcatttggacttatataggcctatttgtcgccagtgttgctttcatttacggggcatggatgattatcgacaccgttgcgtttggcaatgcagttcgtggttacccctccctgatagtttcaatacttttccttggtggagtccagttgatagggataggagtactaggggagtacattggaaggatttataatgaggtcaaaatgcgacctagatacctgattaagagaaaggacacaaaatga

SEQ ID NO: 145557 - DNA, 1635 bp, Enterobacter cloacae
atgaagatgaaggtctcatcaatattaacaattacagctattttcattctggtgctaattccgagtctgcacgtcccgcacctttctgacgactatttctatatggccattgctaatttgcatgaccagcttgggcactataaagagtggagcggacgaatagtcacaaacatattcagcgcttacatgatgaaatacgccagccatacggtgtatatgagccttaacgctatggctttcactgcaatagctgtgctgatttcttctattccatgtgcagtattgcgcggaaaattcaaactataccctattgggatggttgtaattttcactctcatgtggatagcaaaccctgctcttggcgaaacatcattctggttcgttggctctgctaactacctatggccgtccatgtatgtctcattattcatggtgatcgttgctcttcagaaagagaaaatggcagcatggaaattaccactcgcattagcaatgggatttctcgcaggttgctcaaatgaaaacacatctgtagttcttattctccttacaactggctatctggtatacacaagaaaattaaatgtatcttacccatatctgatagggttgttggctggagcagcggttcttcttcttagccctggctccgccaagcgctcactggtctttactgattggcattctctgtcgtttttagacaagctggaccttcagttgtttacgagaatgcctgactctcttacaggcttttggcaggtatacctagtaattatttttatggtcctatgccacgcaataattggaatcaaggaccgcaaaccgtttgttgcagctacggtgttttttatcgctgctcttatgtgcaatgccgccttccttgcgtctccatacatgccagcaagagcgtatgttggcgcgcttttcatgctcctgatagccacatcgtttataatctctgggtttgctgaaaacaattccaatattgcaaggttagtcgctcctggtgtggttttattgttctgtatcgtatactttattccatcttacaccttctttactcattctgttttaagcacatggaagcaagaaaagataagaatggagatgttggcagagcaaatttctaatggtagcaaagaccctgtaatccctaattattacttcccaaggcttctaaaaaccactgatggctatccagtttttcagaacccgtacatgctttaccattttggtgttaacaccattacagaaaaacaaattggattcgattattcagcgttaagtaagtgtaattatgttaaggtaggacagcgtatctttgatggcgttacacttgaaagtgtttgtcttttccatgataaaatttcaggtgatacgaaaatattatatcgcacagtaggcgatataaataaactgtttaacaatggatatgcgttgtactctcatgttttcatggaagacggttcgacattaaataaagataccgttgagcaagcactatttattgatggttactggtatacttacagcgacgctaaaaacttagaactagacaagattaagaaaataaaaataggaatatataattcaaaaactgtagagatatattctggcgtcatcgttgagccataa

SEQ ID NO: 145558 - DNA, 447 bp, Enterobacter cloacae
atgagcgcattagggcattttaataacattcgcactatcagaaaagaagcccatgagatgggctatgacaccttccttgagttcgctgaaaaggttcaaaccgttaaggatgagttcctaaaagaagcagaagaggaaaaagcgaaacaggcactggtagaagagaagcttaaggctactaccgaacttctccagtccgagggctttgaagtaagccttgaggccgtcagagcgcttctgttaggtcaaattgatacacctgcccctactggcaagggtaaaggtggtaaaggcgttaaacgtggttctgttgagccaaaatatgcgttcactgtagaaggtgaagaacagacgtggacaggccgtggacgtatgccgttagcgctgaaagaattgattgagaagggcgaagagctggaaagcttcctgatcaagaaagaagactaa

SEQ ID NO: 145559 - DNA, 540 bp, Enterobacter cloacae
atgattaaaacattaaacagaaaaaaaggattctcattattagaaatgttattagtatttgggattatatcagcgttgatagtgggtgttttcatgatttacccaaaaataagcgcaggacaaaaaatagataatgacataaagattttaggaacacttaacgcagggattaaaaacctatacgcaggatcagcaaactacaccgggctttcagtagatgctgttatcaaggctaagttagtgccggaagacttagtagatgaaggccagatatgggatagctggaacgctaacgttctcatagaaccctactatgacggtagcttttacatagggtttgagaacgtgtctgtagatgcctgtgccaagttcgtcactcaggctggttcaagcttcttcaagatagttgtagcgtctacagaggtgaagaacactgataacggtatggatctcaacatggcaacacttacagcggcctgtatcaacaatgatgatggttatggcggtagacccgtcacaatatacttttacgacaaataa

SEQ ID NO: 145560 - DNA, 312 bp, Enterobacter cloacae
atgatggataaattaaattgtttctttagaagtctttatgacactgagagcaaaaacggaaaaaaacttagagaattctcaatggtcataatgagattaggaatatggatgattacatacggttctttcagtgttttatttggtggttttttaggtttcgatttcaatacagacgtaattgctaagatgactgtaattacaggagttggaggtgttgtatttcttataggtttgtttattacgtttatatttaaaaaagatggcagtacctatgatggtaaaaccatcaagcaaaacaacaaaggagaatga

SEQ ID NO: 145561 - DNA, 123 bp, Enterobacter cloacae
atgggaacagatacaagagaaaaggaagctgaaacatggtctgagtttataaaagagtttttgaatgatggcggtatcatttacaaacagagagaaaataacaatcaaacaagtagaggttaa

SEQ ID NO: 145562 - DNA, 294 bp, Enterobacter cloacae
atgaaaaaagacataacaagagagttaaagaagttgggtttacataatggtaatgagtttatagcaaaagcggcgttaattgaaggagagagagcagaaggtatcttatccctgatagaacgcttaggtagacgcaaaataattcctgatgccgttaaacacggtttcaatcagattaaggcagcatacaggttatccggctacatcaatcaggccatagctgttatagcgtttaaagcctatgtgaatgaaccaaaggaaaattttaaggcagatatacactggaatatttaa

SEQ ID NO: 145563 - DNA, 312 bp, Enterobacter cloacae
atgatgaacgtaataaagggaaatttaatagatatgatgttggggttgtgtttgatggcttttggcttcattaccgctttaagcttaagcgatgatttcaagataaatcatagttggattggctctgtattagcaccatttgtaatatttggatgtgtaatagcaacatataattttgtcattctggcaataaaattaatagtagagctattagatttttatcctgatgtggagtctaataatgaagatataagtaaagccaaccatgatagaaaaagattaaaaagatcaaataagaaaaggagtttgtaa

SEQ ID NO: 145564 - DNA, 210 bp, Enterobacter cloacae
atgaaaaaggctaagtttgttttcaatatcgcaggaatgatgatttttaatatatgtgctgttattggctttctaagtatgttgaaggttgaaaacactcttagctactggatagcttctgttgtggttgggctattaacgatagtcgcatacaggaatgaaatatcaaatgagtttggaactaatcaaaacgtaaggggtaaattatga

SEQ ID NO: 145565 - DNA, 165 bp, Enterobacter cloacae
atgcggcaggtgaactacgtaaccaaacataccgagactacgctgaccggaccgaatgtcctgagcaagatcccactccctggcagcatcccagccatctgccagccattccccagcaagataaatcagccagcgaaacgcaaatgcaaccccaccaatgactga

SEQ ID NO: 145566 - DNA, 738 bp, Enterobacter cloacae
ttggttgtgcttattggaaccattccttatctcaggtggaagatttcgggaagtgaaaaagaacttttgatttttactttaatgttagttccggcaattctgttttcattcaagcttcttaaaatagaatggtttgcctggactcattatcccgttcgctttgacagaaaaaacagactggtgcacgtattccggttaaatggttcagcctacagcgttccctgggatagcgtttttttcaccacaggactgagccacagaaaagatgcgaacaaagactactacatcagcggtcatgtgctggcggaagataacaataccgtgattgacaccttctgtctgccggccacgcactcggacaggaagcagcttgaaaggcactgggagtttgtccgacgttacatggaagaagggcctgagtccgtcattcgggttgttgatttttgcctgcccatcgcaaaaaaacgcgagggctatcgctttggtctgctctatcttttatccggctttaacggcgcaccgttatttctgttcccgctcctgtttgtgctggcatttattttcagcgttccgcgctacctggcgatggtgacaagcagggtgcccgtctggcccgagagtattgagtcactgtgccgggttgataaagatgacccttatcgggtcgatgcttctggtaatcctgaacatccatggcgaaatcttttcaggaaaccatcagcaaacaacagggaataa

SEQ ID NO: 145567 - DNA, 621 bp, Enterobacter cloacae
ttgttcgcaccttccttagcgcatgaggaacttcctccgaatattgcgttggatctgattggtcgccgtcctgatattgtcgcggcacgtttacgcgccgaggcggcagcagagcaaatcaaacagaaaaaagccggtttttacccaagcgttaatctggttgcctttgccgggttccagtcactgggtattaacaaccttacccggagtggctcagcaattggcagctttggcccggccatatcgttgccaatatttaatacgcagaagctccagggtgatttgaaatacgccagcggtgaatatgacattgcggtgcaggtttataacgacacgttaacgaatgcacttcgggaagtgagcgatgcgctcaccagcagagcctcactgaaagacgagatgctttattcccagggggcagtcacgtcggcagaaaaagcgtattccctcaccaaacaaagatatgaaggaaaggttgctgactatctcgacgtcttgtcctcggaagatgaactggtcgcggcccgccgaaaattagccgatgtaaattctcgcgcctttacgattgacgtcgcattagcgcgcgcattaggcggcggatatacctcgagcaaacagtga

SEQ ID NO: 145568 - DNA, 1143 bp, Enterobacter cloacae
atgagtcattctgcagctattgaaaatcaaaatattgaatcatccgatatcaaaaagaaaaaaagaaaacgtttattctcttatctcgcattaagcatcgcgctggctggcgcaggctcgttcgcatactgggaattagtgggttcccgatatgttgaaaccgataacgcctataccgatgtcgagtccgctcagctctcttccgcgatcaccggtacggtcagtgccatcctggtcacggattctcaggtggtaaaaaaaggcgatgttctgatccagctggatcctactgacgcagagttagcgcttaatcaggcggaagcaaacctgaacctggccattcggcgggtaaatggatataaggccactgacacaaaactcggcgcagaagttgtggcgaatgaaaaagagcaaaaacgtctgctggcccaggttgatgccgcaaacgctgacttccagcgcgcgacggttgatctcaagcgacgcgaagccttaatgcagacgggcgcgatttcaggcgacgaactgacgcgtattcaaaacgtttatgcttccgcactggcaaacctgaatgccgctaaagccgccgtggcgcaagcagatgcggcaagacaggcggcggtgggtgcaagacaggcgaatgccgtgatgattgaggatgcaaataccgagaccaacccggaagttgctctcgccagagccaagcgcgatcaggccagactggatctggaaagaaccgtgatccgttcgcctgtcgatggcgtggttgctcgtcgccaggtcgagcttggacaacgcgtccagccttccacaccgttactgtccgtggtgccggtgcagcaaattcacgtcaatgccaacttcaaggaagttcagctccagcatgtaaaagtgggacagaaggtagaactggtaagcgatctgtatggcgatagcgtgcctttccatggaacggtagaaggctttgatggcggcaccggcgcagcgttttcaattattcctgcgcagaacgcaacgggtaactggattaaggttgttcagcgtttgccggtgcgcatcaaactcaatgctgatgagcttgcagcgcatccgttgcgggttggtctgtccatgaaagcgacagttaacttaaaaagtgaataa

SEQ ID NO: 145569 - DNA, 363 bp, Enterobacter cloacae
atggaaatgattttagtaatagcggttttctgtattccgattttctgtattatttcacaaaagattagcagcaataaaaatacaatatttagacagttagctttaggttatggagtggtaagtgccagtggtttattttttcctgcgctctatttatacagctatataatgatgaatttgtttggtgctcacgagtatcatgaattaaagaatgaattaaagcttgatttactaccatttttaaaaatctatttcaatattgaaaacccgcaaatcacaaaccttataatatttgggttgttatctttgatattatacctattacataggaaaacaaataaacttaataaaggagaagtataa

SEQ ID NO: 145570 - DNA, 228 bp, Enterobacter cloacae
atgaaaatagaacacacaacagtaatgatagataaatccttagatgatgcaataatggatttgaaaaggagagagaaaataaaaagaacaaacgataattttatagcaatgctcaaaggtgaaaaacatattgtatcttttgaagcggcacaagaagcagactttgaaatggctgaagctataatgagttattttaaaagtccaacaaaagcaaataacaacatttaa

SEQ ID NO: 145571 - DNA, 585 bp, Enterobacter cloacae
atggaaaaacaatttattagctttcaacaaatcgtgaaggagataaaagagcttgagttaaaaaaaaatgaaactatgtattttaatgagttcttaaacatactttatagagaagagttattgtcttatgacgttgaacagcatgaagcatttatcaagagcaatagagattacattgaatccttaaaaaacaagaggaggagatatcaatcaaggtttattattgttgtatatttaagagatatgtataacgagcttaagaagctgaacagatctttaggcttgacaacaagcaataaaaatattgagcttattgaagaatatgagtctatcagcggtcaggaaaaagaattagataatggtaaaaaggctgttttcttggttgatatgaagtataaaaataaaaaagagatcataatcagcatcatggacgtttacaagaaccctgctgattacagcccatatgaagacaggacagtatacagggaagtgattaatacgttcaggaggccagtagcttacctaaaggctctacagcgtggtttagaggctttcgatcagacaaaaacaagcggtatatactga

SEQ ID NO: 145572 - DNA, 564 bp, Enterobacter cloacae
atgacaaacatgatctcatatcagggacttgttcgcaccttccctaaggaaattggtgccatcattaatgttatcgatggtattgcgtttcagactaacattctcgcccttaacgcggccgttgaagcagcaagagctggggagcaggggcgcggatttgccgtggtggctggcgaggttcgcaaccttgcccagcgcagtgcgcttgcggctaaagatatcaagatactcattgaggcctcagtcagtcgtattgaaaatggctcaggcttggttaaacgtgctggcgactcgatgtctgatatcgtcaatgcagtgacccgagtgacagatattatggcagaaattgctgctgcatccgatgaacagagccgcggaattgagcaggttggtattgcggttcacgaaatggacagtgtgacgcagcagaacgcatcccttgttgaagagtccgttgcagcggcggcggcacttgaagagcaggccgggttgctgcaacagtctgtatcagtattcaggctccgggacgacaacctggttgtaccagcacagaaagcgatttaa

SEQ ID NO: 145573 - DNA, 189 bp, Enterobacter cloacae
atgactgtgttgcagaaatcccttccgaaaggggtcgaattattaaaaaatccaggtctgaataaaggcacggctttctcccaacaagaacgtcgtacctttggttttacatgtttttgttcgccgttggctattctgtgggaccgcagttcatccgcgcgattcgtagcgatggcatgccgcaggtag

SEQ ID NO: 145574 - DNA, 1074 bp, Enterobacter cloacae
ttgcattggttagttcgtctacgcctgacctggcgccaggtcgtcactggatttccttcacgtgcgaggctggcagcgcgtgatgcacttgctactgcactcgcctgcctgctgtcatggatactggccgtatggctgctgggacatgaacatcctacttttgccatcgtcagtgccgtggtatgtcttgctccgggcgtacccagtcacctgaaacaagcaagaaatctagtgattggttgtacgttcggtattgtgatgggggagttgatgtggcagttacccgatactcacccactgattcggatgtgcgtcggtatgttcttcgctattttgtttggtgccgccattggcccggccccggtggtaccaatccaggctggagtatcggttgctttggttcttgccatggggccagaaagcgcgggtggaacccgtttggtggatgttttgctgggagcctctgtaggattattattcagccaggtgctttttacgtctaatccatttagtgatattgggcgttcaacttctgatttccttcgacaactcggtaatgggatggatcgaatgctcagagcctgcgaggtgcaaagcagtaagggggcagaagccgctttgagtcagctttcagatgctcagtcagctctggcagctcttcgtgccgctgtagctgaagcacaggtcagtaaacgctggtcgctacggggtcggctacatgcagagcggattaacatcgtcgcgcaacgttacgaccgccatgcaatacgggtatacgcaacttcccttttattagcggaaagcataagccgagccatgtcgcacacgcatactccgccacccgccgcagttatgacgtattgccaatggctatcagataactgcatggaattagcccggcaatcaaccgtttttgtgctaaaggaaagtgccccccaagcttatatgggcaagcagccacagagcacaatctataagtgcgatatattaccaccagaatggctcattgtagaagataatgctaaacaactggagtatgccttacaggtgctactgtgttcacgagacgcataa

SEQ ID NO: 145575 - DNA, 696 bp, Enterobacter cloacae
atgaatgacattcaaaaactatcaaaactcatcactgaaatcaaaaacccttcatcaccttcgaatgctacaaatctaataaaaggcattgagctatttactggcttttgcctttatctcgtttgtgatggattagccaagaaagattttttattcaaaataacatctgaaatttttgatggcaacataatcaaaaacatgtctaagaatgaggttgttaaatatacaaaagcagcagacgccgcttttctctacagggacattataaaacaggaagaagcctttacagacgttctatcagagctgtttgaagatctctaccttacgggtaagaacggcgacgggttaggccagttccttactcctatggacattagcagccttacagcgtcattacaggcaacatcagggcaatcaggaacgttctatgaagaatgttgtggcgcaggctctatgacactggcaaggctcagagaacgctgtaggagagaaggacactatcttgaacaggctgttcaaatgaacgacatagatccactaatggttaaaatggctattgttcagattatggctccagtagcttttaaagacgtagatataaaatcagtcaaaatatttaatggcaatgcgttattaaacaacttaaaaaaatcctttagttatacctcttatcataataaaaaacaaaaagtataa

SEQ ID NO: 145576 - DNA, 303 bp, Enterobacter cloacae
atgataaaacacaaaacatttatagacgaattaaaggctaaagcaaaagtattatctcaaggcgaggctgttattctgttagacgaaataaacagaagagaagggtttcaggcgacaatagattttgtatctgataaccttccagcattaaaagatagctttataaataacactgttaatcttaatggttgtagaaatattaattcagttttgattaatatgttaatagcacactttcagagcgtatatctaaaatcatttataccaacagccaataataaaaccactataaaaaggatataa

SEQ ID NO: 145577 - DNA, 387 bp, Enterobacter cloacae
atgaaatacaataacccacttgagatagcaactataacaacgaaagttttagcacattatatttatcaagcaatatcagaccttgaaaaagaagattatattaaatatgacaacgccgattatatcaaagactatttagatagcgctattgattcattaggaagcgatggtttttataccagtgttatcaattcatattatggtatgaatcatgattttggtcatgactactttgatacagaggatgagttaaaagagtatgttttaaaagctaacttatatcttatcaatgactctttagctgttgatgatgtatcagatgaatatgatgcttgtgagcaggttttagaaatgcttgaagctgacagaaacgaaaacgatgagtaa

SEQ ID NO: 145578 - DNA, 306 bp, Enterobacter cloacae
atgactatcataaagcaatacttaataaaagaatttgaaaagttagtaaaagactttggttttaatcctttcgaggggagtattatatttgaaaggccatttattatttcattggtattagtaatattagttgctgcctttaacagtttaaatatacaagtagcattagttaatgaattggtttccgcattaggtatcagttcggttatagtcatgagttattatgtggcaagcaggttttatctaatgccatttcaaatattatttgtgcttttgtatattgtggagattacatcatgggaatga

SEQ ID NO: 145579 - DNA, 276 bp, Enterobacter cloacae
atgggaatgaaaatgatattcaaaaggtttgctaaaggatgtgcgtttatagcaattggtagtatcactgcaccttatcatctaatttatgctcaaataaacccggatgttttctcaagactctacaatattagtaaacaggaggtagagcgaattaatgattggtctttaagttggcaaaatccttttatccattgttttttgttctttggtgtgtggtctttaatattctgtttgttatatgtagcttctaataaagcaaagagaattgattga

SEQ ID NO: 145580 - DNA, 2034 bp, Enterobacter cloacae
atgttagtcggtggtattatacttgcatatacgcttatcgttggaaccatgtctacagctcacgatggtgaaatgttaggtaaaaagtggtcttctgcttggcttccaattcgtactgcaatagccccaacacttttacttcccgtcacgactggaggatacaactgtgttcaggctattatcttatggttagcccttcaaggcaatcaatggggaaatgaaacatggaatgctttagctccctccttaattactgataatacatacatatctgttgataataaaatattgatacgtcagaacgttatgaacaccttatattccgctgcatgtgttaacgtttataatagatacgctaaaaaagctaacgatgcctcaagatggggacagttatatactttaatgagtggaacacgcttttctacggatgaattagttggttatagattcggtatccccggagatggtgatccttcgttgggtggcggtatagatttgtgtggaagttcagttcttaaacttattgatgaaaagaacttcaaatcagaaaatgctatcatagatacaggtaaaattgctaaagcagttcaagaagcacaaataaaagctaatgatattttagtgttaggtgctaagcagtatgcagattatcttgttgatgctcctttacaaaatgccgaagctatcaataaacaaatagacttaatggttaacgcatatagtgcctatgttcaggcttcagcagaaaaagtaatgaaagatgctttatcgcaagatgaggttgatagaatgactgaaaaaggttggacttatagctatacatattatgcgagaattgctaatgctatttcagatgcaaacgctgctgttaatagataccctacgagcacaatgaattatagaggtgatgaggatgtgtattttaatcaacaattccctccttcttctttagcgactttaaagagattgcaaacattattagctactgctaacaagtataattcaagtatgaaagattcctctaaaagtgatgatggcgcttatcagaaagttattagtgctatcggtggtaatatggctataatcaactctcaagatgaatctaaaacatcaagtttaatgccactaacagtttctgtaaatataggttcaaggatgatactatccgcagaagcggcatatatacttgtgacgggcggggcggttgcaggtggtagtattccatttgtaggcgatggcattcagaccgcagcaataatattatcaccgatgttaaataaaatattgtcaacaatgattaatgttggtgatgttctcacattcgtaaacccaatgcttccttacatgattggattcttttgtgtaggcgcatattacatattaatattcgaagcattagctggttctacactacttgctgttgctttactcttcccggatcaggatggtgttgttggtaagcaagggcaaggatatatgcttgcgttaagtgttttactaagacctacgatgaatatgatagggttagcaggttcatatgtaataacaactataatgtttgatttgctcaactcaactttcttcaccgcagcgagtaatacagaaggtggtttgcttggtatcaacaaattcttgacgatgattataatatatacatcagtaatgatcacaatgcaggttatgtgtcttaaactcctttatataatacctgatactatttttaaatggatcggtggagcatcttctgcagttcttgggatggtatctggacaaactgaatcagcaatgtctaaaggtatcggagccgctgcgattggttcaggggtattagctaatttgatgcaacataaacatcagcaacctaaatactcaggaaataataatgatctaactggtaataatgttccaaaagctactcaaggacgtaatgaagaaagctcatcaaacactgatactacacagaacacccctcaagataattctaaaggtgatagtggtcaggatataaatgactttgacattgataaaaaataa

SEQ ID NO: 145581 - DNA, 321 bp, Enterobacter cloacae
atgaatatattatcaatagtatctggcgttatagtattttgtttatttatagcgttttttatttatacaggcattaaaatcaaaaacagtaagaaattaacaaagatatataaaaatataggatggttaggagttgctttattagcttcattattcatatcagttcatttatcaagagaagttcacattattctatctcttatatttgttcactatttaaaaatcacctattcaatgacttttattttgggtgttttcttcttaggaaagaaaatccattcaaaaataaaaggttttttcaagccaaagtttgcggcataa

SEQ ID NO: 145582 - DNA, 519 bp, Enterobacter cloacae
atgaaagaacgtaaaaaaggatttagcctgattgaaatgttattagtgctggtagttgctactggaatcgccggagcaacgttttacgggtatagcaagctgcaggaagggttcagaacaagcaacgctatacgtgatctggcaactatcagtaaagccatgagcgctataacagcttctaagcccactgtagctgaagctaacagtatgctcatcagttcaaagagtcttccctctacgatggtagacaccagaactaacacgcttgtgaatgcttatggcggtaagctcactataacggctcacaacggcttagacgactcttatgatgtgtcttactacaatgtgccaccaagcgcctgttctacgcttgtaagcagcggtagggtggtttacaggaacgtaagcaacaccacatcaggatctaagattgcggccacatccagcatggcagacataaccgctttctgttccagctttaacaccagttcagtgcttgtttttaccaacgccgactaa

SEQ ID NO: 145583 - DNA, 810 bp, Enterobacter cloacae
atgaaaaacggcgtgttctggttctgctggtccgaagtggaatggacaccagtggtccgcacaaagcatgaagaagcgtcttatcgcatccagtatatgcaaccttttgacatggatggctggattaatagcggtaaggcggaccaggttattgcaatatcagcgctgactgaaactgtggcggaatacagcagtgaaggaaaaaacagcagcggcaggatatggtcccctgcaccatggaaagctgccacgacatttgaagcccttttaattaaaaaatcggcagacaagctttacccaaataaaggggcaatgattgtgctgcaggatccacctgcagtcttgcaggatctctccgccgttatagactttgaattgcaaaaaaacgtctacaaaaaagccgaatatcaaagggagcttgctctggcttctgcaattactggtttgaaagaatcgatgaatcgtcagtttgaacgtgacgctattgagaagaatgagagccaggaacgcaatgcgctttatggcccctttggctatagcgtgaacggtgatgttccggataatatgtatacctcgatcggtgatcggaaagtaaaatctgaggcagccaggaggtgggcggagtatgaacaatactatgaaccatcaaaagtggctggttttcagaagaaatttaatcaaattttacagcagtataatgacagaatcgtaagcccacgtactgaaatgtatcttgagtggataaagggcagcgtattgctcgaatattttaagcataattttgatacccaggaattgaaaagtgggtga

SEQ ID NO: 145584 - DNA, 885 bp, Enterobacter cloacae
atgaaaatttcactggtcgttccagtttttaatgaagaggatgcaattccgattttctacaaagccgtgcgggagtttgaagagctcaagcaacatgaagtcgagatagtgttcattaatgacggcagcaaagatagtacagaatcaattattaacgcacttgcccttgccgatccgcttgtagttccactgtcgttcactcgcaactttggtaaagagcctgcgctgttcgcaggtctggaccacgcttccggagaagcgattattccaattgatgttgatcttcaggacccaatcgaagtcattccacatctgatagagaagtggcaggccggagcagatatggtgcttgccaaacgctctgatcgctctacagatggccgtctgaagcgtaagaccgctgagtggttttataagctacataacaaaatcagcaacccgcaaatcgaagagaatgttggagacttccgcctgatgtcccgcgaggtcgtggaaaatattcagctcatgccagagcgcaacttgttcatgaagggcgtgctgagttgggtcggcgggcgtactgatgtcgtggagtatgcacgtgctgagcgcgttgccggcagcactaaatttaacggctggaaactgtggaaccttgcacttgagggaataacaagtttctctactttccctttaagggtttggatgtatataggcttcataattgcatctatttctttcttatacggcgcatggatgactttgcaaacattaattataggcaatccgataaaagggtatacatccctgttggtatccatcctatttatcggcggcgttcaattaatcggcataggtgttttagggaaggtgcgaataagcggggaaattcttctcggctga

SEQ ID NO: 145585 - DNA, 558 bp, Enterobacter cloacae
atgcaacaagatgtagcatttttggaacagcaatgtaccatcaaaaccaaaggcgaaaatgtcatgtttgtgaatccagagttacacggaaaaaaacggcaagagcaacttgatgagaacgtcagaaaagccactagagagcatgaggaagcgaaaaagaactccaggttcacccaggtatcacctaaaggctgggaacgtgttagagagctcctcactgacaaacaaggggtagcggcgctacgactctactcatttttagcagaacatatcgatccttcatgtggagcagttgttgcagatcagcaatttcttgccgataaaatgggtgtgaatagatcgacaataataaggtggctaaattacttagagtcaaaaaacgcattggttaggatccccgttgcaggaaaggtctgcgcatatgcattagatcctcatgaagtgtggaagggatataacacatcaaaagactactcagcatttgtgacaaagactttagttaacaatgatggcgacattaagagaagaatcatgtcgatgttttcttccaatgaatag

SEQ ID NO: 145586 - DNA, 531 bp, Enterobacter cloacae
atgagcttactcaacgtcccagcgggtaaagaactgccagaagacatctacgtagttatcgaaatcccggctaacgcagatccgatcaaatacgaagtggacaaagagagcggcgccctgttcgtagaccgtttcatgtctaccgcgatgttctatccgtgcaactacggttacatcaaccacaccctgtctctggacggtgacccggttgacgtgctggtcccaacgccatacccactggagccaggctccgtcattcgctgccgtccagttggcgtgctgaaaatgaccgacgaatccggtgaagatgcgaagctggttgcagtaccgcacaccaagctgagcaaagaatacgatcacatcaaagatgtgaacgacctgccagagctgctgaaagcgcagatcactcacttcttcgagcactacaaagacctcgaaaaaggcaagtgggttaaagttgacggctgggacaacgcagaagcggcgaaagcagaaatcatcgcctctttcgaacgtgctgctaagaagtaa

SEQ ID NO: 145587 - DNA, 363 bp, Enterobacter cloacae
gtgacgataaaagcaaagctgttagcgctggccgttctgctggcgttttttgtcggtaccttttatgtaggctacctcaaagggtggtatgcgcacagcgagcacgttaacagccaggaaaaagcgaagcagaagaaagctgagaaagccgtcgccatcggcgagcagaaagcggcggcggccagtgcagagggtaaagtgatttaccggaccatttaccgagacgtggtgaaatatgttaacgacccgaatcatgttaagtgtgattttgacgatcacgctgtgcagctgcgtcagcgagccctcgacgcggccaactccatcagcggatttgatgcaggagccgtgcaagggagcgagtaa

SEQ ID NO: 145588 - DNA, 537 bp, Enterobacter cloacae
atgaatagccgggcgaaactaagtgccgccgttctggggctggtactcgctggtgcaccagcatcggtcattctcgatcagttcctgaatgagaaagagggaaacagtctcaccgcgtacaaagatggcagtggcatctggacgatctgccgtggtgccacaatggttgatggcaagccggtgataccgggtatgaaactgacgcaggcgaaatgcgaccaggtaaacgccattgaacgcaataaggctctggcatgggtagaccgcaacatcaaggtaccgctgacagagccgcagaaagccgggattgcatccttctgtccgtacaacatcggacccggcaaatgcttcccgtcaacgttctataagcgaatgaatgccggtgaccgaaaaggtgcatgtgaggcgatccgctggtggatcaaagacgggggccgtgactgtagactgaccaaaggccagaagaatggctgctatggtcaggttgagcgccgggatcaggaaagcgcgttagcgtgctgggggatagaccagtga

SEQ ID NO: 145589 - DNA, 324 bp, Enterobacter cloacae
atgaatccgcaaaacaactggctgtcctggatcggcaatgggttaaccacccttgcagcttatctcggcattaccactcttgatttaacatatctcgtgcttgcagttctcggtttcctgctatcgtttcttggctggcttgaccgccgggcaaagattaaagctgatcgccacgcatccgcagaacgtctggcattagaccgccagcgaacaagagcggttatcgagttcctgagcaagtcggattcacacaacctcgaacaagccgacgaagttgtcgctaaagtccagcgggtgatgactgaaacggagattcaatcatga

SEQ ID NO: 145590 - DNA, 876 bp, Enterobacter cloacae
atgatttccaaaaataatctgttaattctaagtgttatttttttacttatgttggtgccatacctacacacgccagtattgtcagacgattattattattatttccatgcaagcttgcatgagcaaattggtcattatttagtctggagcggaaggctgattactaacatatttagctcgtatatgctcaaatatgtcaatcatgacatctatcaatctttgacagctgctgcgctagttgccagcgtttatcttatcgcagcgataccatctgcattatttgttggtaagcctaaaccaagcgccatttcgataataattatttttttatctttttggatatcaaatccagcccttggcgaaacttttttctggtttgttggtgcgtcgaattacttatggcctatattttacatatctttattttttgttattctggctcgacaaagaaaatcacacacattacttagttattctggggctattttagttggttttttggcaggttgctcaaacgaaaacacgtgtattgttgcaacgatactgacaattttatactctatttgttttagccgctttaaactgtcagcaccatatttgattgggattatcttaggctctgcggtacttttattcagcccaggctctgccatcaggtcgtcttattttaaagagtggcattcattaacattaatagaaaaacttgatcaacatttatttgaaagactgcctgcagcgctggatagcttatggccaatatttctaatcattattttcattgcactttcatttggagtgctcaaaatagaatcaagggcttcattaatttgtgcactagggaaggtgcgaataagcggggaaattcttctcggctga

SEQ ID NO: 145591 - DNA, 216 bp, Enterobacter cloacae
atgataggtttttaccagcacagaaccatccgcgttaacctcataatccagccagataagaggctgtttgtttctgtcggttgggatatcaaaaccgccatcgatgccaccccaggccgcatcagagttaagcccctcacacccttcaaccaggtattcaccgatgcccagacgagtgacagagcagccatcagattcatcgttagtctggcatga

SEQ ID NO: 145592 - DNA, 507 bp, Enterobacter cloacae
atgaaagatttaaatttgattgaagaatacaattacgatctctttttggtaaacacctatgaagaagttgtagatttaataaaaaagggcgcagatgttaactttgtgaactacaaggggtttactccgctttcagtggcgcgtaatgttgatgtagctaaggctcttgtagaacttggtgctgatgttaactttatgaataatgaaggtgaaacacctatatttcacaatagtaatattgatgtaatcaggtatcttgttagctgtggcgctaaaatcaaccacagaaacaacaaaggccagacagtgctttttaaaaccaacaagcttttgaatgttgcccgattgattaacatgggctgtaatccattcctgaaaagtgctgatggtcattatcactatgaaaacatgacaatggcagacagaaaaaactacagtcagtttatagaggtatttaaaaataacgtaagaaaaaagaatgaagaaagaatgttattgagcgcttaa

SEQ ID NO: 145593 - DNA, 1539 bp, Enterobacter cloacae
atgaacgacacctcttctgacgacatccttctgctgaaacagtgcctggctgaacaggaagcgttgatccacgccctgcaggaaaagctggccgaccgggagcgcgaaatagaccatctgcaggcgcaactggataagcttcgccggatgaacttcggtagccgttccgaaaagatctcccgccgtatcgcacagatggaagccgacctgaaccggcttcagaaagagagcgatacgctgaccggtcggggggatgacccggccgtgcaacgcccgttgcgccagacccgtacccgcaaaccgttccccgaatcactcccccgtgacgaaaagcgactgctgccagcagagccgtgttgcccggactgtggcggtgcgttgagctacctgggtgaagataccgctgaacaactggagctgatgcgcagcgccttccgggttatccggaccgtgcgggaaaaacatgcctgtactcagtgcgatgccatcgtgcaggcccccgcgccttcacgtcccatcgagcggggtatcgccggaccggggctgctggcccgcgtgctgagttcaaagtatgcagaacacaccccgctgtaccggcagtcagaaatatacagccgccagggtgtggagctgagccgctcactgctgtcgggctgggtggatgcatgctgccggctgctgtcaccgctggaagaggcgcttcagggctatgtcctgaccgacggtaaactccatgccgatgacaccccggtccaggtgctgctgccgggcaataagaagacgaagaccgggcggttgtggacgtatgttcgtgatgaccgcaacgctggatcagcagtcgcgccggcggtgtggttcgcttacagcccggacagaaaaggcatccaccctcagacccatcttgcagggttcagtggtgtgctgcaggcggatgcgtacgccgggttcaacgagctgtaccgcgatggccagataacggaagccgcctgctgggctcacgcccgccgtaaaatccacgatgtgcacgtccgcacaccgtcggcgctgacggatgaagccctgaagcgtatcggcgagctgtatgccgttgaagcggagataaggggaatgccggcggagcaacgccttgctgaacgtcagcaaaaagctaaaccacagttgaaagccctggaaagctggctgcgtgaaaagatgaaaacgctgtcgcgacacccggagctggcgaaggcgttcacgtacgccctgaaccagtggccggcactgacgtactatgcggaagatggctgggccgaagccgataacaacatcgctgaaaatgcgctacggctggtcagtctggggcgtaaaaactggctgttcttcggctctgaccacggtggtgagcgaggagcgctgctgtacagcctgatcgggacgtgcaaactgaatggcgtggatccagaaagctacctccgtcacgtccttaacgtcatagcggactggccagtcaaccgggtcagcgaactgctcccctggcacgtagcactgccaattgaataa

SEQ ID NO: 145594 - DNA, 888 bp, Enterobacter cloacae
gtggaagatatccggctcggcctcttcagacaggcgaatggtcttcgcgtagcagccgccttcaaagttgaataccccgtcgtcatcccagccgtgttcgtcatcgccaatcaggcgacgttttggatcggtggacagggtggttttaccggtgccggacaggccgaagaataccgccacgtcgcctttttcaccgacgttagccgagcagtgcatggaggcgatgccccgcagcggcagcaggtagttcatgacggagaacatccctttcttcatttcgccgccgtaccaggtaccgccgatcagctggatacgctcggtcaggttgaaggccacaaagttttcggagttcagaccctgctctttccactgtggattagtgcatttcgcaccgttcatcacgatgaaatccggggtgaaatcctgcagctcttcgtcagttggacgaataaacatgtttttcacgaaatgcgcctgccaggccacttcagtgataaaacgcacggagagacgggtgtcggcgtttgcgccgcagaaagcgtcgacaatgaacagacgcttgccggaaagttgatgagtgacgagccctttcaggtgctgccaggtttccggagagagcggtttattgtcgttcttccctttgcccttgtcagcccaccacagcgtatcgcgggtggtttcgtctcggacgatatacttatctttcggcgaacgaccggtaaagataccggtatcgacggcgatagcaccaagattcgtcaacacaccacgctcgtatccttccagtgctggattgagctcttcctgatacagcgtatcgtagtcggggttgtagacgatttcctggacgtcgtgaataccataagccttgagatcttgcggggttaa

SEQ ID NO: 145595 - DNA, 795 bp, Enterobacter cloacae
ttggctgatacatataatccttttcccagctatgtaagtctcattgatagttacggcggcaacaatcaaaatctatttcgctgtatattaaagcctgacggtaacagtgctaaaggcgtagacggttggcaactgatcaattattcactgctgctggaaaccgccattcgacgtctggggttggagatgatgaatcaagagttcagcaagtggactgttttttatcaggagtttttaagtcatcttaaaaaattgagtgaggttagtatggataaggtatctgataaaaatgtggagtttgtcactgaaaatttctcagctttgataaaatcggttcaactgctggaaatgtaccaaaatgctatcaccgaggaagctaaatcggttgtctcagaggtattgcctgatattcatattgcaacaggtattaataactggaagggttactataaagcaattcatctgatgccgggatgctgggggcaaggtaaaacaggaattacgttagtttatcgcccttcagaggatggacgagatgaagctgagttctacgtatatggatggatacattcagatgattaccctgaagttaatgcactaaaagaagaaataagagttgctttaagtgctggagatttcattccaacagctagccctgaggactatgaagtatcaattactgggaaggggaaagtgcttgaactgagtttttgggggaatacgagaagcaaaaaagatgcactggttcttcttaaggatatgactaagtggatggactcaaaaataagaacataa

SEQ ID NO: 145596 - DNA, 276 bp, Enterobacter cloacae; identical to SEQ ID NO: 144257

SEQ ID NO: 145597 - DNA, 276 bp, Enterobacter cloacae; identical to SEQ ID NO: 144257

SEQ ID NO: 145598 - DNA, 318 bp, Enterobacter cloacae
atgctgatgtatctgcgtcatgccattgaagcgcatccggaactgtcaaacaaagaaacgttcacaccggaaggtcttgatgaagccctttatcatggtgccgtgctgcgtgtccggccgaaagccatgaccgtggcggtgatcattgcgggtctgctgccaatactctggggaaccggcgcaggttcagaagtcatgagccgtattgcggcacccatgattggtgggatgatcacggctccgctgctgtccctgttcattattcctgccgcctacaaattaatctggctgcgcagacataaaaaaagcgtgtcctga

SEQ ID NO: 145599 - DNA, 174 bp, Enterobacter cloacae
atgaaaaagatccttgtatcctttattgctatgatggctgtcgcttcatctgcctgggctgcagagacaatgaacatgcatgaccaggtaaataatgcccaggcgcctgcccatcagatgcaatcatccgctgaaaaaagtgcagttcagggggagagcggctttgttgaataa

SEQ ID NO: 145600 - DNA, 213 bp, Enterobacter cloacae
gtggggggatttacgtcgagaatcataccaagtgacatgatcgtcttctatcagtggttcttccatttcatcagtgatgtaaaccatcttacaggcaaatctaaatgcttcttctttccctggcctgccgagcacatcaccaaaaccgacttttacaagccctcctatctcatgttgatgagatcgagaaagatcagcatcaacagcacttaa

SEQ ID NO: 145601 - DNA, 300 bp, Enterobacter cloacae
atgcacggtggcaacctgagtgagcacgtctttcagcttctccgggtcacctttaataagggcatcggtaaggcgctggcgttcgccagcatcaaggctcccacgcttgagatattcattgcccatgacttccagccctttgccactttggatctggcccagcgctgcgtaactggttgcgtttacgctgtcggggttaattttcaggcgtctgaggcggtcagaaacgccgctcatgtctgcgctgctcatttggtcaattgccagcgcgtcattgatgccgacgccaaggtggcgtga

SEQ ID NO: 145602 - DNA, 357 bp, Enterobacter cloacae
atgaagcggcagcatggcaagatcgcactctctgtcaccccagtagcaggccgggtcaaagatgtacgggccgttgggacccagcgcgcagttattggaccacaaatcgccgtgaagcagcgacgcctgaggctggtgggatgccagacgctgttgaacgtgctcaacgatggcatcaatattgccaaattccagtcctttttcggcggccagctcaagctgccagccaatgcgctgctcggcaaaaaatgtcgaccagcgacgctgccaggcattgggctgtggcgtggtggagagatcgttgtcaaaatcgagaccaaactgcggctggtcgctccattggtgcaggcgcgctaa

SEQ ID NO: 145603 - DNA, 243 bp, Enterobacter cloacae; identical to SEQ ID NO: 144700

SEQ ID NO: 145604 - DNA, 369 bp, Enterobacter cloacae
atggaaaataatgcactgactttggttttaaaaaacgattgggtagcttcgtcttctggtaataactataccggaaaatacacggttggacggtttcacctgacagatgctttcatcgttgtgtatatgaagctgatacatggaattgaaatacccgatttatgggtcagtagcagcttcactaacataccagataccgatacccgaagggttatgtatatggaaggctgcgatatgttatcgaaagatacaatgaacgaaatccgtaatgcagtgaagtccccgcctgacaagctgaaaatatatcgtaatggagagcgtattgttaagatagaagttatggagaaacaaaatgatctcaaaatttaa

SEQ ID NO: 145605 - DNA, 846 bp, Enterobacter cloacae
atgataagtttatcaccaccgactatttgcaacagtgccttcacggatgcagcggcgctggccatcgccttggcggctgtacgggtggcgagacggccagccgatgccaagcgcacctatggctactaccgcttcgaaatccttgcggccgcattcaacgccctgttgctcttcggcgtcgctggctacatcctgtatgagggctggcagcgtttgcgcgagccagcgcaggttcagtccagcgggatgctggtggtagcagtgctgggtctgatcgtcaacctcatcagcatgcgtatgcttcagggcggcaaggacaagagcctcaacgtcaaaggcgcttatctggaggtctggagcgacatgcttggctccatcggcgtgatcggagctgcgctggtcatccgattcaccggctgggtgtgggtagatgcggtcgtcgccgtggcaattgggctttgggtgctgccacgaacttggctgctactcaaggaaagcctgaatgtcttgctggagggagtcccagacggcattgacatgggagccttgatggcatctgttcaggccgtgccaggcgtgacagggctgcatgacttgcacgtatgggcgctcacgagcggcaaggtcagcatgaccgctcatatcgtgtatgcgccggaaatagggcccgacgagttgctcaaaaccctcaagttgttgctggctgaccgattcagcatcttccatacgacgctgcaactggagattgttgcctgtgagcacagcgtcgatgggtgcaacttcgtggatcatcgccacaaagaaccgagttctcaaccagaccaagccgcagcccggcaggcgtga

SEQ ID NO: 145606 - DNA, 309 bp, Enterobacter cloacae
  misc_feature (271)..(274): n is a, c, g, or t
atgttcgacttaattaagcacctcgttaaaaacgatattcagcacactgtttccgataacgggaatattaccgtcacccacaatctggatctggaagatgttagcggcgtcgacgccttgccggacaatctgaccgtgggcggctcgctcgacctgcgcggcaccagcatcaccgcgctgccggacaatctgaccgtgggcggctcgctcgacctgcgcggcaccagcatcaccgcgctgccggacaatctgaccgtgggcggctcggtcnnnnaggcaccagcatcaccgcgctgccggacaatctga

SEQ ID NO: 145607 - DNA, 276 bp, Enterobacter cloacae; identical to SEQ ID NO: 144923

SEQ ID NO: 145608 - DNA, 5736 bp, Enterobacter cloacae
atgtcgactgtagatacctctacagcagaggaactcaatcaaggaggctcagattttattctgacttccctcgaggctatgcgtaagaagttattggaccttacgtctcgaaatcgacttttgaatttccctatcactcaaaaagggtcttcactacgtattgttgatgaattatcagaacagctttatgaaaccctttgctcggaaatcccgatggaatttgctcctgtgcccgatccaactagagcgcagctgttagagcatggctatctcaaagttgggccagatggtaaagatatacagttaagagctcatcctagcgctaaggattgggcgcacgtcttaggaatccgtacagattttgatttaccaaatagccataaaacggttgtttctgattcagatagagagttgctggaaaaagcccatcagtttatcttgcaatatgcccaaggccagaatggaaaattaacagggattcgttctgaatacgttaatcaaggtatagctttgtcagcgttgaaggaggcgtgctgcttagcaggctatgaagggcttgaggattttgaacgacaggcaaaggctgggaatgagattagtatatcttcttccaatccctctcatgacgataatcggatacaggctctgctttatccaaatgaactggaagcttgtttgcgcgccatctatggtaaggctcaaactgctttggaggagagtggcgccaacatcttgtatttggcgttagggttccttgagtggtatgaaagcgattcctctgaaaaggcacgttatgcaccgttatttacaattccggtgagatgtgaacgaggaaaattagatccgaaggatggtctttacaagtttcaactttattacacgggtgaagatattttgcccaatctctctttgaaggaaaaacttcaggctgactttggcctcgctcttcctttgttcaatgaagaggaaactccagagtcttattttgcttcggtgaagaaggttgtagagcagcacaaacctaaatggtctgtgaaacgttatggtgcacttagcttgctcaattttggcaagatgatgatgtatcttgacctcgatcctgcccgctggccttgtgacaagcgcaatatattgtctcatgaagtaattcgtcgctttttcaccagtcagagctgtggtcaagagaattccggcttacctggtggcttcggtcagcatgagtactgcatcgatagttaccctgatattcatgacaaggttccactaatcgatgatgcggatagctcgcagcacagtgcgttgatcgatgctatccgtggtcaaaacttagtcattgagggccctcctggtagtggcaaatcacaaacgatcaccaacttgattgcagcagctctgctcaacggtaagaaagtcctgtttgtggcagagaagatggctgcactggaggtcgtcaaacgtcgcttggatcgtgcggggctaggtcaattttgcttagagttgcacagtcataaaactcataagcgcaaggtgctggatgatattaatgctcgcttggtgagtcaggcgaccatgcctactatggaagagattgatgctcagattttgcgttatgaagatcttaagcagcagctcaatgaatatgccgcattgatcaataaccaatgggcgcaaacaggcaaaacgatccatcagattttgagtggtgcaacccgttatcgtcacaaattagatattgatgcaacagcacttcatatcgaaaacctttccgggaagcagttggataaagtgacccaattacggctgcgtgaccaaatagtagagtttagccgcatctacaaagaggttcgtgagcaggtgggggctaatgcagaaatatatgagcacccttggagcggtgtgaataacacacaaattcaattgtttgacagcgctcgtatagtcgatttgctacaaacttggcagacatcaattatcgactttcaacatagctatcaagaatatgtagataagtgggcgttagaaggcgaaagccttaatacgcttcaatatattgagcaattggtagaagatcagtcgaatcttccagtgttgtgtggttcagagcatttcccagcacttagtgagctagattcacccgatgccattgcacgggtgcgtcactatttagataggttcgagttgctacaaggtcattatgtggccttgagccaggttatcgagcctcaaaagctacgacttttagaacaaggacaatcgtgtgactttcctcgtgaagagctggaaaaatatggtgcagcagaggatttcactttacgtgatttggtcaggtggcttgaatccatccaatcaattcatgatgagttatcatctatttatgcgcaattaaacgatttcaaaaatgctttgccagatggtattgcttcgtatatcgatgattcgcaagctggattgctattctgctctgagttgttgtcgattctgggtgctttaccgactgagcttattagagttcgagatcctctttttgatgatgatgatatcgatgcagtattgcgcgacttaatgtgtcaaatcgaaacattgcgtcctttaagagatggtctatctactttgtatcaattggaccagttgccttcccaagagatgctcgcgcatgccgttgctgttatccagcaagggggattatttgcatggtttaagagtgattggcgtagtgccaaggcactgctcatggcgcaatctcgtaagcctgacactaagtttgctgagttaaaacgctgctcagctgatttgctcaagtattcggagctgttacaacggtttgaacaaagtgactttggtaatcaacttggtaatgcattccgagggttggacaccgactgtgaacaactcatgttattgcgtgattggtacaagaaggtccgagcttgttacgggataggttttggaaagcgagttgcgataggctctggattatttaacctagatggtgagattatcaaaggtgtgcatttaatcgagaaatcgcagattagctcaagattaatgactttggttaaacgggtcgagcacgaggctaagttattaccgcgtatttctagcttgttggaagaacatgcatcttggttaggtgagcaaggtgtattgatgcaatcttaccgacaggtgcggaatactctcattgccttgcagggatggtttatcaatccagatatatcattagagcagatgactcattcctccgagattttgcaaaacataaacgatcttcagatatcccttgaaaatgactcgttacagttaggggcgtttttacaattaaccccattggcttgcggtgcgtataaaaataatcaactgacgttagacactattaacgacacgctgaattttgccgggcaactggttgataagataaattgcgtatccttggctacccagatcagacatttggctagtggtagtgattacgatttactatgtcgtgatggtggggaaatagtttcgaaatggaatgaacagattaaaaatgctgagttatatgcgctagaaacaaagttagagcggagtcagtggctcaagtcgactgatggttctcttaatacattaatcgagcgcaacgaaagagcaatacagcaaccccgttggttgaacgggtgggttaactttattcgttgttacgagcagatgcatgaaaatggattgcagcgaatctggagtgctgtacttgcgggctcgctcccgattgaaaaagttgaattgggtttagcattagcaattcatgaccagctggcgcgggaggttattcacatccaccctgaattgatgagagtttccggctcacagcgcaatgctttgcagaagtcatttaaagattacgacaaaaaactgattgaattacaacgtcagcggattgcagcaaaaattgcttgccgaaatataccagaagggaattctggtggtaagaaaagtgaatatacagaactagctttgatcaaaaatgagttgggtaaaaaaaccagacatattccaattaggcaattggttaaccgtgcatgtaatgcgctggttgcaattaaaccttgtttcatgatggggccaatgtcagcagctcattacctagaacctggacgaatggaatttgatctggtggtgatggacgaagcgtctcaggtgaagccagaggatgcattgggtgtcatcgcgaggggcaagcaactagtggtcgttggtgacccgaaacagctaccaccaaccagtttctttgatcgaagtgccgacggagaagatgacgatgatgccgcggctttaagtgatactgacagcattttggatgctgctttgccactgtttcctatgagacgtttgcgttggcactatcgttcacgacatgaaaagttgattgcatactctaaccgccatttttataacagtgatttggtgatattcccttccccaaatgctgagtctccagagtatgggattaaatttacctatgtgtcaaaaggtcggttctccaatcaacacaatattgaagaagcccaagcagttgctgaggccgtacttcatcatgcgcaacaccggccgggtgagtcactcggggtagtggccatgagttccaagcaacgcgatcaaattgagcgcgctatcgatgaattgcgccgaaatcgccctgaatttaacgatgcaatcgatggcttatatgccatggaagagccactttttgtgaaaaaccttgagaacgttcaaggggatgagcgtgatgtaatctttatttcctttacctatggaccttctgagcatggtggaaaggtttatcaacgctttggacctatcaattccgatgttggctggcgtcgcttgaatgtgcttttcactcgatcaaaaaaacggatgcatgtgtttagttcaatgcgttctgaagatgtattgacgagtgaaaccagtaaacttggtgttatttcgttgaaaggttttttacagtttgccgaaagtggcaaactagattccctcacaacgcataccggcagggctccagatagtgactttgaggttgctgtaatggaagcactcaatcacgctgggtttgagtgtgaacctcaggtaggggttgcaggattctttattgatctagctgtgaaagatccaggttgtcctggccgttacttaatgggcatagagtgtgatggtgcggcttatcactcagctaaatctgctcgtgatcgtgaccgtttgcgtcaagaggttctggagcgtttgggttggagaattagccgcatttggtccactgattggttcagtaatcctgatgaggttctatctccgattatccgtaaactccatgagcttaaaacattggctccagacgttgttgtaccttcctatgaatatgtagaaacgattgagtcaagcgctgaagtggcgtctgactcaattgattctcttatgcccaatttggggcttaaggagcaacttaagtattttgccacacatgtcattgaggttgagcttcctaatgttgatgctgatcgtcgtttgttgcggcccgcaatgcttgaggctttgctggaacatcagcctttatcacgttccgagtttgttgaacgaatacctcattatctgcggcaagcaacagatgtatacgaagcgcaacgctttcttgaccgagtcttggcattaattgatggcgcagaggctgaagcgaatgatgcagcgtttgagtctgaattggcataa

SEQ ID NO: 145609 - DNA, 1239 bp, Enterobacter cloacae; identical to SEQ ID NO: 26659

SEQ ID NO: 145610 - DNA, 189 bp, Enterobacter cloacae; identical to SEQ ID NO: 144198

SEQ ID NO: 145611 - DNA, 1206 bp, Enterobacter cloacae; identical to SEQ ID NO: 144934

SEQ ID NO: 145612 - DNA, 1152 bp, Enterobacter cloacae
atgagacgaacatttacagcagaggaaaaagcctctgtttttgaactatggaagaacggaacaggcttcagtgaaatagcgaatatcctgggttcaaaacccggaacgatcttcactatgttaagggatactggcggcataaaaccccatgagcgtaagcgggctgtagctcacctgacactgtctgagcgcgaggagatacgagctggtttgtcagccaaaatgagcattcgtgcgatagctactgcgctgaatcgcagtccttcgacgatctcacgtgaagttcagcgtaatcggggcagacgctattacaaagctgttgatgctaataaccgagccaacagaatggcgaaaaggccaaaaccgtgcttactggatcaaaatttaccattgcgaaagcttgttctggaaaagctggagatgaaatggtctccagagcaaatatcaggatggttaaggcgaacaaaaccacgtcaaaaaacgctgcgaatatcacctgagacaatttataaaacgctgtactttcgtagccgtgaagcgctacaccacctgaatatacagcatctgcgacggtcgcatagccttcgccatggcaggcgtcatacccgcaaaggcgaaagaggtacgattaacatagtgaacggaacaccaattcacgaacgttcccgaaatatcgataacagacgctctctggggcattgggagggcgatttagtctcaggtacaaaaaactctcatatagccacacttgtagaccgaaaatcacgttatacgatcatccttagactcaggggcaaagattctgtctcagtaaatcaggctcttaccgacaaattcctgagtttaccgtcagaactcagaaaatcactgacatgggacagaggaatggaactggccagacatctagaatttactgtcagcaccggcgttaaagtttacttctgcgatcctcagagtccttggcagcggggaacaaatgagaacacaaatgggctaattcggcagtactttcctaaaaagacatgtcttgcccaatatactcaacatgaactagatctggttgctgctcagctaaacaacagaccgagaaagacactgaagttcaaaacaccgaaagagataattgaaaggggtgttgcattgacagattga

SEQ ID NO: 145613 - DNA, 225 bp, Enterobacter cloacae; identical to SEQ ID NO: 144219

SEQ ID NO: 145614 - DNA, 132 bp, Enterobacter cloacae
atgctgtcagagaggaacagcggcgtgcagctctcgacctgcggcgagcagagacgccgctgcgtgaaggtgaacccggaagcgggacggttcggagaggattcgagctggatgatactggcggggaaatag

SEQ ID NO: 145615 - DNA, 1560 bp, Enterobacter cloacae
atggaattcttaatggacccgtcaatctgggtaggattgctcacgctggtggtgctggagattgttctcggcatcgataacctggtgtttatcgccatccttgcggataagctgcccccaaaacagcgtgataaagcgcgtctgattggtctctcgctggcgctggtcatgcgactgggtctgctctccgttatctcgtggatggtcacgctgaccaaaccgttgttctccgtcatggattacaccttctccggccgtgatttgatcatgctgatcggggggatattcctgctcttcaaagcgacgacagagctccatgagcggctggaaaaccggcagcacgatgatggtcacggtaaaggctatgccagcttctgggtagtggtgctgcagatcgtggtgctggatgcggtcttctcgctggatgcggtgatcacggcggtcggcatggtgaaccatctgccggtcatgatggcggctgtggttattgcgatggcggtcatgctgctggcgtcgaaaccgctgacgcgtttcgtgaaccagcatccgacggtggtggtgctgtgtctgagcttcctgctgatgattggtctgagcctggtggcggaaggctttggcttccatattccgaaaggctacctgtacgctgcgattggcttctcgatcctgatcgagctgttcaaccagattgcgcgtcgtaactttattaagcagcagtcaaatcagccgctgcgcgcccgtaccgcggatgccattctgcgtttgatgggcggtcgtcgtcaggtgaacgttcagtctgattccgaaaaccacaacccggttccggtgccggaaggggcgtttgtggaacaggaacgctacatgattaacggcgtgctctctctggcctcccgttcgctgcgcggcatcatgacgccgcgcggggagatcagctgggtcgatgctaacctgagcgtggatgaaattcgccagcagctgctctcttcaccgcacagcctgttcccggtgtgtcgcggcgagctggatgagatcatcggcgtggtcagggcaaaagagatgctggtcgctctggaagaaggcgttaacgtcgaagccgttgctgccgcatcgcctgcgattgtggtgccggaaacgctggatccgatcaacctgctcggtgtgctgcgccgcgcgcgcggtagctttgttatcgtcaccaacgagtttggcgtggtgcaggggctggtgacgccgctggacgtgctggaagcgattgccggtgaattcccggatgaagacgaaacgccggaaattgttgccgacggcgaaggctggctggttaaaggtacgaccgacctgcacgcgctctcgcacacgctggggctggaaaacgtggtcaacgatgaagaagacatcgcgaccgttgccggtctggttatcgccgtgaacgggcagatcccgcgcgtcggcgatgtgattgagctgccgccgctgcacattaccattgtcgaagccaacgactatcgtgttgatatggtccgcattgttaaagaacaatctgcccacgatgaagatgagtaa

SEQ ID NO: 145616 - DNA, 354 bp, Enterobacter cloacae
atggagcaaggcgagctggcgcaggtcacgctccgctcgaggcggatttacgtcggtatgatccacaccgcgacgctggaatatgaaaaaacggccaatatcgtgctgatcccgatgttgagcgggtaccgggatgcgaagacgatgaacctgcgcatcgagaataattacagccggtggtatgcggagcatgacattacgctcgactcggaaccccgcagcgccatgtcattccgcaaggtgattttactcaaccagattgagagcatctcgctgttcgatcccgccagcgccagcgcgctgtcgctggcacagcgggacgagagccctggccctaaagagacatccccataa

SEQ ID NO: 145617 - DNA, 771 bp, Enterobacter cloacae
atgaatactgcacgactgaatcaggggaccccgttattgctgagcggtgtcaccaaacgctacgacgataacaccattcttaacgggctggatctgcatattcccgccggacagtttgtggccgtagtcggacgcagcggcggcggcaagagtacgctgctacggctgctggccgaactggaagcccccaacggcggcgacattctggcaggaacgacgccgctttcgaatattcaggatgatacccgaatgatgttccaggatgcacgcctgctgccgtggaaatcggttatcgacaatgtcgggctcggccttaagggtaactggcgggatgaagcccgccaggcgctggccgccgttgggctggaaaatcgcgccgatgaatggcctgccgcactctcgggtggacagaagcagcgcgtggcgctggcgcgggcgttgattcaccgtccgggcctgctcttgctcgatgaaccactgggcgcgctcgacgccctgacgcgaatcgaaatgcaggatttgattggttccctctggcagacgcacggctttacggtactgctggtgacacatgacgtgagcgaagccgtcgcaatggccgatcgggtgctgttaatagaggaaggaaaaatcggtctggatctgacggtggatcttccccggcctcgtcgcgtgggctcggcaagactggcggagctggaggcagaagtgctggatcgggtgatgaaacgcgggggcacggagttacagcgagctaaggctaatgcctga

SEQ ID NO: 145618 - DNA, 648 bp, Enterobacter cloacae
gtgcagcagccgcgcccgccgctctattttggcgggtcgtcggatgtagcccaggatctggcggcggagcaggtcgacctctatctgacctggggcgaaccgcctgagctggtgaaagagaaaatcgctcaggtccgcgcgaaggcggccgcccatggccgcaaggtgcgcttcggtatccgtctgcatgtgattgtgcgcgagaccaatgaagaagcctggcaggcggcggaccgcctgatctcccatctggatgatgaaacgatcgccagagcccaggccgcatttgccaaaaccgactccgtcgggcagcaccggatggcgtccctgcacaacggcaagcgcgagaacctggagatcagcccgaacctgtgggcgggcgtcggtctggtgcgcggcggtgcgggtacggcgctggtcggcgacggcccgaccgtggcctcgcgcatcaatgaatacgccgaactgggcatcgacagcttcattctctccggttatccgcatctggaagaggcgtacaaggtcggcgagctgttgttcccgcatcttgatgtcgccattccggaggttccgcagccgcagccgctccagctgcagggcgaagccgtggcaaacgaatttattccacgcaaagccgcacagagctaa

SEQ ID NO: 145619 - DNA, 1047 bp, Enterobacter cloacae
gtgactaaggcatacatctatacaagggtatcaacattacagcaaatcgatggatttgggattgatcgccaaatcaatacgttaatggattttcttgaaaatgcagtactaccaaaagaacttggctaccagttagatccgaagaactatgaaatcctggattctgatgaagggctaagtggctataaaggccacaacttcacaaaagggtcactcggaaaattcaaaaatcgtgtagccaacggggagataacatctgggtgcttgctaatagaatctgtcgatagattttccaggcggcaaggctatgacgcaatagatgaatttacattcctgctcaagcgtaacatcgatattattgaagtcgaaacggagcaaattttcagctatagacttgatcacaagctgacacagttatcgacaagcattgaaagggcgtatcaagaaagcaaacgaaaatcgagattgatcactaaaagctgggcaaatctaaaacgcaaagccgttgatgagggtattgctttgaagcgtaatgttccttattggttaatccttaatggggatcattatcagttgaatatgcctgaagtcgaacgtatcagagctatttttgaggattatgctaatggaaaaggtgttacggctattgttcgtgacttgaacaatattggtgggaaatatgacaagagagtattcagtactaatttcataaatgtaatgcttagagatcggcgtttgattggttggttgactggaaaacgtaaaaaagatgagacaatagcagattggaaatcacgagagataaagatttatccagaaattgttgatgctaatctatttgaattagtacaacgaaaaattgatgctaatgctgcgatgaaaaaggttagaacttcatcaaagcaagtttcattattcaatggtgtagcaagatgtggtatttgcaatgagccgttagtgggccattttacacaaaagggaagttatttgcgttgtttaggtaaacgctcaaagtcgggtacctgggtaatgactccaacttactga

SEQ ID NO: 145620 - DNA, 645 bp, Enterobacter cloacae; identical to SEQ ID NO: 112355

SEQ ID NO: 145621 - DNA, 2343 bp, Enterobacter cloacae
atggcaaaaggcaaatccgcactggcactggcgctgaaaaagaaaatcggcagcaatgacgagatccagaaggtctcccactggattgactccggtttccctccactaaacaaagccatttccggacgttacgacggtggttttccgtgtggacgtatcgttgaagtcttcgggccaccaagcgcggggaaatgtgttaccgcagacaccatgctgctgacggagcgtggaatggtaacagtgaaagaactgtttgagattgaggggcacaaagcaacatgcactactcgcgatgtagagcataacgttggactcatcaatgaaaatggcgtgatagagaagacctcacacctgacatggaacaaccgtcgcaaattcaagcgcattaagctggcatcagggggttacatcgaggctacgttccgtcacccaattcgtgtggttgacgacttaggcaatatcgtctggcggtatgctgaaaaaatcagtgtaggcgacacgattccttcaatggttggcacacatcaattcggcgatcagcacttggatgccaatatcgcaaaactgatgggctatttaattgctgacggatacgtggcctctgaaaattctgtgcatttttctaacacagatccattcatcaaggatgagtactaccgcctcatttcgctggtatcaaacaagatgccagttacgagaaaacataacggctcggaagaccatgtgctgtttagcaaagaggtgcgttcgctgctttttaaagaatatggtctggagtatgagaaagctgctggcaagcaggttccgttgagtgtgcgtcgcgccaatagcgaggctcaaattgcattccttcgcggctactttgagctggaatgccacgtcaatgatggtcgctgcattgaggttgtgagcgcgagtgggctgctgctacagcaaattcgcctcatgctcctgaatctggggattacgtcaactatctctgaaaaacacgtcgcaggttataaaaacatatattaccggctgtcattcagtggctctaactacgaccttttcctgtcaacgattgggttcgagtctccggctcgtttagcagtggcaaccaaacgggacattagttttgaccgcacttatttaggctacgttccgcacatcagcggcttagtgaaatcactctacgagtcactcaccaagacctctcgtaaagactacgttctggtagatcacgttattggccgcggcgatcgtgtcggaatagacaaactgcgagaaatctatgtctccttcattggcagaaagaatcgttttaacgagcatctgtttgcacaactggcagcggtaattgactctaacttgttctacgacgaagtcgtggctattgaggaaggtgaagcaccaacgttcgacgtagcgatgccggaaacacactctttctggtctaacgggattatcagccacaacacattcctcgcgacggcagcgatggtgtcagcacagaaacaggatggtctggccgtgttccttgaccacgaaaacagtttcgacgttggtctggcggtagcgaacggactgaacgccgacgaagacgacggtcagtgggtctacaaacagccggataccttcgaagactccgtagagctgatcggcacaatcctcaagctggtgcgcgacgaagagcttatcccggaaacagctcctatctgcatcgttgccgactctctggcgtcgatggttccgaactcgaaggctgagaagttcgacaagatggcagaaggtactgcgaaggacaaagatcagctgaacatgaacgacaacacggcgctggcgcgcgcgacgagtgcgaacttccctactctggcgctttgggcgcgtaagtacaacgcgtgcatcatcttcttgaaccaggtgcgtaccaaaattggcgtgatgtttggcgatccgacgacgtctccaggtggcgactctccgaagttctacgcgtcggtgcgcatccgtctgggcgcatccgttatgaaggatggcaaagagaagatcggacaggacgttggcgccgagtgcattaaaaacaaagtcgcgcctccgtttggcaaatgctcatggaaattctacttcgacccgactcgcgggctggacgtcatcgaatcgctggttgagtacatgctggaggaaggatacctgcccaagaacgccagcgggcgtgtggaaattggcgataagaaatacaccaaatcgcagatcgtcgagatgtaccgcgagaagccactcccggaaatcatcgcagcactccaggcgatagacgaacggcgagcgaaagagtcgtccccagcagagacagaagaagcgtaa

SEQ ID NO: 145622 - DNA, 843 bp, Enterobacter cloacae
atgtttgagatgactactttatcgattcccggtgtgctcccggacagaccattgatgtcctcaaaagaaatctcaaagctgaccggtaaacgacacagcgacattcttcgcgacatccgtagcgtgctgaatgagctgtatgccgacgattaccataacgcaaaattgcgttatgagaaaaatcagttacttacaattgttgaaggcattgttgtcaacatcgattaccggggaatggaaggcgagtacatgctcgaccgaaagcataccgatgttctcattaccggctactcgttgaagtaccgcgctgctgtcattgagcgctggcatgagctggaaatgagtgtttcaagcggggcgctttacggtgcctaccccagcatcccggaaaccttttcagaagcacttcgactggcagccgatcttgaagaacagcgtgctgatcttgagcgcaagctgtcggtggcaaggccaaaagccattctcatggacaccatttgcggcactgctgatgagctttatgggctgaatgaagctggtcgcattctcagaacgtccggggctgttctgggtgcgctgatggactcgctgggtgatgtgtacgttaagcgcaaatacaccactgttaaccgccagttcctcaagatcttcattgaccgcggatatggcaaaaacgttgtcatcggaaacggacgcaaccaggccaagttcacttttaaaggactttgctttgctgccgtgaagctaattgctgccgggaaaattaccgccagcgccattgagtatgagccgtgtcgtgagcatgtcgaacgtgaaatgaaggaatccaaacgtcttcattaa

SEQ ID NO: 145623 - DNA, 267 bp, Enterobacter cloacae; identical to SEQ ID NO: 112313

SEQ ID NO: 145624 - DNA, 837 bp, Enterobacter cloacae; identical to SEQ ID NO: 112311

SEQ ID NO: 145625 - DNA, 519 bp, Enterobacter cloacae; identical to SEQ ID NO: 112310

SEQ ID NO: 145626 - DNA, 537 bp, Enterobacter cloacae; identical to SEQ ID NO: 112270

SEQ ID NO: 145627 - DNA, 255 bp, Enterobacter cloacae; identical to SEQ ID NO: 112269

SEQ ID NO: 145628 - DNA, 204 bp, Enterobacter cloacae; identical to SEQ ID NO: 86120

SEQ ID NO: 145629 - DNA, 525 bp, Enterobacter cloacae; identical to SEQ ID NO: 86117

SEQ ID NO: 145630 - DNA, 417 bp, Enterobacter cloacae; identical to SEQ ID NO: 86116

SEQ ID NO: 145631 - DNA, 219 bp, Enterobacter cloacae
atgaaggcggaagaaaacgacatgtctccgtcgaaattggcggtcgacactgccgacaaaccggaagcgcgttcgaggtactcgatggcttcccgagaggtgttttctgctgcgcgtgctttatcaaaggtgtttttcatcgtccactcactgagtgaaaccttttactgtatgtatgaacagtatattaggcttaagtttttgtatgatcaaccataa

SEQ ID NO: 145632 - DNA, 2364 bp, Enterobacter cloacae; identical to SEQ ID NO: 112359

SEQ ID NO: 145633 - DNA, 123 bp, Enterobacter cloacae
atgatgatctcatatcaggaacttgttcgcaccttccctagcccgatggacgtttccggcacgctggggggcgcctcctcgcgcgccgaaggcagggccagcctgcacacactctttacctga

SEQ ID NO: 145634 - DNA, 1035 bp, Enterobacter cloacae
atgcagttaggatttgtcggtcttggtgcggtcgtggaaaccgcgtatcttcccgccttacgtcgcctttttggtcacactgttcattgttttggatttgatgttctccccaccaggcagcctgaaggcgtcacgtgctgcgcttcgcttacggaacttctcggcgtaccgcttgatactctttttattaccaccgcatcgctgcaccacctcgaggtgctggaacaggccatagcctcggccgttccgcggattgtgattgaaaaaccgatcgtcgccacgcttccccaaatcgaaaagctcaacgcgctgctggcaaaccccgacgctgcttcccgcgtgctggcgctcgatcactggatggcgcgcatcgaaacggtaaaccggtcgctggttggcagcgtctctgacatcgtcaaaatcgacggctttttgcaggaaccgagcggagttaacgccgcaggagaacccatcgcgcttaactttgctaccggcgagccggacgcgcgtatgcttcgccacccggacggcgtaatcctggatatcggtacgcacgtgctggcgatgctgcgcgaaacggtgcgttatctgggcggaagtgatgatatgaccctgcaggtcgtcacggctaaagaccgcctgggccgcgctatcgcaaaaggcgacctgtccacggcggagggcgaggcgcatcttcagggccgcatcagcggcgtgccggtggatatctggctgaacaaatacgcgggacccgcgggcgggcaaaaaggattacggctctgtttgcgcgacgggcgcatcatcagccacgaccggcgcggcgcggaggatgtgcttgagctgattgagggtaaggatattgagcgctggcatatccccgggacactctacgagcattgtcttgccggacacattctgggcaccagcagtctttttgaacgggatccgcacgaggtgagccgcacgacgcgtcgccgaatcgaggaagttgagctgctgctgaccttgcagcaacagctgcgtggcccgcactga

SEQ ID NO: 145635 - DNA, 1401 bp, Enterobacter cloacae
atgaaatcagattctccgtcttttgaagaacaacagtttacgcgcgcccagcatcgaatcagtattcgtcggctgctcaatcgcgataaaacgccgctggcgatcctgctggccgctgccgtggtgggaacgctcgccggtctggtgggcgtggcgtttgaaaaagcggttaatgccgtgctcaactggcgagtgggaaccgtggccggtttcgccgacagccgatggctggtctgggttgcggcgttcgggctgtcggcgctgtttgccatggtggggtattttctggtgcgtaaattcgcgccagaggcgggcgggtccggcatcccggaaattgaaggggcgctggaggagctgcgtcctgtgcgctggtggcgagtcattccggtgaaatttatcggcggcatgggtacgctgggcgcgggaatggtgctcggcagggaagggcccacggttcagttgggcgggaacgtcggccgcatggtgggcgatctctttcggatgcgcagcgccgaagcgcgccatacgctgctggctaccggtgcggcggcggggctatcggcggcctttaacgcgccgctggcgggcattttgtttatcatcgaagagatgcgcgcgcagtttcgctacaacctgatctccattaaagcggtgtttaccggcgtcattatgtcgagcatcgtgtttcgcctctttaatggcgaaggggcggtcattgaggtgggtaaactgaccaatgcgccggttaacaccctgtggctttacctgatcctcggcatgatttttggcgtggtgggaccgctgtttaacacctttatcctgcgcgctcaggatatgttccagcgtattcacggtgggaatacgactaaatgggtgctgatgggcggcctgcttggcggaatctgtggtgtgctcgggtttatcgagccaaatgctgcgggcggcggcttcgggctgatccccattgcggcggcggggaacttcagcgtgggtctgctgctgtttatgtttatctcccgcgtcatcaccacggtattgtgtttttcctccggcgcgcccggcgggattttcgccccgatgctggcgctgggaaccttgttgggcaccgcgtttggtatggcggctgaagcgggctttcccgcctatcaccttgatgcagggacctttgcggtagccggaatgggggcgctgctggccgcctccctgcgcgcgccgttgaccggtatcgtgctggtgctggagatgacggacaattaccagctcattttgccaatgatcattacctgtctcggggcgacactattagcccagttcctgggtggaaaaccgctatactccaccatcctcgcgcgtaccctggcaaaacaagaggcggagcgggccgccgcgcagaatacttga

SEQ ID NO: 145636 - DNA, 762 bp, Enterobacter cloacae
atgacacagccaacttttagaagagtccaaaaaaggaaccctcatcagttatctgttgatcaacatattcatgcggcacattgcataaaaaagtttgccaacgaaaaaaacacgatttctgtgtttgataaatcagtttcgcaatgggtgcaacgtaagccagatgccgcgattttttgtgcaaaaagagcttgggatcaacgtgctgaaaaaggttatatgaatagtatagaaaccgctttttttcagactttagacagtattgatacccctgccatcaatcgaaatcatgatgctattactcgttatttccatttgtggcgcctacgaggtgaagcgagagataacgaggggcaaaatgttatctttaacggtatgtcaggaagctctttaactatcgatgagcaagagatattagaaagtaatcacatgcttttcataacggaagaggatggtatgccctctcacttagcaaaaggtatggagatacaagtgatgcttgacaagatttgtcatcttatgggccctataacttggggattgttaacagccaataggggagaatttttggtcgctgattactacccaggagatagagatggattacaaccttttatccccatatctcctcatcatgcattttttgcgaacgttaccgataggcacattagtgttcagcaagtgcgcgaattaaaccgtgcttctgttgcatcttcaaaaaactactatttttgccgcagccttgataactgccccctttaa

SEQ ID NO: 145637 - DNA, 459 bp, Enterobacter cloacae
atgaccctgagaaaactgtttggacaacgagtaaaagagttgcgcatttccaccggaatgagccaggaagcctttgccgatcggtgtgggtttgctcgtagctatatgagccgcattgaacgcggcggttctaatgcgtctttggatgcgattgaggtgctggctaatgctctcagtgttgagccgtggcagttgttagcgtctgactcatctgaagataacgatcctgaactgttggttccatacgcagccgatggttcctgttttcaccccggtttggcgagcacccgtgatggttcgtttggcgtaggtgataaaacggctcagaagcgttttggcacgttttctgaagctcttgagtatctccgtagtatggagacagcaaaatggcgtaggcccaatgccagtggcaactggggtattgtgtcagcggtgcgttgggacaaaatgagaaagtag

SEQ ID NO: 145638 - DNA, 744 bp, Enterobacter cloacae
atgtcaaaaacacggcttagtaagcccgggttttcagccaagtctgtgctgaccattatgttaatcgctgcgtcatctgcatcttatgcagcagaaagcatcgatcaactggcgacgcgcatcggtatggatcactttcgggaagcgattaagaatggcgaccgtaacgcctttaaaaccctaccggcaaaaggctataaaaacggcttaaccgggttactacttaaaacgaacacctacgttaaccccgaatacagctttgctgattgcgatacggacaccgttattatctcggtgcaagaacacaaaacgctccccggttgccgcatatctctaaagctagcgactaaagatgctgacggtagctatcacgataatggcattcgcatcgaatacggtattgcgaccggctccaaaaagtttatcgccaacaattcagcgtgggcgcagcatgccatcacaggtgataaggtgctggaaagctcgttgaagagagatgccaacgatactgtctgcatagcatggtcaacgatggcaaaaaatattgccatcgggcgagacgaacacaaccctatttccgtctatcaacaacaaatcgaagatctcagaggcaaacccggtatcactgagagtaatattgtttttgcccatgcacttgctggcatggtttacaaagacatggccgcaaaaaaaccgcaagaagttgaagcattggtttatcaaacctgccaatcaggtatgtga

SEQ ID NO: 145639 - DNA, 468 bp, Enterobacter cloacae
atgattaaagacgcgattttttcaccgtgcggtaagtatcgctactcgttatcacgagtctgggacgaatcaaaaccgtatacccttttcatagggctaaacccttcatacgccgatgctgagaaggatgatcgcaccttgagccgctgcatatcgtttgccaaaagctggggctacggtggcgtatacatggccaacctgttcgcattcgttcacacccagcgacatgaaatgatgaaagcgtctgatcccattggcaaagataacgatagccacttgatacgtcttgttagcggtgccggactggttgtcgccgcatggggaaatgaaggaagacacctcaaacgctcaacgaccgtccgacagctattgccagagagcacaatgtgcttcgtcttaaacgctacaggtgagccgaagcaccctttgtatatgaaaaacgacagtgttctcatacctttaggttaa

SEQ ID NO: 145640 - DNA, 1194 bp, Enterobacter cloacae
atgcagcgcagctttgagaaaaacaacctcgggacaagccagcgcggcgagtatatgaaaaccattttcggcgaggaggccagctcggcggcggcggtgctgatggaagcagcctcaagcggcaaacttgaccggctcactgccgcgtttaaagcctcggacggtaaaaccgaggaactggttaaggttatgcaggataacctcggcggcgactttaaagagttccagtcggcttatgaggcagtcggtaccgacctttttgaccagcaagagggctcgctgcgtaaactcacccaaaccgccacacaatacgttttaaagctcgacggctggatccagaaaaacaaaggtctggcgacaactatcggcattattgccggtggcgcacttgctctgattggtatcatcggcggcattggtctcgttgcgtggccggttgtcatggggattaacgccattatcgccgctgctggcgtgttgggtacggtctttactgttgctggtagtgccattgtgacagcgctcggtgcgattacttggccgattgtggccgtcggtgcggcgattgtggccggggcgctactcatccgcaaatattgggaacccatcagcgcatttttctcgggggtgattgagggcatcatgagcgcctttgcaccggtcggggaaatgttcgctccactggcacccatttttgacggcatcggtgagaagctgcgcggcgtctggcaatggtttaaagacctgattgcaccggtcaaggcaacgcaggagacgcttgatagctgcaagaatgtcggcgttatttttggtcaggcactggcatctgccttgatggctccgctcaatgtttttaacaagctgcgcagcggtgtcgactggcttctcgaaaaactcggcatcatcaacaaagaatcggacagcctcgaccagactgccgccaaaaccaacgctgccacgcagggtaattcctacatcccggcaaccaacacatatggcggctatcaggcttatcagccagttaccgcaccggcggggcgctcttacattgaccagagcaaaagcgaatacaacatcactctgccgggaggtgttgcgccggggcatcagcttgacagacagctacgcgacaagctcgaacagattgagcgcgaaaagcgtgcgcgtcagcgtgccagtatgggccatgactga

SEQ ID NO: 145641 - DNA, 1005 bp, Enterobacter cloacae
atgggcgcggagattaatactttggaaactgactttaaaataaccctcgaaggtttcacaactgagcaagaagcaaataatataggtaatttcacgctagaagctattcgagccttaacaaaaaatctcaatcttgatatctcaaaattaaaacacgtagttgtttcctataatttcagtgaagctcttcaaaatgtgacctccatttaccaacacaaatcccctagttcatttaccaatagcaagcagggcgcagccgtcgggcagttagtaacaaaaattggcagtgatgggctatgtgaagaatatacccttgtactatctattgatttttttgttgagctttttaatgatggtagctttctgaaattgaatgaagaaggataccgcgcagtcatccatcgcattcaccatgagttggtgcacgtacatgaaaaaaacttactaacatgcttagcccaaaactttacggtcaacgagtatggcgacgcgctgcttatctcagccacgcgcgcatggtctgaatatcttgctaattacatgtcttcggggtcagcccctcaagagaccatcgatttatttctagagaatcttgatactgttgtaattgaagtatctgacgagattgaaaatctcattctgaactataaaagagataacatttctctgaatgaaatgtatctcgaagcaaaaaaacgcatcaagctaattatcaactcctatgcttatgcgataggttacgtccattctctaaatatcaatattaatgaatacgacccaagattagcccttacactatccaactcaaaaataaaaaatcaattatcagagctaggcgttgcctttcagaatttttatgaaaaattcaatgaccaacgcattacaggttttgatgattatcgtgagataacattagtcattgatgaaatatacaagcgatttgggcttgctttagagtgccctgactggtctagtgacagtggactctacatacatgtaaattag

SEQ ID NO: 145642 - DNA, 816 bp, Enterobacter cloacae
atggatatctcaagcactactcacctctttagatttcggggtgataacatcaatactataaacgagcttgttaataatgttatttggcattcaaagtatgctggattgaatgacccatttgaaatgttctttcaattagatgatagtggtcttgagaaattgccattaaatgacatagcaaaaatattggctaaaacaaaattcctctctgaaagaagggcgtatgttgaacaatgtttttatcaaaaaaatatgacggaaatatatggcttcatacgggagcattggggggagtcctttataaagacaatgctttcaatatatcgaaaaagcgttactgtggcgtgtttcaccaaggcgtgtgatagtcgtttgatgtgggggtactatggaaatggtatgaaaggcatatgctttgcatataacaaagaaaagttacgtgaatcaggtcttgaatttgctgatgtcatttattctgatgcccccccaaaaattgatacctacaaacatctagtcgagaacttgagggatatccctataactttggatgcgttattttcattgcgtaaacataaggactggattaacgagcaggaggtaaggagtttaaagtacttggaggcagatgaattatatgagcatcagccagggctcgctgttcagataaatccgggatgtattgaagccatcattatcggtgaacgtttagccggagatatgagaagttttgttgaatcttatgctaaaaaaaatgacatagcgctgttgattgccaaggctgattttacaagctacaaagtacaaattgaaggttaa

SEQ ID NO: 145643 - DNA, 435 bp, Enterobacter cloacae
ttgggaagaaatgacctgcttattcgcaccttccctagctctgctgatgccttttatgcctgtatgagtgagtacacttttactaaagatgatgcgttaaagctcggtgatgtgttgggttggtgtttcaacgacttcgagaaggatccacaatctctgaataataaaatcaaccttgacgcatttcagggtaattttagcggttgggatggctcttatcgcccgttagagaagctgataaaagccagcatgaatgatgattcctcttataaacacgtttcaacggtctaccatctgattttgaataaagacccgcatgccgttgtaaaaacaacgtttcgcggcactaatgcttatggcggcgtggtcaaacagaccgtagcggcgcgggttaacgtgcgaacgggtgaggtcgattcgatactcgacaattaa

SEQ ID NO: 145644 - DNA, 171 bp, Enterobacter cloacae; identical to SEQ ID NO: 83129

SEQ ID NO: 145645 - DNA, 183 bp, Enterobacter cloacae
atgtccaacccaacggaatgggacctaaaggattacttaggttccaaactggttaagcgtcagacaagactctctaactttctcgcctccctcctctatatcccctttaagcccgcctccatcttcctgtggggtgtggtactcactttacttataaggaccctctcacatggaagcatttaa

SEQ ID NO: 145646 - DNA, 369 bp, Enterobacter cloacae
atgaaaacttccgagcgctacccggtaacgcaaggtgacgtaatcgtgaattacgcctccagcctgtttgaccgcaccgaagtaaccgccccaagcctcccggctgacgtcttctgtggtgacattctggacagcaaaacctttgccctgtatgactccgccgccgctgtgggtgagccagtgattaacctgtctgatatgtccgccgatgggcagaataagaccctggttattgtggatcgccacgttgtgatcaccgatcacttcctccgtgccaaagacgccgcgagcaaaaaagccgcactgaccgccctgacagcttccggtgacgttcgcctggctatcaacgccgattacttcaaagcataa

SEQ ID NO: 145647 - DNA, 192 bp, Enterobacter cloacae
atgaaggtgtcaattaatatccccggtgcgtcgggtcctgtctatgtgtccggtactgcggaagtaatcaaccgcaaagcactgtgtagagagttgggcctgtgtaacgtgatctttagccgtttggagaagcaacacggctttgaatacgcgcttaacgttatgatcgctaaacagcgtcaaaagaagtaa

SEQ ID NO: 145648 - DNA, 612 bp, Enterobacter cloacae
atggataagcgttaccaggttttcgtaagttcaacttttacggatttagaagaagaacggaaacacgttatacagactctgatggaaatggattgcatcccagcaggaatggagttgttcccagcaatcgatgaaggtcaatgggagttcataaaaaaagtaattgacgactgtgattattatctgctgatcattggtggacgctatggctctgtcgctgaagatggattaagttacaccgaaaaggaattcgattatgcagtctcaaaagggttacgtgtgattgttctcgtgcatgaaaacccagaaaatcttccttatgctaagtctgagaaagactcagtgttaagagaaaagcttacaggcttcatagagaaggcatctacaaatcgtcttcgtaaaacttgggcaactgcaaaagacttaccagggttagtagcgctgagtatgagtaagacgatgaaaacttacccagcagtagggtgggtaagagcaaatgttacaagctctgaaaatgatttacgtgcaatagtcgatttgcaaaaagaaaatgaatggttaaaaagcgaactgaagaaagctagggaaggtgcgaacaagttcctgatatga

SEQ ID NO: 145649 - DNA, 378 bp, Enterobacter cloacae
atggattacagcaagatgagtgaccatgaaattaatatggcagtggcagcaataatccatcctgaaagcacggtaattgaaagcaaaagcagaccaccatgtgcgtgcatcacagggcaattaccaagctattgggtcgactactgcaacgccccggcagacgcatggtcgattatcgctgacaagaaaatctgcctagcgttcgacgtattcgccgagccacaggatggcggtggctgggtcgcttctccagcttatggctgggaaacggagcgagtacgccatgacacccctctccgcgctgcaatgattttattcctcaaaatgcaggagcttcccaatgttccagctaattcaacggggtcagatttacgctga

SEQ ID NO: 145650 - DNA, 201 bp, Enterobacter cloacae
atgatgggttctgatatttgcaaaggtgagcgctttcaggttggagaaatttggaagtcaccgcgtgggttcttttacaaggtggttgaggtgattggcagccaggcaactctgcggatgggctgcgatggaagcggaagaaaggctcgacgatgggtcgatgcaatcgccggttggtcaatctacaagcgggaggagtga

SEQ ID NO: 145651 - DNA, 738 bp, Enterobacter cloacae
ttgcaaaacgactatctgcaagttacagcctacactagacgcatgaaagacgggatgactcagcccttcctgtgcacgtgccaagatgggcaagcttacattgttaaaggcaggccaaaactccggcagaaagagcttgtagcagaattcatatctgctcatctagcaagacaaattggtctaccttgcccagacttctgcattgtagatgttggacaacagataatagagttcatgcctgacttgcgcggcgagcttttcccgggtcctgcatttgccacccgctttgttgaaaatgcctcaacgataaacattcaacaagcccgtaacgctgtaaacatacaggatcaaaagaaaatatttttctttgatcgctggataaacaatgcagatcggtctcttactgagattggcgggaatgtaaatataattttcgatgctgttaacaataggtattacctgattgaccataacctggcgttcacacaagatacaactgatgatgagtatgatgtccatgtttactctgcaaatggaagaaagtggaacttcgacatacttgatgaacccgagctgatggatctcgcaaacgaagctattggttcagttgaggagacgtttaatcagattccggctgattggtttacatccgatgaggaacgtgatctgatgttcaacgagatattgggttgcttaaacagagtaagtaacaaagatttttgggataacatcaaatga

SEQ ID NO: 145652 - DNA, 1374 bp, Enterobacter cloacae
atgagccgttttatcgatttgtacgttgagcaggccgtcatcggcggaataatgcttgcagcaggtcgcgcagatggcgccgacatggctaccgatgcgattgaggggctgactgaggaccacttcacagcaacgccccacaaagtggctctgcggtcatataagcgactcaacgaatccggttcgaagatagacctgcttacgctgaccagcgatcttgaacaactcggggttcttgagagtgcgggtgggttcgcttacctggctgaatgcagcaaaaacactccgtctttcgcaaaccttgcagcctactgcgaaaagcttcgggaaatgtaccttggtcgccgtatgaccctggcgttgcaggttgggatacagaagctgtctgaaccaacgaccgagggtatcgcagacatcattggcaacattcaggccgacatctctggaattgagcacagcgctgactacggaactgaacacatcaccactggcatcgacatgtcgctggaaacaatccaggcgatcatcaatggcgatatctggaaatacaaaacagagctcggcatgtcgaccatcgatagcgctttcggaggattcaacaatacggattttatcgtcgttggcggacgtcctggcatggggaaaaccatgtttagcaccacagtgacagaaaccgtaggtctgaaaaacaaaaagccggtgctgttcttcagtctcgagatgccagtggaacaaatctctgagcgagtcgctttccaccgggcgcgggtaagcaaagaagatctgctgagcaaagttagcgggaaaatggacgaggcatgggggaaggttagtcactgcatgaaggagttcatcgactctccaatctacatcaatgacaagccatccctaagcgttcaccaggtgcgtgctgaagcgcgcagaatgagcaagaagctgggcggcctgggcgtggtcatcgtcgattatctccagaagatgcgcatgtctgaccctgagaacatgaaccgcagcgtaggggagatcgccaccggcctgaagaacctggcgaaagaattgcgttgcccggtcatcgcactggctcagcttaaccgtaaggtcgaagaacgtgctaataagcgcccggtcgcagctgacctccgcgagtccggtgttatcgagcaggaagccgatgtgattttcatgatctaccgggatgagaaatacaacccgaacaccgaactgaaaggcatcaccgaaatcatctgcgttaaatcccgacacgccccgggcgcagagaaaacctaccacttcagcagccgctactcaggactggatccggttgcattccaccatagcgagcagcaggagattgaccatgattacgagtgctaa

SEQ ID NO: 145653 - DNA, 171 bp, Enterobacter cloacae
atgagtagcccactttcccgcgtcatcacaaatcacatcttccgcgttccggcgcgccgccagcgcaagcccgcggttaagccgtccgacatcccgaccctgaaagactacaccgccagtctggtggatcagaaatggctgcgtctcgcggaacggaggtcgcatggctaa

SEQ ID NO: 145654 - DNA, 1101 bp, Enterobacter cloacae
atgcattatcttcaagaatatgtaatctgtttttttgtgctattagttactgtttatatagtatctaaaattattaagatagagcctgacaatcaaaagtatagttcattcgatggtgctagaggtatttgcgcctctttggtcgccatatttcatattttctggagggatggcagtcatgacacagagtattggtcacttgattatatttcctcaagcaaaaccgttcactacattcttcttaccggtgagctatctgtcgggatattcttcatactttctgcttttctttttttcagaaaggcgatggcgaaaacatttaattttgaagagttttatgtttccagaatcatgaggatttacccgccagtagctttttctataataatgatttatgcatcatcctatttaatatccccaaaccattcatatcagattaatgatctaattcagtcattgccttcgctttttaattacccgatgacgcgtataaatgacatacctctcgtaataatgaattccggtgttctttggacaatggtgtgggagctaagactatatgttgccatacctatcatattcatattattaaaaagattcccttaccccaaatcttttgtgctgatatctatgtcctatgttgtctaccaatggtactttataagtaaagatattcaattgagctatgtaatgtactttcttgctggctttatggttgcaactataaaaaaagaaattaagttacatgattcaatcagttcaattatactttttttcgctgttatgttgataggaaaggcatatgatgtaataactccattattaatgatggttgttttttatactcttaagtgcggatgtacatactttggtatacttacgtgcaaaccagttagagtccttggtgcctgtagtttctcaatttacctaatccatggaattcctcaggccgtatctaaatactacttgtatgatgagggttatatgatttggaaattggtgtctgtagcaaccttaggtgttattgcccctataatgtacaaatacattgaaaaacccacaatgcatataaatctgttagccgcgcagaaggtttcttaa

SEQ ID NO: 145655 - DNA, 1464 bp, Enterobacter cloacae
gtgaacgaaaatagccatgataaaaatgttactgaagatgagtacgctgaattttggaagcattttaatgcgagatatgacgatccactcgtgaaagatgtaaagaaaacatatcgatggtttgttgaggttatgggggaagaaaaatggtttgagcgaagagataatgttctgcggtattttcgtaccctcactgaaaggttatatagcagtcaaacagatgtttctttacatgaaaaagattcgcgtatggccttttatgatgattggatcgcttggtatttgtaccttgcagaatcacttgccgatcgcccaacagttgatgaacctgcacaatcctctagaattttgccgttctttgccaccatcggagaatttagcgaagagttaaagcgtacaaaaggtattgaaaataaacttaaagatttacttattaaacctgagaatcaaccagactctgtcttatttgaattagtagttgctgcctgttatataaaaaatggttgggaagtagagtttatacctgagtcaggtgcaggtaaaacaccagaccttctggtgaagaaaggaaatgataaactatatgtagaatgtaaaaggcttgcaaaggtaactcaatattcagaaaatgaacgtatggaatgggttaaaagatggcagaaagctctaccttacataatttcttacccatatcctgttttttttaatgtaaagttcaaatgtgaggtcaatagcaccaatcctgatatttttttgaatattgttaggcatttatacgcctcaagagatttgatgcaatgcggtgttgtatcttgtgaaaatgatgaaatatcagtagttgcaaatttaattgatatggaccgagtaaatgaacactttgccaaatggatagtaaagtatccttcgccacaacttaactatcttttagatgataactatgaaccccatggtagttatacgatggcattacaggctaaactttgcacttatagcgaagatgaatatagtacaattaatgtttttgccgatgagataaggagacctttctgtgctaaatgggaatgtatagcagatgagtcgatttccaaaaaagctaaagatgttaaggggttacttgtgaaagctgtaaagcaagccccaagtgatggtaaaacagttatccatattggatatgaaacattacatggccctcatgtcgaggtgcttcgtgataaaaaaattactaatatgttagctaattttgattgcgagggtaaggatattgagattatatattgccactcgttccaaccaaggctattttcagataacaattgggattttgccgaaactgttaggtattatacaagaggtgttagcaaaaagtatcttttgaagagaatgatgcttttggaaagagagggtattgttgagtccaacgatacccattgggagcaagatctacgagaaatgaataataaataa

SEQ ID NO: 145656 - DNA, 576 bp, Enterobacter cloacae
atgagaattgaaggtcttggtttaaacaatgaagaagtgctggacaggatttgcgaggcttacggattttctcagaaaattcaattagctagacacttcgaaattgcatcaagctctcttgctaacaggtacagtcgcgattccatttcttatgactttattgtgcattgcgccctagaaactggcgcaaatctcgcttggctactcaccggcaaagggtctcctacaaccggcaatatgaataccgatacccaaaatgtggagaaattcacattaagtgaagagtctctggttagtgatggcgatttgagtattgctggcaagttctttagcaagccgcttacgaatccaattgccgtctacgctgacggaaaactccatttcatcgagcgagacgcatccctatcagatggaaaatggctcgtcgatattgaaggtgctattagcattcgagaattaacaaaattgccaggcagaagactacatgtagcagggggcaaggttcccttcgaatgtggatttgatgacattaaagcattaggtcgcgtgatgggtgtatacagcgaggttaactaa

SEQ ID NO: 145657 - DNA, 222 bp, Enterobacter cloacae
atggccgacgcaatggatttagcacaactgcgcgagcaggaagaccgcgaacgccacatcagcaccgcgcgtagccgtatcgcctcaccttcccgttttctctgcgaagaatgtgacgaaccaatcccggaagctcgccgcattgcgattccgggtgtggccttttgcgtgacctgtcaggaggtcaccgaattgaaatctaaacattttcggggggtatga

SEQ ID NO: 145658 - DNA, 363 bp, Enterobacter cloacae
atggataccttaatagcatttttatctctggctctctttattgcttttatcgtggggttaatcaagccgtcgctggttcgaatgccgaaccgtaagcgctctagtgcggtttaccttggtggctgtctggcgctgggcgttattggctcaatcttatggccgactgaaaaaagtcagcctgtggcaaaaactgacgtacaggcggttaaagcggaaccggctacgccaacgtttgagtacgcagataaaaccctcaaagaatatcgcaacgagccaaaagaaacccggcacgatatcgttaaagactatgtgggtttcaaaggtgtaccggctagggaaggtgcgaacaagttcctgatatga

SEQ ID NO: 145659 - DNA, 651 bp, Enterobacter cloacae
atgaaagatatccttagaaaatcaccaattgaaaggctttgtgtatctgtctcaataaccccgcaggaaatggcattggctcttgcggggttaaaccctttgactcgcataagtgacgttcctgaagagtattatgattacgttgatcatacacgaagggcaattgccagagccttaaaggtatacagagataaaaagataactacagatgaagcctgtaacgcattggatattcttttagccgctttcccatttgtggaagagagcacgccagaaataatcacccaaaaagtgactgaggctatcgacgatttacgcggaaccaaaggatgggaagagaaagcccgtaatttaggcggcctacatcttgtgaactacattaaagagacgaaccgaagcggacgtgggcaacaccgcaaacaggatgaagaagacggaacaatgaaaatgatgggcctacttatccagttactggtaaaaaaaactggcgcatcttcatacattaactcagggaaaccgaatgtaacggctatctataaggatgtgatcgatttattggagtcagaaggcatttccaaaaaaggcattagtagggcagcttttgcggcaaaggcaaggcaggctcttttggcgatccatagccctgattaa

SEQ ID NO: 145660 - DNA, 438 bp, Enterobacter cloacae
atgaaaaaagaaaaccgccccggacagcaggcggctaacaacatagatattcgcggatctgatgttacgccaccagcgcccaccacacaagcgccacgccgcacaccgaagaagcaccgcgaccgcgtctacatgctacgcactggcgtagagggatggacagaaaatgatattctgcgctactgccgtctttcatccgggcgtaattatgcgtctgaactggagcgccagcttgatattcaactagagcgtatcgacgagaaaaacccggatggtatcggcgcacacctgcgctaccgcttttcctgccgtggcgacgttcttaaggtgatccaacttgtgaaccataatgctgccattaatgaacatcacgggctatctcagcaggatattgccgacattctgaacctctacccggacgcatttaacgccgcataa

SEQ ID NO: 145661 - DNA, 297 bp, Enterobacter cloacae
atgattgccgccctgcaggaggtatatggcgatctgtttttcaccgagcaaaacgacggcgggatgcatatcgtggcgttcctgaccaaaggaagccgtgaccgggaaatcgcgcgctgctggcaggaacagcagctgcaggtcaatgcgctctcggagtggtatcgcgggtcgggcaaacgctacgggctggtgatgggctataacaacgtgcgttcgtatcaggaggcaatacagcttctaaaacggccctattcagaaacaatcacaataatagaaaatcatcttgaaccttag

SEQ ID NO: 145662 - DNA, 480 bp, Enterobacter cloacae
atgtcttcaaaagaagatttaataaatgcctttaataaatcagcatctgataaagagattggcgaaaaaagaacaaatgacgacatcaaagagtttcaagagcaagtgcgaggccttataaacacaatggttgagtggcttgaaggaactccagtaaagatcgaaagaagcgaatcaataatcaatgatgtaacaacagcgccaaaaacatattcaattgaatctgtagtgttatctaatgataacaagagaatcagtttttctccgacgtcattatatcttatgggctccagaggtgaagtggaaataaagtacactggtatcaatagaaacctaaaatgtaacctgtacatgagggattctatcggtggtgctagtgagccaggtgtatggtcactagtcgatggcaatgataaaagaaataatcgtcgacctttcacccaagacgtcttctacgagttagtaactcgaattgcatag

SEQ ID NO: 145663 - DNA, 369 bp, Enterobacter cloacae
atggagaataaggctttcgacatcaaagagtattcaagaataacatatcaaatactaattgatatatcgcgagtttggtattatcggaagctaatcacggcaaaattactatttgataatggtctgagtattgactcgatagctgaagaattcaatgtttcacgttccaccgctgacaaatatatcaataaattcaatgagatagttaaatctcaagactctgaaacgcaatacaaatttttcgtcgcactacaaactccagataaaagttgctgccctgaaacaatggatagaattgtagaatatgtatatcaacttgatgtgcataaagaaaagtggttttataaatttactgtgaagtccaattaa

SEQ ID NO: 145664 - DNA, 144 bp, Enterobacter cloacae
atgagaaaagcggtttctattccagttggtaagctcaatataaatctggaacatggcacaatagaaaatgcattctccgaaaatgaattaaatatggtttatgctgatttctacatgaaaaacagcatctccggaaatgcctga

SEQ ID NO: 145665 - DNA, 192 bp, Enterobacter cloacae
atggcaactccaaaacgaacaactatggctatcgtggctgaacgaaagctaaaactcgaacggctggcgatcgatgccagtcataccgctggacgtgcgatcacttggactgatatcgttaatcatctgattgataattatgcaaaagatgcagcaaaggatctgattcacacaaccaagtccagcgagtaa

SEQ ID NO: 145666 - DNA, 1290 bp, Enterobacter cloacae
atgacccaaaaaatgtctctcaaaaatggggtttgcgatgaacataaatttgtcatttcagcctgcggcttcacatttcaggggtattgttcgatcctcaataagtacgggatccacgcttcccaaattcactttaacggagatgaggcatcccaacaggatgttgaaaatatccttaaaaatcaggatgcccatatcgtggtgttcctcgggaaaggtgtcgtaaatctcctggaaagcctgaagcgactggcctcggtactcaatgtactccccgttattcggcatgtcaccctgtatggtgatattcctgacggctggctgtaccgcacgctgggcagtcttttaaataacagttatcaattatcattgattcgcgtagccagcgtttcggatgtagtaggctgttttaatacccattacaaaagctttaaggatcgttcccgcgtattacgcgaacgctacatggatattggctctgaagaaaatctaaagtggttaacaagaagagagattgacgttttattaaatttctatcgtggtatgtccgtaaaggaaatgtgcgatagaatggggttgtcgaataaaacggtttatacccaccgaaaggaaggcgtgcttaaattacgtttaattaagcgctggttacacgattcgcacaattttaaagcagataaacctgataaacacctgcgtcaaaaagtggggttcacggaaaaagaagccgaaatttttaatgcgttacgtaatcgggaaatattcccggcatatcagattattaccgatcgagataaaaaaggggttgggtttgaaatcctgattcgctggaataaaaacggtaaaattgtcaagcctgccagttttttaacggatgtttccagtcatgaaatctggctgaaaattacggcgttggtcatccatgccgccgtttcaggtattaataagtataacgggaaatactatttttcagtgaatattccgcctcgtctggcgtccggaaatgctttgcctgatatggcacggaaagccatcggcatgctgctcaaaccgcagtgggccgaaaagctggtttttgaatttgcagaagatattgacgtgacgaaggacaaaaggatccctgaaaccatgcggcatttacgcaatacggggtgtcgattgttcctggatgactgcttctctaaggaaggtgcgaataagcggggaaattcttctcggctgactcagtcatttcatttcttcatgtttgagccgattttttctcccgtaaatgccttgaatcagcctatttag

SEQ ID NO: 145667 - DNA, 951 bp, Enterobacter cloacae
atgaacttagtggatttaagaagtgaagtcatcaatataatttcgaacataactggttcgcgtttaatttttttattagatgacgggactaactacgtaccaaaaatttccaaagtagatccctcatcattgaaaagcattactactggtttcgtagacagattaaagactgaagtaattgataatacggatttaacattaccattgctttcaaatattgatgaacgtaagaacgctctataccaatttgattaccaaaaaaagccacaagagtttacagcattggagtcagcagcaaaactaccgccaaactcacaagaatattacattcccactccctcttttgaagatgttaaagcaatcgctttcattatctttggcaacggtaaaacaatatctctttacaagaataaaacacctctgactgtattgaaaaatacatctaatcttgttaattttgtaatgaataaacaaggaatccttgaggagttgacagaaaatgtgtttaaattagattttaactttgacctttttctattggatggtcaatattatgttaagaaccatagaacattagaagtagcaatgaaattccatgaaataatatcagaacaagcaacccttgcaatttcctcacttgcagactcaggaatgattgatgatattagccatttgcaaaaaagttcttctgaattatcttctgcaagaaaattggcaaaaattgcaaaacactcacctgtattagggaaaattgattgtccttccgtaattagcttcgtttcaaaacataaagtactttcaggtgttttaaaattaaatgatagcggcgataaatttatcgtaaaaacgaaggaagcccaaaagcattttattaaactaatgagtgatgattatctggagtctgaactgacaaaaattctatatgatagtttagcaaaagatgttctataa

SEQ ID NO: 145668 - DNA, 573 bp, Enterobacter cloacae
atggtttcgttgatcatgctttttgtgttcgttttgatactaagtgccaaagtaccattctgctttggtagtggttgttctttcattggtttcaaaacacttatatcttcgaatatagtcccattaatatgtattgctctgatattattgggggtatattttttcattagattcaaaaacataacaaaatacaacggacttgattctgttaaaattactgaatgccaaagtgagagctatgaaaacttaacatttcttgcgacatacatagttccttttattgggtttagcttcgatgatccgcaaaagaatttagcttactttcttcttataattgttattggcttaatttttattaaaaccgacaagtattatgctaatccaacgctcgctctttttggttacaaactatacaaagtgagcattactcatgcatcaaatggagaaactaaaaatctaatagccattacaacagataatttagtcgtgggtgattatgtttattacagcttttttgatgaactatttttcatagcaaggaaaaacaatgaacttagtggatttaagaagtga

SEQ ID NO: 145669 - DNA, 147 bp, Enterobacter cloacae
atgatgatctcatatcaggaacttgttcgcaccttccttagcaaaaatggcgagaaaagttcagattcgaacttcacgttgtcagaacttcttattaggaatattcctaatagcttaagcggggaaatgaaattaaaaaaatcctga

SEQ ID NO: 145670 - DNA, 393 bp, Enterobacter cloacae
atgtcaaatatcaccatgaccaacaaaatcatacacattcatctgtcgagctggcgctactttgcggcactggcgctgccgccattggtgctgatctttaacctcttattttcagccggttgcgttttgctgatgggactctttttcctgactcattattactgctggcgcctatggctggacgaacggctatttaaactcattgagaatgaacacgatctcattgagtttgataatgggatggcgcattttggggtaaaaagaaagggaaatactcgctctcttgttgaacgttggagtggggcaaaagctatattttttaaggcaattttttctttattggcgctgtggtttgtttcatcgtgcatggttctttaccagactctgggttaa

SEQ ID NO: 145671 - DNA, 1671 bp, Enterobacter cloacae
atggacaatggtttcgatgaggattatatctcaagtctgacagatcgagttttcttaataaaaagtcaacttgaggcaggaaaactaaaaatagcaggccatcttatcgatgggttcaaagaaagctttaacaaaatcagattgagaccggatggtaaagttgatcctgccactgttgatggccgcattagagcgatgggaactgctgttaatcatttttttgaacgtgacgaaattaaaaaaaaatacaacatcattgattttcaagaaacctacttccggattctatttggtaacttccagcaattttacactgatttaataaaacacaatgcagaaccctaccaagtagcaagtgttatttctaaagataaaacatttgttgaacatttggatcaaatatttccggacttgatgtctcacatcaaagagttctgggatgcagcatatgagattggtgaaattcacctacaagacggcgaacaattaaaagcaaatttcgcgggagaccttttcccttcatacaaagaaaatgctgtatccagcacaggcttgtacattgacacaatgatattaccttgtcccattttaagggtaggtaggctacacggagttaccaataaagaacatttttgttttttattattaaaacacgttttaacatgcatgacataccgtgatttagcccttgaagatattcagcccgccatagtgttagtacttccggataaacgtgacttcagcaatgatggtaatgaatatctacatgaacgctccacaccgttcattctttcacatgcccgatatttatatgaccgggaatttgagagcatagataatttatatgaatttagtaaatcacttacagatattgataaggtttttaaggagcttaaacgaccagaccgtttaatctttgatattgattggggagttggtggacgagcacagttagaacgacatctggcagaccctgagcgtttaaaatcaccaattctcgaaggttgtccaggaatggaggtaatgttcacttgtactggccgcatgccccaagctcttgcagctaggttaaatgctcaagagttccaaagtactccttatatcaatgctgaaacgtcatggatctactatacatggttaatggaatacgaatctcttgattttaacgttgataatgattccttaaaagagttacatatggtcaatgcattgtctaagggaatgcagggtggattctcctggctaggagacatccctttaagtaatattttaaaaattaggcgtaatggattaatgccagaagtaagagacatcttatcaagtggcatttcagaagtgatcaactcatcacctaatgattataatgcctcatcacagagggtaatcgataatgttgacagagcatttatccaacatcaacgattcattgaaaaaataaaaaaagaaaagttaagaatattgggaatggaagtagccccctttatagtcaacggtgcttttggcattgcttcagcattaatcaacaagccggaactggctgtagctagtgtggcactagggaatctaggtttgccaacactcaaagacataaaaactagtttcaaaagtaggaaagcaaaattagaaaactacgaacgaactgccacaggtttaatgtttagtaaaaaataa

SEQ ID NO: 145672 - DNA, 177 bp, Enterobacter cloacae
atgatgatctcatatcaggaacttgttcgcaccttccttagtggaaggggtaatctttttttcaataacattattgaactgaatgttatggctgtgtttttatcattgcggttatataaagaggattttcagaagtatgttggagatctcaatttaattattatccaacatttatga

SEQ ID NO: 145673 - DNA, 315 bp, Enterobacter cloacae
atgggtaaaccaacatttagatcattttacgatgtggtccgggagcttgaggaggggtacggccatcaagagctgtggctctattcaggaatgacagatgcaacggcagatgatgtgattaacgccaaacataactggaagtcaccaaaaatcctgaaacgtaacggaagcattgttgcagaacgaatggataactcggactcatggcagctggttggtgactacaaaataccgctgtcccagcactgtgctccgccctggcaatcctgtctgatagatgcctattttaagggggcctacattctcattgaatga

SEQ ID NO: 145674 - DNA, 777 bp, Enterobacter cloacae
atgggaagtatgaaagagctgctctttgatatgcaggaagaacatcgtgatgaatggatctctattaattatcctgaagcagaagaagggaccccagagtgggatgcagctgctcaagattacagctggtttcaggaggctatggaggacgcggcagagcagcagtattttgtggcctcgctggccagcattcctgaccgtctgcaggatgccaaagatgaattgcttgagttagagaacctgatgcagttcaaccaaccgagaattgtggaacggatggcttacgttcattgtgtgagtgttctggacagcttccttatgtacagcgccagggcacttcttagtcatcctccacacttgcatcgatttctgcaacatgcgagttcttttgttcgtaaagatgagaaaagggatctacttaatcgtaaatggattgagcaggaacccgaagtggatacccctgaacaggcctacgtctggcgcgcccaggctcttgtggcgaagatgacgtttcagaaccacaaaacaatttccagatatttttcaaccatgctgacaacaccgcatgagtggccgttgaaggaaattgagggattaatcaagctccgaaacgcactggtacaccgtaatggcgttaccgaatctcttgaacccgtttatatcagttcggatagcgtgcagaatgctatccgcacggtacgtgcatttattgcagtcgcggcagaaacccttctgcaggaggatgcactatacaggacggatgatggcatattctga

SEQ ID NO: 145675 - DNA, 435 bp, Enterobacter cloacae
atgaccatgcattatgacctgaaccgaatcaacaccctgaccgcctccgacctggagtttatccgtcagcagggtgaggacgcgcgccgcgccctcagcgatgccgtgaccggcctcctgtcgacaccagaaggatggcgcgtctgcgccgaataccgcagcgagttcggcggcttcttccccgtccagtgccgcttcagcgcggacggcagtgatgactggcatctgtgcgtgtgcagccccggcgaagtctctccgtactggcttctggtactgctctcttccggcggtgatgtggtgcgtactctttaccagagcgacacgctccagcctgactggataaatcagctgatcgcgcagctggcaggtatgcgccgctttaactgcactgccagcaccgtggtgaacctgatgagcggggaggtgacagtatga

SEQ ID NO: 145676 - DNA, 261 bp, Enterobacter cloacae
atgaaaaatgtaaacgagctttcaaaagatgaattgttaaatgcaatagttgcacaagcaaaagagtacgcaacggtcgactttgatcagcttgaaaaagatggcattattaaaaaagttaggggaggttatttggttgttaaacatagcaaacttcctgatgcggctcgaaagttaatgaaatcccttaaatcgactaaagatggagtgcaaatgattattagtaaacctccaaaatcttttctggatttaggtaaatga

SEQ ID NO: 145677 - DNA, 861 bp, Enterobacter cloacae
atgatagaatttaaaccagaaattggaatgagagtttatattgatgagcagttagaacaatttggttttcagtttaataatggcttaacaacacttgaaaatttaaagactgtatttgcattacaaagaaggataccaagtgtcaaaagaagaatagtaatcgagctgccaggaattcaagtgcctaaggaaacagaaaaggcgtatgactcaatcagaaggaaacttacccttgggttatccataaagccacatctttctttaagcacttcgaagtacatatataatgatcttcttttaaactattggaatatccatcacttacatctttctgaagaaccatataagaaaggatactttaagcgaactggccccgttttattttgtatgttttttgataatgcagtagttcttatagacatcatgcctcatggaagcggacattcggatgtttgggttaatgaaaaactgataaaaaaactgcataaatacctcccggaatctatagaacgctataaagtaaaaggtattacaggacatgatttagattcaaaacaacgcctggcgttgcaaaaaagtcattgtaattactcattgaaaatggaagatggaactgtatatcaactgatggggataatgtctaatggtgattgtttccatgatatacatagattaatgcatgttcaaagaaacattgattatttcacacaagtaatacaagctgatgagaaagcatttaagcagtcattagaaataaatgaaaatgataatttaacattaacgatagctttttatgaaaatgatattaaactgtatgcaccagagcaaaaaactataattaatataaatacccctaaatga

SEQ ID NO: 145678 - DNA, 1671 bp, Enterobacter cloacae
atgtggcgatggataagcgggttaatgctcttgtggagtggctatggcgcggcggtgtgcccggtgtggtcgcaggcaaaagctgagaaagagatggcgtcgttaagcgcgcaaatcaaacgctgggatgacgcttactggaagcagggcgtgagcgaggtcaacgacgaagtttacgaccagcttaacgggcgcttaatgcagtggcagcactgttttggcagtgagccttcagaggagaaactccctgcgcgggtgggaagcgtaaaacatcctgttgcccagacgggcgtacataaagtggccagcaaagaggagttgagacagtggatgcgtgcgcggcagcatctgtggatgcagcccaaagttgacggtgtggcggtaacgctggtctatcgtgacggaacgttaacccaagccatcagtcgtggtgatggcctgaaaggggaagactggaccgggaaggtgcgtttgatcccgactattccgcaaaagctcaccggcaagctcgcgaacagcgtcttacagggcgagcttttctggctaagcgacaatcacattcagcggcagatgggcgggatgaacgctcgcgcaaaggtggcgggggcgatgatgcggcaaaaggataactcagttttgagcaagatcggcgtgttcatctgggcctggccggatgggccgaaagatatgcagacatctttagctgagctgtctcaggccggttttacgctgtcggcacggtatacgctacccgccgattctgttgatgccgtcgagaaacagcgcgccgcctggcacgtaaccggattaccctttgccacggatggcattgtggtgcgttcggaggatgcgcccgcaggggaaggctggttaccgggcgaaggcaactggctggttgcgtggaaatatgcgcctgcagcccaggtgaccgaggtgagtgatattcatttttccgtggggcgaacgggcaaaatgtccgttgtagccgcactggaacctgtgcaattggacgataaacaggtacggcgggtgagtctgggctcggtggagcgctggcagaggctggatattgcctcaggggatcagatccaggtcagcctggccgggcagggtattccccggtttgataaggtggtctggcgcgggacggacagacataaacccgagcctccagcctcgcgttatcatccgctgagctgtttctatgcttctccggaatgtatggaacagttctttgcccgactgacctggctcagctcaaagcaggtacttgatattgaaggattaggcgagtcaggctggcgcaccctctggcaggcacatcattttgaacacctcttttcgtggctgttattaacgcaggcgcaaatgcaggctacgcctggcttttcctccgcgcgcgggctggcgctctggcatcgatttaatctggtgcgcgagaagccatttatccgctggctcatggcattgggtgttccgctgacacaggcttcgctgaaggcgatggggaacgtaacctggcagacgttgagcgaacgtaacgcaaaggactggcaaagcctgccgggaacgggagaggagaaagcgcgacaaatcgttaactggatgcacgcgcctcagattgatgtgctgacgaaatggctcgctgaacaacacatcaacgggttctga

SEQ ID NO: 145679 - DNA, 771 bp, Enterobacter cloacae
atgaccaaagggtttgaagatggcgatcaactgattaaaaattggcttcagaacaagaacaccatagaatttttgactgtttgggagaaaatcaataacccgagttttaatttggtggaattacaccagattagaaatgagctaggttcgaaccggttcatcatgtctgctaaaaagtggatagactccacaaacgccataggactggtagctaaggctggtcgctatggtggaacatatgcccataaggatatagcttttgagtttggctcctggctcagccctgagtttaaactgtatcttattaaagagttccaggacttaaaggagagggagtctcaggccggatctattgagtggcaaataaacagagagttggcaaaagttaactacagattacaaactgatgctgtacaaagccacctattaggtaacataccgaaagataagcaaggctgggtttatgctagcgaagctgatttaatcaacaaaattatttttggcaacaccaaccaagagtggaagtcaaaaaaccctaatgctagtggcaatcagcgcgaccacggcagcccgattgataacgctttagtcgcaaacttagaagctcaaaactccatacttataaaacaaggggtttctccaacagagagagctaagcttttaattgagctggagcgctcgttcagagcaactatgagcaagacccctgctatgatgcgattggaaaagcaagcaaactcccctctattaaacaataaaaaagacgattag

SEQ ID NO: 145680 - DNA, 882 bp, Enterobacter cloacae
atgcagccattaacagaacttgaaaatatattcttaggcagtttgtggattgacaagaaaattccaccattggaatactgttcttttgaacgagccgccagactcttagggtgtgagattgacgatttactacacctacacgacataggtgcttttaacattgcattaaaattagatggacttgctgtaaagttcactgttgagtttgaagatgcaagtaaaaaattagatgctgacacaatacatccaatattgaccaataaaacactcgaaatggagtcttcaacaatcatttataaccttaacgatgactccatctttaattttgaaaatggtttccatatcaaaggatttgcctgtggtgtatggtacacagattttatattacctgaactaaaaaatggattgattattgaacctgaattcgaagccactcttaaaccagtaaaagtgcgagatgatgtttcgagagcattagcgttgtatgaaggaaatactgatgttgaagttccatttgaagatcttcttattatgcggagagatttagaattaatctggaagtccgtaaaaactggaaaaccattacccggtatattgaccggtaaaatcctatctacacctaaggcatcaaaaccaatcagcaacactgcagagcatcacgctagaaatagagaaggcctgttaaatgctgcaatatttatattatcaaaatacccagatgaatgtcgcggatcaaggaaggaaataagccctgagaaatggactaactctataattaaacatctggacgaactacctccagtattcattactaatgagcaggaaattttaagaaaattacgactagctgttaatcatgcaggattaaagagaaaggggtag

SEQ ID NO: 145681 - DNA, 1254 bp, Enterobacter cloacae
atggctttaaacgagctgtcgcctaaaaaaattgagaacgccaagcccaaagatactgactacaaactaacggatggtggaagcctttatctgttagtcaaaaagaatggaaccaagacgtggagaatgaattatcgctttaatggtaaacaagctacgttggcattaggggtttacccggacgttcccctagcaacagcgcgaaagcgtcgtgacgaagccagagaactgctggccgatggccgagatccgcgagaagcaaaaaggtcagaaaaggatgaaccgacttcccccacattcgagaatgtcgccagagagtggcacagtggaacgatgggacatcctgaatggaaggaaattacccgcaccaaaattctacgggaaatggaaaatcatctgtttccggctataggttcaaaacccattgatacgttaaaaacccgtgaccttcttccaatgttgattgagatgaccagacagggcattggtgcgaccactggacgggtgaaaaccactatggggagtatctttcgttatgccgtccaacgtgggattgtcgattacaatccagcccacgatctgaaaggtgcgattatcaatcccaaagtaaggcatcgtcctgcccttccgctcgaacgtttaccggagctgatggcgaaagcggtaaattacaccggcagaccattaacccggctggcggttctcttttccttgcacactttcgtgcgctccagcgaactgcgccatgcccgctgggaagagatcgacattgaaaacggtctttggacaatacctgggcagcgggaaaagatcgctggggtaaaatattcagatcgtggtgccaagatgggtgcggtacattacgtcccgctttccacccaagctattaaagtacttgaggaaatccaaaagatcagtggtgaatatttgctgatattcccaggtgacagcaatccttacaagccaatgagtgagaacaccgtaaataaggccctgagaacgatgggttacgacactcaggctgatgtatgcctgcatggcttccgggcaatggcctgttctgctctgactgaatcaggactttggtctcgtgatgcggttgagcggcaaatgagccatcaggaaagaaatgaagttcgggcagcatatgtgcatcttgcacaacacatgcaggaacgccgccagatgatgcaatggtggtctagttatttggaactgaataaggaagaatttcatgcgccttataacctataa

SEQ ID NO: 145682 - DNA, 822 bp, Enterobacter cloacae
atgacccgattagccagccgctttggtgcggtaaatcttattcgccgtgaccgtccgttaacccgtgaggagttaatgcattatgtaccaagtgtgttcagcgaagacaagcatgagtcccgaagtgatcgttatacctgtattccgaccattacccttctcgataaccttcagcgcgaaggcttccagccattttttgcctgccagacccgggttcgggaccagagcaagcgagagcacaccaaacacatgctgcgcctgcgtcgcgaaggccagatcactggcaaacaggtccctgaaatcatcctgcttaacagtcatgacggctccagctcataccagatgctgccggggctgtttcgtgcagtctgccagaacgggctgatttgcggtgagagttttggtgaggtacgtgtgccacataaaggcaatgtggtggagaaagtcattgaaggggcttacgaagtactggggatattcgaccgtgtggaggagaagcgcgatgccatgcaatcgcttttgttaccgccaccagcacagcaggcactggccaaagcggcgctcacgtaccgctttcgcgaagaccaccagccggtgacggaatcacagatactttccccacgccgctggcaggatgagagtaacgacctgtggaccacctaccagcgcattcaggagaatctgattaagggcggtctgccgggcagaacgaccaaaggcaagcgagctcatacccgtgcggtaaaggggattgacggggacgtgaagctcaaccgggcgctctgggtcatggcggagaatatgctgcacctagcgtcctga

SEQ ID NO: 145683 - DNA, 366 bp, Enterobacter cloacae
atgcattacattgatgaaactttagcaaaaggcattgtgaaaagagatttgcggaactggaaaggcaatgcatctgaattaatgaaaactattgatgttattactcgggagcttaagaacttcaaaacacgtgacttacgtgaagaagcgattttaaaaaaaataaaacaaatgcacttccctttctttcatcgctatgttcctgcaatacattccaattcctatggaattttaagtaaagttcatgactccgattgtgttgggttgagtaaaaaatacttgaaaaaatgtcaagaatcagaatcaaaacttttatatgagattcataagcaaaaaaaagtatggttaatgtttttgttgctttag

SEQ ID NO: 145684 - DNA, 1557 bp, Enterobacter cloacae
atgagaattaaaaagcctcaccttcgtccgatagtcataaccttgtccgttggtgggattttgttaacttctatttttctgattgccgttattatggtttttcagcgcgaaaatatagaaaaagatttgcttgatgctaattcatcgtacgctatgaaaatgtcagatgtaatgagtggttatattgaaatggctcaaggtgaattagcatatggagcaaaaaaaataaaatcaactaatgatattgactcacttaaagatgaggcggataggttaagattgcagtctggtatgtttaattcagtttttgttgttagtaatgatgctgttgttctggcgacttcgccagaatctcttgatttagttggtacccgcttgaattcaagtgccagcaaattggcgattgaggaaaagaaaccattcatatcttcaccgttcaaatcagttactgggaatttgattattttgttgtcacatcctatttatgataagaatggcaattacatagggtatgtcggtgggtctatatatctaaaaaaacatagtttatttagcgatgttttgagcaggcattttttcaagagcgacactgaaattagcattgttagtgatgatggaactgtgatctttaataacgataacagtgctgttggtcggcccatggttatgtctgatgatttgaaatcaaagttaacggagtctgatagaggtgagggggaattttttttttcggggaatagatatcttctgggttatgctcatatgaaaaatactgcttggaatgtgttggtttatagccatgctgacagcgcgactactattcttattacttatgctaaaagtgtacttgttctgctaattgtaataattattacattttcacttctttcatatttcattgcctcccgtatttcacttcctttagaaaagcttgctatatctaccaatgctaaagatataggggcttcgttagtttatattaaagctatcaatgcttggtatgccgaagctgatcgacttaaaaaggcactttttacgcatgttaaggtaatgatggaaagggttgattctttaaatgaggtggcgcttaaagatccccttaccggcgtgaacaatagattggggttttcaactaaaatacagaataacaagtatggggcaggagcttcagttattgctattgatgttgatttttttaaaaaaataaatgatagtttcgggcatggggtcggagatgaggtgcttgtttctttggctcagattattaagtcttgttgccgtagtgaagatattatttgtcggtttggtggagaagagtttgttgtttttctgccgaatacatctgtggtaacagcggagtgtgttgcggagcgtattaggagtgttattgaacgtactgttttccctaataacttgcgtgtcaccgtatctgctggtgtggcaacacaagatgatcctcttggtgggatcgattttttgctgaaaaatgctgacgatgctctttatcaagctaagagagaggggcgtaataaagtgattgtatatagcgctatttga

SEQ ID NO: 145685 - DNA, 570 bp, Enterobacter cloacae
atgtggcaggagaaaaatgcagcagcggagcgtcagcagaatatgcgatacaggatatattccgcttcctcgctcactgactcgctgcgctcggtcgttcggctgcggcgagcggtaccggcttacaggcggggcggaaatttcctgggagatgccaggaagaagcttaacagggaagcgataaggccacggcgaagccgtttttccataggctccgcccccctgacaagcatcacgaaatctgacgctcaaatcagtggtggcgaaacccgacaggactataaagataccaggcgtttccccctggtggctccctcgtgcgctctcctgttcctgcctttcggtttaccggtgtcaatccgctgttatggccgcgtttatctcattccacgcctgacactcggttccgggaaggcagttcgctccaagctggactgtatgcacgaaccccccgttcagcccgactaccacgttgtcccggtaactatcatcttgagtccaacccggaacagacacgaaaaatcgccagtggcggtagccattagtaagaggattcacggagcggagtag

SEQ ID NO: 145686 - DNA, 294 bp, Enterobacter cloacae
atgccagtactcgaaactggcatcgggctgatgtacttgcagctatacgcaagaaaggtagttcgttggctaagttgtcccgagacaacggcttacatgaacgaacgctatacaacgcccttgagaggcattggcctaaaggtgagcagatcattgccgattatattggtgtcacccgagaagaaatctggcccgaacgttacagcaatagtgaggaataaattgtggcatacgcaacatatacagtggtttgtccgcattgtggaagtactacgacagttaacaccggaataa

SEQ ID NO: 145687 - DNA, 603 bp, Enterobacter cloacae
atgataactgactggatgagtgccatagcaaatactgcaatggcagtagctgcggtttacgctgcattgcaggctaagcgttggttttcaaatttgtcatataccactgctttcaacaaggctgctgagtttctcgccaaaatcgatcaagaaaaggatgagattgatgatgctttcagtaagatatatgagttacaagattatgttcttgctgtaaatagtggaactaaaaatcccgatgattcagtaataagaaattacgaacgcctcgtagattataatttagctaagtgtaatatcatgaaaaagcacttacaagaatacaataatttaaagcgttggcctattgcaagacatcaaagcaattcaattgaagagttgataaggtctaaagaatcagtatacatatcaataacagcaacatatgatctggctaaacattttttgctgagttacaggggagatgccgtaactaattcggtcatttattttaatgaattcaaaaaatcattgataacattacatcattctaaaggtcaatatgatgaattttataaaggctttaacaataattcattttccgattattttacagctaaatga

SEQ ID NO: 145688 - DNA, 177 bp, Enterobacter cloacae
atggcagtcactaacaaaaagccgattcttgttgatcagccgattctcgaagggttacagcgcctccgggatgatgaatgccgacgttctaccgtaggcgcagccccaagcattcaggagctggcgcgtcaccttttgcgccagggtatccaccggcatgaggcgggcaagaagtaa

SEQ ID NO: 145689 - DNA, 777 bp, Enterobacter cloacae
atgccgctaatgaaactacctgcatgggcgcaaacagcgttcggtatgaaaggtaagaaaaaacagccccaactctctgaggaaaacccatccatgtttgatttctcgcatctgtcaggcaaaaccaaaacgaaaggcgagtccgataacggtaatgagccactgaaacaggatagtgacgatattcaggtatatcgcccaaaccagcacagtcgtggtcacaatgtcgcggtgtctactgaggctaagaacaacccggttctggctgttcgtttgctgaaagaaacaaagctttcatcgaagaaaataaagcagcaactggcatcgtcgccgatggcgctttctgtgtttacccagaaatttatggaagagaacgatccgacctgggagtttcaggacgacgaagagaaagcccgaacggcgctgatgttttcaacgcagaaccgtgacgcaaatggttacagcgctgcccagagtagcgctatcaaggcattgaaaaaaatggaagagcctctgacagaggatgaggtcaaggcattagccaacatgacattgaagatgcaaaacgagtacgacccgatgtcgcctgacaatgtcaatgctcgccgcatagcggatgaggagtaccgggaggaagtggcacaggccacagcacgccgcaatgatcgtatccgggcatctggtgtgagcctgccgggagatacccgtcgcgttaatggcaagattgaagggccggcacgtgaagctgagcaccttaaatcacaggtttctctctga

SEQ ID NO: 145690 - DNA, 492 bp, Enterobacter cloacae
gtgagcattatgaactttcagcatctcaatccgccgcagcccgatgcgcaggcatatggcttttccgggcgccgtatgcagcacatgcatcgacttcagcagtctgttgaagacgagcaaccccctgaacgtcgccattctgatgcacatctgatcgcggtgagaaaagaggccaaacaaaacccgatacaggcacttcatcttatcgctgaagggataccacaccagcgtgccatcgccttactgcagggcagcgttcggcagctcagtcgttttacccgtcgggccatggagaaagcctatcctggctgggagctccttgatgccgaagaccagaacatggcggcattccagcacagcatgattaacggcgacaccaacggctatcgggctggttttaacgctgctctgtcggcgctggagaagtttgtagagccagttacgtttgacgatatcgtgaatagcgttaattcgctggtggaggaagtatga

SEQ ID NO: 145691 - DNA, 585 bp, Enterobacter cloacae
atgttaatgtcagtaagtcagtacgccgagcacagcggcatgagtcgccggtcattttacaactgggaaagtaagcagggattccctgcgcgggttgacgggaagattgaccaggaggcttgcgacgtttatctggcccgttaccgtgacagccatgatccgcgtgctcagaatgcgaaaagcaaagtagtggcatccggtggtcgtactgttgtgagtaacgctctggtagagatgagcgttgcagagattaagtgcattatggcattgggtgccgaaaaggtggccgggatggacccggacgaacgcgctcaactggccgctaaggccgtagagctgtttgtaagcgaaggcccctataacccgcctgtaacgttcggcggctaccggctgtcgattgttgaaacgcctgatgatgaaatcgggcagatcatcgccggtggcgcgtttggcctgtctgctgatgatgtggtttacgagtgccgggattacaccctgactctcatgagtgatgaaaccgaagaaacagccatgcggagggttatcccttcgttactgtacgccctggccgacgataccgactaa

SEQ ID NO: 145692 - DNA, 270 bp, Enterobacter cloacae
atgagcaaatcaacagcacagcagatcgcagatctacaaaataaattacaagcactaagaacaaaaaaagcaaggcaggacagacgggaagaaacaagacaaaaaataatcctgggtgcagaagtggctaaggtgttagataaaaaaccagaggaaattaacaaggctttaattcttggcttgttaagtaaaatcaatgagttagacgaagaagagaaaagagattttacacgaatcggaatggatatattgcaacaatggaaatcgtaa

SEQ ID NO: 145693 - DNA, 390 bp, Enterobacter cloacae
atgcaatatagaggtttagagtttgaagaacaagagtttaacgactgtttaaacattttacataaagaggtagtgtcttttttaaataaaaataatatggctctggattttttccagtatccagttgaggatatatgtagaataatttttcgagataaaatagatctgagaactgctgttattttagattttggaattacaacatatgatttaagccctttgggagatcacgatccttttgtttggcggttgcttgaatggccattatatgattatgagaatttccagtttgtgattgttcaaaaactggcttcttatgaattagataaattaaatgaaataatccaagtagaagataacaaagataataaagataaaaggaggttgtaa

SEQ ID NO: 145694 - DNA, 165 bp, Enterobacter cloacae
atggaaaaagaaacgctcggccctgatatacaagtcaattggtgtgatcattgtgaaaaaaacactcgccatatatttagatttactgaggagtattcaaaagaagagggaccaattacagaggttgaatgtactaaatgtggtaatacattcactatcttatag

SEQ ID NO: 145695 - DNA, 1194 bp, Enterobacter cloacae
atggcgacatttcatatcagctttaaaaaattacgaagatcagaaggtaaatcttcggtttatttatctgcatatcaaaaccgagaaaagacaaaagataatcgaaccggggcaacctgggattattcaaaaaaagagggatttttcggctctgctatcctctcccctgccggcacacctgccgaactggtgaaggactcaggcaccctctggaatgccgtagaggctggcgagaagcgaaaggatgccgaattatgtcgctatgtggacatagccatccccaaggagctggacgacggccagaagaagcagatcgtcctcgattactgccaagaaaatttcgtggattatggaatgattgcagacatagcatttcatgatcttgatagtcataaccctcatgctcatgtaatgctaactttaagaactgttagcccaaatggatttgggaacaaacaaagagaatggaataatagagaaaatattgaagcctggcgagttaactgggaaataatagcaaatgacagattaaaaaaatatggtcataagtcccgtattgattcccgttcattaaaagatcaaaaagaagaggcagaaagaaaggctgtttttgctaaaactccgaaagagaaagccaagtggatttcaaaaactattgaactggacagaacgccaatgaccaggatacacaggcaccaatggcgaaaaggtcaaaaattaagagctatggagcaaaaagaaaaagcattattattaaaaatagctaatgcaacatacttacagcaaaccaaaccacctcagccagaggaaactatgaaaatagagaaaaagcctcttgcaaggtcaatcattgataatttaaaggcattatacaaaaagacccagcatatatttaaatcaaaacctaatgtaaataaaaataaaaaagaagaaaaagaagatcctcaaaatttcgttagtagttatgtaataaatgaatttggcgaacatatattaaagacagagttagaaacaaaacctaaaacaggcacaggaaccggaaccggtggaaataatggaggcggaaaaatgggttcaggctctggaatgtctcctatgaaccaaccacaaccaaaaattgaagagcctgagccggaaccaatgccggaattcgaagatcagcaacctaagaggaagaagaaatttggaatgtag

SEQ ID NO: 145696 - DNA, 858 bp, Enterobacter cloacae
atgataatacaagaagaacataacatcgatttttttaaaaatcaaatgcctaacaagccttattgtacaaataacctcgatatgggattaagcataaggaacaaggcaaaagccttagaaatgctgtatttacaggcaaatcagccagcaatccaaacttgcttactctttgatttagataagaaaaactcattctatacatttgagaaggtgggcttacccatacctcactttattacaaaaacaccaaagacaggtcgttgccattacgggtacatgcttaaagccggtgtttgtaagacacaacaagcaaggttgaagccgttgaagtatgccgctgccgttgaaatggctatggcgaaaaaactcaaagcagatctggggtttgctggattgattacaaaaaatccactcaatgatcactggtcgccgttctggtcaggtgctgacctttacgacctggattatttagctgattttgtggacttagaaaaacctcaaatacaagagaaaaaaagcgaggcttatggtttaggtcgcaatgttaatttgtttgaagatctacgacaatatgcttacagaacggttttaaatttcaaaaaaatatctactttcgagaaattcgaaaacgaactattattaaaagcacagggtttaaatactttttgcaatccactaaatccgttacaatacaaagagttaaaggcaacagcaagaagcatagcccgttggacctggaaaaattttgatagccatacattttcactaatacaatcttcaagaggtgcgaaaaataaaaacaaacccaagaagagtaatgttaaagaaatgcttggttttataggaggtgaaaaatga

SEQ ID NO: 145697 - DNA, 432 bp, Enterobacter cloacae
atgcgtactatcgatgtcggtgaagaagattttatgctggatttagagttaatttgtaatcatggcaatgtagaattacgtgaaaaatacaatgctgtcttaaagaaagtaattaaatcaataaaaataatccaagataatggcagtgatgataagatctttattattaaatttgaataccacactgactacgcaatgcattgtgttgcattaaatttagatggtagtttaattggatatagttacatagaagacaaaggtgaactatgcctaaaatcgtcctgtatggatgtaaattttaaaacaggtgatattaccactaagcatgcacctaattacattgagaaattgattgttaaatcaactttgggaaatatcgagaaaatattaaaggaatatgacaatagtttagtcgtggctgaaattatttaa

SEQ ID NO: 145698 - DNA, 360 bp, Enterobacter cloacae
atggaatattactccatcactactaatatcactgaacataatagtgaaagtgctgaaaaactcttcagtatattaactaacaacatcaaagataaatctttgattaatattctgaaaattgatctaagtttcatagattttcgtgcaacagcatctgattatattgtcatcaacgaagttgagcacatttgcgataatacatacagtgttcattatacgttagattattatatctataacctttgcaaagatatggatattgagggtgaacatctaacagcgatgaactttaacgtctatgatgatcacattgagttcgattttattgacattgttagagatacggtgaacgaattctaa

SEQ ID NO: 145699 - DNA, 432 bp, Enterobacter cloacae
atgcttgtagaattatttcagttcctgaatttattactttccctattcaagtatctgacacctcagcagaaggaacaggtagtagatgtttttgtagatttatttaaaaacatatttaaatctaagaaagataacaaagaatcagatgttgatagtactacgattcaagaagctgtcgataatataactcaagatcaatggcaaggttcaatagttgccacaatggcaattttaccatcttcaattaacgagattaacaaacgtaaatttactgctgctatggttgaattagtacaatcagatgagtttctttcagaattaaatgtccgcattaataaaattgatatcaaagatgtagatctttacaccgaacaatgttctcttgaaatgaggagattaatagcagaaatgatcagagataaaaaattataa

SEQ ID NO: 145700 - DNA, 1173 bp, Enterobacter cloacae
atggcttatgcaattttaagagtggaaaaaacaaaaaacacttcaatcgctggaaaaaattctcataatatgcgattgaggaaaacacataatgcagatcctaaccttaaatcccaaaaccgaattttaatcggttctggtgatttaaggactgatattaatgcaaggtttcaagcaaccaatgttaaagctcgtaattctacttctgttatttgtaatgaattagttttaacagcttccccagaattttttgcaaataacaaaaaattggatgattggattaaagttcaaatggaatatttgcaaagtgaatatggggaaaatgcaattaatgcagttttacatttagacgagcaaacaccacatattcacgcttttataactccaatcgaaaataaaaacggaatatataaactaaacaataaatcgtatatgaaaaaatacgaaacaatgcaggatatatattttaaatacaataagccattgggtttaatccgtggggttaaaaaagaggtttcgaatgcagaatataaggaagttaaagaattttacagcgatattaaaaacattaaaaatgaaaccgaattagaaatagaaaataataaaattgaaaaaattagagttgttgaaacagaagaaaagaaaaaattatttagagatccggaggtagtgcctaagcactacacaggagctgaggttaatcgttacatacgaaaggctctaaaaccttacaagaacgaacgaaagccccttatagctcgtctaaacgggtttaagagccgtttagagcattcagaggctgagttgtctgatctccgtcagaacttcaacagaagagtccaggaacgggtacaacaggagcaaaagttagcagtggccagagccacggctgagcaagaacaaatcattcaaaataaaaacagaaaaataaaagatatggagttggaaataatagaatacaaaaggcagttaaaggaaaatgcttcaatttctcagagatatgaaaaatataaaattaacagtgatgttttagatctaatacaagagcataaaccggcagaatttaaacaactcttcaatgctgctattgcagcagcagatgccgaatattcacagaaacagcaaaataataactacacaccccagaataagccaaaggctttaaaattataa

SEQ ID NO: 145701 - DNA, 600 bp, Enterobacter cloacae
atgaaaaagaaaaataatatagagtatttacagttaaacaatgctgaaaatagtgaggattttgatattgaacacaagaaaaatcctttcgtgttcaatatggaaattgatactaaaaagaaaaagctaactgttgatcgaggttctgaattagaaaccgaagaaggagtttttactacaacaatttcacaaatccaagaagtagataaagaggaatttttaaagctgtttactggtcaaattaaattctatttcgatttaactcaaacagggtttaaattatttttcttgattatgggtatttaccaaaagcaaatcggcggtgacgaaatttacttaaatttcgaaacagcaaaggaagaagctgaaaaatatgattatactatttcaaaagctgtttattatcgtggattaaaagaactattagaaaagaaaatgatcgcaaagtctgttaagaaatacatattttatataaatcctgcaattgtatttaatggcgatcgtgcaaggtttgttaaagagatccgaattaaggaagaagaaaaacaaagagaagcagatttaaaaagcattaatgaaagattggatcgatatgcttaa

SEQ ID NO: 145702 - DNA, 1590 bp, Enterobacter cloacae
atgcttgtcttttttgaaagatatatcaaagacaatggtattcaagacacattagccttagagaatttcattggtagtgtttcttatggagagcgtgattttaatattgaattttctgaagttcgtaaagagatatttaccaagtatactaacgatcaaaaaagtcttcctgaagcattggatgatgtagatagcatcccaagacttaatgatagcgatcgaagaataattgaagcaatgaaatcaattgaggatgctttagatcctacaattaaagataaaatatctttcttcatcgactatctcatggaaaaggttctacttattgacatttctgtatcaagtgaatccgaggcacatagagtgtttgtaactatgaatgacagagggttgagacttggtgcaattgaacttctcaagggttatattttatctagaataacggaccctgaggatagccaagaatgccatcaggaatgggttaaaacaatgtcgagattgagagataacgatcctgaaggtgattctttatttataagaaacttattgcgtgctaaatgggcaaataccattagaggaaaaaataaaggcgatgaagctggagatttcgataaaattaatgatgcttaccatcggtggttcgaagataaaactaatgaaattgggctaaacaactcagatgatttttataactttgcaaaaaaagacataccagaatatgctgagttgtgtcttatgctcgcgaatgcagagaagaaattaacccaagactatcctgatgtcttctataatggcatcagaaagttcaatttccaaacgatgataatactatcttctgttgagttgactgataccagagacatccgcaaaaagaaaatacaattaatatcaaaatacattgaccttatattaacaagtcgaattgttactaaaaaggcaaacacttatgacaacttaaaagacattgcctttaatttagcaaaagaagttagaggtaaagactaccctactttgctaaattatattcaaagcgaatggaacaaacactataccttgttggataaaatcccagaaatgacctatgaaaacaaatctaggtcagatatgctctatatgttagctcgcatcgcctctcatattgagaatcaactcaacattacaaataaagttgggtttgatacttatatgcagcgtgacaaaggaatgaaaacattcgatatagagcatattctccgcagtgtagttgataacactgtaatgccttcaacagcattaggtttcgcctcagacgctgaatataacattaaacgaaacctcatcggcggcttaatattattgcctcgttcaagaaatagatctttaagtgataatttatactcagcaaaacagactgtctacagtggagagaatatcctttgccaaaccttatgtccggggttctatcaaaacaaccctgaattaacaagatttttagctgacaaccctaatatagccttcaaggaatgccaagagtttaaagctgacacaataaccgaaagagggacagtgtataaagaaatcgcattaaacatttggtcctgtccacaatga

SEQ ID NO: 145703 - DNA, 291 bp, Enterobacter cloacae
atggatttttctaatctaatgaatactattggtgtgaaactaacacaagtagaactaacaccagaatgtactgtttatatcaaactaccttccattacccaacatacagaatgtgccgatccatataaggcaattttctattgtgtagttgatgaggacggtaaacagatttttgattcacctgaacaagttgaagcaaaagtagatcttactgtacaactaaaattgaatgctgaaattggaaacgttttcgctaaatccttcaatgttgaggatgtagagggaaagtaa

SEQ ID NO: 145704 - DNA, 135 bp, Enterobacter cloacae
atggcgtcacgtatgggcagacagctggtcaacagtgagagcgatatcgtccgtcagccagacagtagtgagcgtggaaggatgccggagcgcgaagaacagacactcacccgaaccattcagaaagaacgttaa

SEQ ID NO: 145705 - DNA, 879 bp, Enterobacter cloacae
atgaagaatatcaatatgataaatagtatccagaactttaaaattgcaaggcttacttggcgcacatttctgtcgctgggagggggagcgctcgtcagttcctgtatgcaacctgcacaaattatcaatcaggaatatcgcatactgacacctgattttcaggacacttttgatatcccgcctccccccgacagttcgaccgggagaaaaataaagctatggtcgactaacttttataccacgcaacccgtcgaggataaaaacggcgtcccattccgggataaagatggtatcccgatatcggataatgtcagtaagcgtagctggtgcctgggtgctcaggaaggttctgtcaaaacaacatttcatggggaggaaatcaggctcacgcatgcaggagtatttaagaaaaaacctccttattatatcgactgtgatgtggaatatgaaacccatactcatgatctgtctgcctatgggttaagttatcatgtaaaaaccaacgcaccgtttggcttaggaattaacaattactttttggttccgtaccggactatggctgtaaaggttaatgataattcaggtttaaaattaaaggcaggagacgtactttatattaatgatgtgactaacaacatgatcacagatccctacactggcaggaaattcaagcatgacggatatttctttgtcggagatgttggtggaaaagttaaagatatccatgctgacaccttttgtggtttccaaaaaaattgccttcctccgtttacaagcagtgatgacgatcatcattatatgtttacagccgtggttatcactgaccccgcaatcaaagaaaaactgctacgaatgcacttaaaatccagctacaggtag

SEQ ID NO: 145706 - DNA, 804 bp, Enterobacter cloacae; identical to SEQ ID NO: 100100

SEQ ID NO: 145707 - DNA, 1014 bp, Enterobacter cloacae
atgaaaaaaatcgacattcgtggttccgcttttgcagtaggtcaggcgcttggcgcgttcggccgcgaagcctggcatgcaaaactgacgcaaacggcgttgtggcaaaccgttaccgccatgaaagacgcagaacagacccggagcatgcgctcgctggtccagtctcagtatccccttatctggcaggaactggagggattagccgagggtctggaagcaccgtttgatgaggtgtttgcctggaactgccgcggcgatctggtgcgctcgacctctgacggctgtaccacggtagcgggaagcaccgctgagggagagctgattattgcgcataatgaagacggtttcccgcagcttcggcatgactgcgccatcgtcagcattaccccggatgacggcctggcgtttaccagttttgcctacccggggtcgatttgcggacataccttcgccgtaaacgaaaagggcgtggtgaacacggtgaataacatacgcgctttgcaccgtccactcggcataccgcgtcaggtattagcccgcgccgcgctgaatgccgccacgctggatgaagccatctccatactgactaccgagccacgcgccggtgcatttcaccatacggtgggacaaatgggagacagccgactgtttagcgtggaggctacgggaacaggctgttccgttatgccgctgcgggaggttttcgcccatgctaatcaccttatccaccctcagcttgatgcggttgagcaggtaatcactgacagctcccggtcacgccagcagcggctaaacgcctggctggagacgcaatctcaccttgatggtgcggcagcactgggtattctttcagagcagcatgatcccgcgctcccgatttatcgtctctcgccacaggacccggatgaagagaacacgctggccactaccgtctttaccctgagcacgtcggacataaaatggcagatattcactcacgatcggcaaaaacccgctttagagtcttactga

SEQ ID NO: 145708 - DNA, 729 bp, Enterobacter cloacae
atgagcatggttgagtttagcgcagtgtcgaaaaatttcggcgccactcaggtgctgcacgacatcaatttaaaaattgacgccggcgaagtggtggtgatcatcggtccttccgggtcgggtaagtcgacgctgctgcgctgcattaataagctggaggaaatttcctccggcacgctgctggtagcgggaatgcatcttaccgatcctcacgctaacgagtgtgatatccgccgtgaagccgggatggtgtttcagcagttccatctgtttccccatctgacggcgctggagaatgtgatgtttggtccggttcgcgtacgcaaacagagcaaagccgccgcgcgggaacaggcactcgcgttactggaccgcgttggcttacgcgaacgcgccagccactacccatcagagctctctggcggtcagcagcaacgcgtggccattgccagagccctggcggtgaaaccgaaaatgatgctgttcgatgagccgacctcagcgctggaccccgaattacggcatgaggtactgaaagttatgcgctcgctggccgaagaaggcatgaccatggtgattgtgacccatgaaatcggcttcgcccgcgatgtggcatcgcggctaatctttattgatggcggcaccattgccgaagatggtccacctgatatgctgctgaatagcagtcgcaatccacgcctgaaagaatttttgcaacatgtatcctga

SEQ ID NO: 145709 - DNA, 657 bp, Enterobacter cloacae
atgaatttcgacagtaaatatatttgggagtccctgccgctgttgttgcaaggactacagctgacgctggttatttcactatcaggtttattgggtggttttgttattggcctgctggcgggaacctgccgggcgctcggagggaaaatatcaaagacagtctcgttagtctttgtcgagttaatccgcggaacgcctattatggtgcaagtgatgtttatttacttcgcactccccatggtgctaccgattcatatcgacccggtaaccgctgccattacgaccatagtgattaactcgggtgcctatattgcagaaatcacccgaggggcgatcctctcaattaataaaggatttagagaggccagcctggcaatgggattatcccaacgcagcacgctatggcatgtcattatgccgctggcattgcgccgtatgatcccggcgttaggtaatcagtggattatcagtattaaagacacctcgctgtttattgtgattggtgtagcggaattgactcgtcaggggcaagaaattattgccggtaattttcgcgcgctggaagtctggaccgccgtggcaatgatctacctgctggtgacgctgtgcctgagtttcctgctgaagcaactggagaaaaggatccatattttatga

SEQ ID NO: 145710 - DNA, 753 bp, Enterobacter cloacae
atgtccggattattgactaaattaaaagttacgttagcgctggtcgcttgctccgccagttttgtggcacaagcgcaggataaattaacggttggcgttgataccgcatttgtcccctttgaatttaaacaaggcgataaatacgtcggctttgatattgatttgtgggatgccatcgctaaaaaaatgaatgtcagctacgaattacgcccgatggacttcggcgggctaattccggggttgcaatcacggaatctggatgtcgccatggcgggcattacgataaccgacgcgcgtaaacaggtcgtcgatttcagcgacggttattatgatgctgatttattaatggcggttaaaagcagcgacaataccattactaaattcagcgatttagcaggaaagaaagtgggattaaagcagggaacggcggcggccagctttatgaaaagcaaatataaggcgaattatgtcgaattcccgaatattgataacgcctatcttgatttgcaggcaggtaaccttgacgccgtggtgcatgattcccccaacgttctctattacgtaaaaacggcaggtgatggaaaagtgaaatcaaccggtgaaactgacagcattctgccgcagcactacggctttgcgatgcagaaaaacagcagtctgacgccgaagatcaacgcagcgctgcaggcgttacgtgcagacggaacttacagcaagatttacgtgaagtggtttgctaaacagccaaaataa

SEQ ID NO: 145711 - DNA, 555 bp, Enterobacter cloacae
atgatcaatcgtttaccgccgctggcggagcatgagtgggacgaccaacagcgtactttggccgaagagataatcaacgggccccgcggtgcgctgctgccccctttcgagccgctgctgcgcagcccagagctgatggcccatgcacaacgcatgggagaatacctgcgttatcgcagcgcgctgggacagcgcctgtcggaactggcgattttgatgaccgcgcggcactggtcgcagcctgtagagtgggcgattcatgcaccgatagcgcgcgagaagggtatttctgctgcggcggtgcaggcgattaatgaaaaacgtcttccagaggatctgcagccggatgaatgggtggtttatcacttttgtaaggagttacatgaacagcagaaggtcagcgataccacctggcagcacgctatcgcgctgtggggcgagaaaggtgtggtagatctgatcggaatcaatggttattacagttttctctcaatgattatgaacggcgcacagacgccggtacccgactcctgggatgagattattcccgcataa

SEQ ID NO: 145712 - DNA, 1329 bp, Enterobacter cloacae
atgagccatattattcaccgcagtctacgcaacacgcccgccgtggcggtacgcgctcagggggcgtacattttcgatgcacagggaaaacagtatctggatgcctgcggtggcgccgccgtgtcctgtttaggtcacgcgcatcctgacgtgctggctgcgatgcatcgccagatcgatcaactggcctatgcccataccagtttttttaccagtgacaccgttgaacagcttgctgaacagttgacgcgtacggcgccaggcgatcttaactatgcttatttcgtttcgggcggttcggaagcggtcgaaaccgcactcaagctggcgcgtcagtattttgttgagatcggccagccgtcgcgcaccaaatttatcgcccgtaaacagagctatcatggcaatacccttggggcgctcgcggtgggaggcaacgaatggcgccgccgccagtttgctcccttgttgatcgacgtgatccgcgtttcggcctgcaatgagtatcgcgaccgccgcgcagacgaaacccagcagcaatacaccacgcgtctgctcaacgagctggagcaggccattattgaggccggtcccgacaccattattggtttctgtgcagaaaccgtggtgggggccaccactggcgccaccccgcctaccccgggctatcttaaaggtgtacgcaacctgtgtgataaatacggcatcctctatatcgcggatgaagtcatgtgtggcatgggacgtaccggcacattgcatgcgtttgaacaggatgatgtggtgccggatttggtgaccatcgcgaaggggctgggaggcggatatcagccgattggcgcagtattagcgagcgagaagattgtctcagccctgcaggccggtagcggtctgttccagcacgggcacacctacatttgtcacgcgaccgccgcttccgcagccctggcagtgcagcaggtgattgcgcgcgataatttgctgcaggcggttaagcaacagggggcttacctgcacaacgcattgcgtgaggtactgggggaattaccgcacgtcggtgatacgcgtggacgcggcttgtttgccggcgttgagctggtacgcgataaagccagcaaaacccccttcgatcctgccctgaagctgcatgcagcaatcaaagcaaactgtatgtcacgtgggctgatggtctatccaatgggtggaacaattgacgggcaatatggcgaccatatcctgatcgcgccaccgtttattgtcacgcctggccagctcgactttgtggtggatacgctgaacaccgtgattcgcgaagagacgagcagattatga

SEQ ID NO: 145713 - DNA, 858 bp, Enterobacter cloacae
atgaatccaagggaaaatattgtcagtacattcagcgagttgtctgcagaattacagcgtgctgccgagttctcgctacagaataccaatcaactggttgtgctatcaatgcgtgccttcgccagtgaagccggtgtaaaacccgccacgttactgcggttagcgcagcgattgggttataacggctggggtgaactcaaggacgctttcattgatgaactcgggctgcgcaatgatacatatgtctccaaagccgagaagctgatcgccaaaggcactcagccgcagctgtatgaagaggtatttcaggcgcatcagagaaatttggcttttacacagcatgaaaaccatcaggccatggagcaggctgtatcgctgttggacgcggccgagaatgtctatatttgcggcttccgggccagtttccctatcgcctggtcgctgttttatgtctatcgactgttcaatcggcaagtctcgctcattgatgggctggcgagcaatatcgaggtgttcacccgcgaattaacagcacaggattgcctgttactcaccagctttgcgccctattcacgtgagtcgctcgatgtcctgcgcgcggctcagcaggcgggcgcaacaatcgtcgccatcacggattctcccgtctcgccattagcacaggccgccgactgcacgctgctgttctctatcgacagcccgtcgtttttcccttccgtggtgtcaggcatggggctcgccgagtgtttactggcgatgctggtcgcgcgccatggtcgggacgcagtgaataaaatcgaaaatgctgaacgctatcttatcgactctggcgcctatgtggtgcccggaaaaccctga

SEQ ID NO: 145714 - DNA, 477 bp, Enterobacter cloacae
atgcttcatagaaaaccctatcaggtttcagagaaatacgaatgctataagaataactatctggtgagtacagacagagaaaagcttgatgtacgagctattcatcaatatctgacgaggtcaacttgggcaaaaggcattcacctggacattgtttctgcctcaatagagaacagtcttaactttggcctttatcataatgaacaccagattggtttcgcgcgtctgataacagattatgcgaccttcgcctacctttgcgatgtctatatccttgaagaacatcagggcaaagggcttggaagatgggttatggaatgcatacatcatcaccctgtgtttgagcagcttcgcaggatcatgttatttaccacgactgcaccctggctctatgaaaaatttggctacgagcctgtaaacagaaaaaactatgcatggacgattacgcggcctgatatctatttgaatgaaaaatag

SEQ ID NO: 145715 - DNA, 591 bp, Enterobacter cloacae
atgctgaaccccggattcgttacccgcaaagcgcttgctcagtggcaggatgttcccgcttttctcccccagttccagttccatgaaaaacaccgagcggtcattcataccgcgcatcctgaaaatattctgccgttgattgcaaactttgacgtccggcaagatgccgtgattcgtcgactgatggctttacggcaattaccgcaaaaattactacgtaatcagcaggctgactcaatcagcaactttggcctgcacagttttaccctgttgaaaaactctgcatctgagctctgctatggcttaaaaggacaattctggcggacaaatttcggtctggaaaacgcaccggacgccatggcctttcagtcgccagccgcgccgggtagcgcgacattgctgctgcgctaccaagtcacggaactggccccaggtcaacatgaactctgtacggaaaccttcgtctattgtccggacaaacgtactcaactcaaaatggcagcctactggctggcaatacgggccgggagcggctggatccgtaaaaggacgctgaaagcggttaagttgaatattgaagggctggaatga

SEQ ID NO: 145716 - DNA, 192 bp, Enterobacter cloacae
atgtgccgaataattggcctgttcttgctgattaaaatcaataaccagacgactagagaaccgaacaaccgtgtttcccatggcccgtacatttatgccatgtggcccttgaccgtcagaaatagcgcaacatgtcccattaatgataacaaattgttaatgttttgtatggttttgcatgttgctgattaa

SEQ ID NO: 145717 - DNA, 300 bp, Enterobacter cloacae
atgggcctgacgctgccgcaaacctaccgctacgtgctgctgcctaacgcctaccgggttatcgttccaccgatgacctctgagatgatgaacctggtgaaaaactcggccatcgcctcgactatcggcctggtcgatatggccgcgcaggcgggcaagctgctggattactccgctcacgcgtgggaatccttcaccgcgatcacgctcgcgtatgttctgattaacgctttcatcatgctggtgatgaacctggttgaacgcaaaatccgcctgccgggtaatctggggggcaaataa

SEQ ID NO: 145718 - DNA, 771 bp, Enterobacter cloacae
atgggcttgaaaaacaaaaccgccgtcatcttcggcggcagcggcgctatcggcagttcagcggcgcacgctctggcgcgtgaaggggcggatgtatacctcgccgcgcgtgaccacgcgaggctggagcaggtcgccagccgtattcgcgccgccggagggtctgccagcacgtttgttttcgatgcgctcgatgattcctcgcagctcccggaccttgcccgcattgatatcgtcgtcaacgccacgggctttatgcacaatcagggtaaacgccttgaggcgttaacgctcgatgagttcaggcagggtttcgatccctttctggccgcgtacttcaacattgcgaaagccgtatcaccccgtatgggcggcgagcatggcggggccataattaccgtcgtcgctcccgccgcaaacatggcgatggcgggccacctcgggcatatcgtcggctgcgcgggaacggaagccttgacccgggcgcttgcggctgagttggggactcaaaatattcgcgtgctgtgtctgcgttcgcacgcgatagccgatgcggtgcaggcgggttcgtatgtggggaccattttcaccgccaaggcgcaggcgatggggattacggtcgagcagtttctcggcggtgcagcgcaaagtaccctgacgcatcgcctgccgacgcttgcacaggtggcagacacgattacgtttctggcctcagatgcggcaggcgctatgacgggaaccaccgtcaatatgaccgcgggtgtaacctag

SEQ ID NO: 145719 - DNA, 981 bp, Enterobacter cloacae
atgacggtattttcacatcattttgcattgacctaccactggaaaaaaactggcttatggggtatatcagataacgccgtaatcagcaatttagggtcagtttcagtatctatgttcttcctgattactggatatttgttctttgggaaaatagtaaattttaaacatatcgactggcaaaaattcagtatcgaaaggatacgaagaatctttccggcatatttattcgtaatgatgttagtttacatcacttttttaatagaaagtaattcccatattaatgctgcactcattgttaagtctatattttcatcagcattattcattacaactcccctgggaaattacgaccttgccaagttgacaagtggtgtccaatggactctggtatacgaagcaattttttatctttcattacccatctgttatttaatttttcataataaagtaaatatcaaaagcatcttaatggtagcaatctcagcacttctcattggttgctactcaaaaatgacatacttatatgaccaacttttttatctttttgcatttggtggggtatcatatttcgccttaagatccgagctgataaaatccatttgtcagaataaatattgctcagtagtagtcatcctaatgatttcattcaccatcattaaaactcagtattggaccgtagaacagatgattttttgctttatttgttttactgctattgcaggaggctgcaatatctttggaatattacaattatcaggtctaagaaaaatgggcgacattagctatagcatttatctctcccatggtttgattttgtattatttatttagcttcaaaggtggaatatccatatcaaatattaaagaacctctttactacttattacttccgctcgttagcatacctgttacattcatatcaaaactacttcatgaaaaaattgagcgtcgctatatgatacaaaaccgagtaaacaaataa

SEQ ID NO: 145720 - DNA, 1662 bp, Enterobacter cloacae
atgggtgaacgtctggatgtgccccgggaaataaaagacctgatgcgtgaaacagggacgctgcatctgatggctatttcgggtctgcatatcgcgctggcggcatccctcgcctggttactcgcgcgtgggcttcagtttctattacccagccactggatccactggcaaatgcctcttctggccgggttatgctttgccgcgttctacgcctggcttaccggtcttcaaccacctgcgctacgaacggtcatcgcgcttgctgtgcttggaatgttgcggatcgctgcccgtcagtggtctccctggcaggtgtgggtctgctgtatcgcggcgatcctgataagcgatcccttagccatactctcgcagagtctgcttttgtctgcatttgccgtcgccgcgctgattttctggtttcagtggctgcctcttcctgtctggcaccggggacgacgtatacggccgctgcttaacctgatttatctgcaggtcggcatgctgatgctgctgatgccgctacaggttctgattttccatggtttcagcatctcctccctggtcgcgaatctctttgccgttcccctggtgacgtttgtctccgtgccgctgatcctgctcggcatgctgcttcatctgctgccgctggcggcaccggaaagcgtcgtctggttcgcagccaataagtcacttgcggggctattctggctcctcatgcgcctgcctgacggctggcaaaatgtcgaccaacgctggcagtacatgacattactgccctggcttatcatcatcggctggcgctttcgtgcctggaaaacccttccagccgtttgtcttgcaggaagtgttttactcacatttcctctctggagaacggaaaaaaacgagagctggacgctgcatatgctggatgtggggcaggggctggcgatggtcattgaacggcaggggaaagccattatctatgataccgggctcgcctggccgggcggggatagcgcacagcggttaattatcccgtggcttcgctggcatcacctgcggcctgaaggcgttattctcagccatgaacacctcgaccatgcgggaggactcgcatcattgcaaaaagcgtggtcggacgcgtgggtaagaagcccattgcgtcaggcgggacatcggccctgttttcgtgggcagagatggaaatggcagggactctccttcacagtacactggccccccgaaaattacccggctcagggaaataaccattcctgcgtggtaaaggtggacgacggtgagcagagtgttctgctaacgggggacattgaagcgcaagcggaacaggctatgcttagccattactggcgttatctgacgtccacgctcatacaggttcctcatcatggcagcaatacttcgtcgtcattgccgctggtacagcgggtggaaggtcagatagccctggattccacggcccgctataacgcatggcgattcccgtcggcaaaagttgtccgacgctatcgaaaagaggggtacatctggcacgatacccctcattctggacaaatatcggtgacattctcgcaacatcactggcaaatccggcgcttgcgagagcaatttttacccgtttggtatcatcagtggtttggcgagcccgtcgataacgggtag

SEQ ID NO: 145721 - DNA, 1230 bp, Enterobacter cloacae
atgtctttaccgcaactctcgctttcagccgcacgtcatttacaccttgccgcgcaggggctgcttaaaaagccccgccgccgcgcgcagcctgccgatattctctcgaccatccagcgcatgtcgctgcttcaaatcgacaccattaacatcgtggcccgtagcccttacctggtgctgtttagccgcctggggaattatccttcacagtggctggatgaggcgctcagcaagggagagttaatggagtactgggcgcacgaagcctgcttcctgccccgcagcgattttgccctggttcgccaccgtatgcttgctccggaaaagatgggctggaaataccgtcaggcgtggatgctggaacatgcggccgaaattgagcagctaatcgcgcatattcaggataacggtccagtacgctccgccgattttgaacacccgcgcaaaggcaccagcggctggtgggagtggaaaccgcataagcgtcatctcgaagggctgtttacctctggcaaagtcatggtgattgagcggcgtaattttcagcgcgtgtacgacctgacgcatcgcgtgatgccgaactgggacgacgagcgtgacctgcttacccaggaggcggccgaggccatcatgctcgaaaacagcgcccgcagcctggggattttccgcccgcaatggctggctgattattatcgccttcgccagcccgcgctgaaaccgctgctggacatctggcaacgcgaacagcgcgtcatcccggtcacggtggaaacgctgggcgacatgtggctgcatgcggatctcctcccgctactgcctctggcccaggaggggaaacttcaggcaacccacagtgcggtgttgtcgcctttcgacccggtcgtctgggacagaaaacgcgccgagcagctgttcgactttagctaccggctggaatgttataccccggcgccaaagcgccagtatggttactttgtactcccgctgctgcataaagggcaactggtcgggcgcatggacgccaaaatgcaccgcaagaccggcacgcttgaaattattgcgctttatctggaagagggcgtcagggtgacggcgagcctggaaaaagggttaacgtccgccattagcgaattcgcgcgctggcagggtgcccgcgacgtgacgctgggtagggtgcccgacgggctgtttacatcctgtcgaagtggctgggaaacaggcactccctga

SEQ ID NO: 145722 - DNA, 363 bp, Enterobacter cloacae
atgccgccacgtaccgccagcgatctttattcagaaatgaaaaatatgtccgttgaagagcggatccgcttcttctccctttcgctggtggaaatgcaccgcgagctgcaggagagcattagccagatagagtcgatgaagcaggcgctggaagagagtgaagagtaccaccgtcagctggttgaaaccgcgcaggatgcggtgattaccatcgatcatgccggtaacgttgtgaactggaaccaggcggcagagcgaatgttcggctggtcagcggaagaagcgacaggcaacagccttggcaagatgatcgtaccagaagcgtttcgcgagcagcacgcacgcggcctgatgcgcttctag

SEQ ID NO: 145723 - DNA, 1215 bp, Enterobacter cloacae
gtgaattttttgttgctcggtgctggtgcgtctaaatcatactccgttagtcctaccggtgtaagaatgcccattgcaaaagattttttctctacatttgataagttagatatttcaggtcatccatgggtacttatcgatggattattagactttatcgagagggtaaagaaagaaaatcctatggattttttttcaagagatgtagatattgaagagttatatacagagatagaagagaatttgaatcgctatgtaggaaaagatgctggtcttgaaagaatcatggctttcaaatcatacactcagttaatatttattttctctgctgtaataaattccattcaaaatggacctatatcacgtccacattcagccctggcaaaaatgttaagtaacgatgatatggttgctactttcaattgggacactcttatggatagagcgttaaatagcgagactgaatggacaactgattatggatatggtttttggcccaaaagtatatacagaaatcgctgggtggcgccaaatgaaaagcaatccacatcaccacttcttatcaaattacatgggtctgtgaactggctaagtagtcatcccatgagtcctgagaaggatgttgttttaatgcaagaatcagcacctgacaccgtatggatttacgagagtacagaagagccttatgcgtgttttgcaggacggtatacacccggttatgaagatttttcttatggatactatcctcctaatatcttggatgatcgagggagggctgctggtgcgggacgaaaactggttagcgcaagattgaaattaccatgggtgcctgaaggcacagcttcttctgagggattagtatcaatacctcttatcataccgcccgtgaaacaaaaaaattataatggatacgggatgttatttgataacctttgggaaaaggcacaagaaggtctaacaaatgcagaacacataattatcataggctattcctttccgcgtacagacttgaaaagtaatcagctatttttagatgcatttttgaatcgcaaaaacattccttatattacaatcttggatccatacccagagagagtagcggagaagtttcgatttgaattcggaatacctaactcccatctaagggtgattaaagggttttttacagatgaaaccgatgtgaatgaattattcagttttcaaaattcaaagtga

SEQ ID NO: 145724 - DNA, 270 bp, Enterobacter cloacae
atgccgagaccaaaatcacacagtgagcgagttcaaatcatcgcccggatcatcgagttggtgaaagagcatggtcgtgtcacgacgaaagatgtcagtgcgatgttcgatttgcatcgtactaccgcagagaaatacatacggacagccattgtacggggcgaactgattcgctacggtcgatgtggagtgtttcgtgacttacgtgcggtcatcgactttgatcttaagcgctatacagttaaaaaggagttttgcgatcgagcttaa

SEQ ID NO: 145725 - DNA, 1794 bp, Enterobacter cloacae
atgagcgcgcaaccatttgattttttgaaagaaaaagacaccaccattctgcaaaaatatcaaacgtgcaaagccatggctagaaattatgctaatgccttaaagactgaccaagagcggttgatttatgctcgttcatattgctccggtattgtggcagcttactggcaagctctgtgcaaaaagtacaagagcgctatacgcattcgaccaactccaaagacagttgatttctgtctgctttctcctgaagtcaaggacttggcagcagctacaggtgtaatgattactcgtttccctcctgaggacgcaggctatctgatcggttctatttatactgtcatgctaccggttccatatagatcggaaatgggggcttattatactccgcctcctttagtagcaagattgctggatctctcagaaaaagcaggaatagactttgcaaaagcaagtgtcattgacccagcctgtgggggcggagcttttcttgctcctgttgcattaagaatgcttagcaaggaaaaaggcaattcacccgaatggattttccgccgtttagtaaagagactaaaagggattgagcttgatccttttgcagcatggatgagtgccgtactacttgagtctgttttgattaacctttgcataaaagctaagagaagattgcctgctgatattatcatcgttggtgatgcacttaagcaggaagatgtaggtaccttcgatttggttgtaggcaatccgccatatggaagggtcactcttgatcctgatatgagaagtaaattctctcgttcattgtttggacatgcaaatctctacggcttgttcactgatttagcgacgaggtttacatgtaaggacacaggtgtagttgcattccttacaccaacgtcattcttaggcggccaatacttcactgcactgagaacactgctcactgaagaaatgacacctgtttcgtttgattttgtagctgaccgagatggagtttttgacgatgttttgcaagaaacaatgctcactgtttttaaagcaggcaaacataataaacagactgcagtttctttgctaatccctaaagggcttaacaaagctaaagtagagaaaataggcagtgtatctatagagaaaggcggtaaaacttggttattgccacgcggtaaggatgatttactttttttgaacgctttgaaaaaaatgcctacccgactggctgatttaggatactcagtttcaactggacaattggtttggaatagacttaaagatcagttacgtactacgaaaaatgccacctcgtacccgctgatttgggctgaatctattacgccttcaggtttcagttttagcgccgtacgcaagaaccatgttccatatgttgaagttaaaaagaaacaagagtacctcataacttcatcagaatgtgttttagtgcagagaactacgtcgaaagaacagaacaagcggatcttagctgctctcttaccccagagttttatagacaaatcaggtggcgtagttgttgaaaaccatattaacattgtgtactcaaatggtttgttaacaaacattgactcaggcgttattgctgagttgttaaattcaagagtagttgacagagcattcaggtgtatcagtggaagcgttgcagtatctgcttttgagcttaactcaatccctctgcctgctcctgagcagcttattgtaatacaaaatatgctggcctcaggtgctgaaaaggatgctatcgagaaagcgatcgccagtttctatggagtaatttcataa

SEQ ID NO: 145726 - DNA, 1107 bp, Enterobacter cloacae
atgagcttatttaaagttccagcgctgagtattattatggaaaggttgcctaagattttcccggaaggtacacaaaatcgtaactatcttattagagaaatggccgcaaagactattttcgtcatgttctatgcgggggcgattgagggggaaggaaggtggattcgtcctaaccaagtggtaaacatgggagatacccagacagctaaaattgatgaagttgataggcttctatggattgaaaattctcttaagagtaagaaaaaaagattacagcctgctgatgcttggtacgctgagaatactcgtgagcctattcgtgacgagaccatcaagaatggtctcgttccatgtcgggctgttctgatacgggaaggtatcccgacaacttcctccgaacctcgttactgtctaaatagggcttttgcaaatctctttgatgaacatgtatctggtgatgaattggaattagccattgataattggcagaaaaattacttaaacaaagcagctctatcaaggattcgattactaaaatctggtgccgcgattgcatccgattccgtagcagtcacctttccaaacggcgagatgcgcatgcttgcaccggggccgtcgagtgtaatagctaaagctgtaatcgaaagttttgctataagatttcttaagaatccagcagtactttggttgtcagaatctggtaataaagttgttgcacgggacgaacttttggcaacggagctgggtttggtcatcgaaccttcgaaggcattacctgacatcatcctgatagatttgggcgatgatgaaacaggaaatgacatgctcgttgtttttatagaggttgttgctacagacggaccaatcaacagagaacgtaaaatcatattaacaaaattagcagtagaagcaggatttagtgaaagaaatcttgcgtttctcactgcgttttcagatagagcctcctcacaatttaaaaaatctatatccgaacttgcatggggttcatatgcttggtttgcatcagaaccggaacatctgattgagctaagaaataacaaccctttaaagttgtcatttaagtcgcttatagccgaggaaagatga

SEQ ID NO: 145727 - DNA, 1335 bp, Enterobacter cloacae
atggcggatcataaacttgcgataggtaagcaattaataaaagggatcatcgatttaggagttattcttgattatcatattgaaaaagaattccctgtagatgaatcatcattcggagaacctccagcagttgacgtcgcgtggttttcaaaaaaaggggatcgcttccctctttttattttcgaggttgaaagcaaagccacaaacggcatgactaacaacccattaaaagtatatgctcaagaaagtaagaactttgaaaaacctctttttttctttcatattgtagcacaaggcgggtttaattccgcccgtcccagaaacctggaatcattatttggtaagcataactatagaatttacatgtttgcaaaccatgatgccagcgaatttatcaaggatgttttatgccagcatacaagattaagaagcgatttaagctatattgaattatacgaaacacttacatccgaagcttgggcaaataaagtcaattatcttcaagtgataaaaaaggctgttgaacttaacctttcaagagaaaatatcatctcttcctttgtcagcctatgccgtaaagattcaatctttttcacagacttaaaattattactggagcttgattccaaggaatttttcgaacatacaaacctctattcttatcttggcacaacttggctaacgccgataatatccgcttttttttgcggtttaagccaaaccacagaagaaatgaatcactggtcaagatattttatggattggcagaataaatcggatcctatgtcaatgatttcagcttcgtttggactttcacttgattatgatgaatttcttataggatgcgcccctcaattaatcacattatgtatttctctatctcataaaaataaaaccataagcaacaaccttgtgaaggtgttgtgcgaaatattggacaaaataaatataaactgggaaggattgaatgctgcaatttacctacttcacataagcgccgctttaaatttaaaagaatcattcgacaatgcgagagattttatttcaaacttcaacaatcttgataatgtaaatatttataatccaccgtcatgtttttcttttactgaaagcgagttcaatgatatttttaccatgggaaatttaggagcaattcccgaactcgatgttttcacagaaaagagtaaagagcagtttgctaaacaagagtttgatttagttaatttagctctaaagtctattgacgatgatgcatatattttttcgtggtccaccgatttattatatgcactttggtctgagtactactcagatgaacatgggagcaatgaataa

SEQ ID NO: 145728 - DNA, 234 bp, Enterobacter cloacae
atgaaatttgaattacccattgatcgtacaaaagaacttccagagggtgtactccctgcgcttgacagagaattgctaaaacaactccagagtcagttcggtgagtgcacgctgattatgcaccgcgcaggatccgatggagtaagtattttgggtggcgtaaaggaagctaggcagaaagttgaggaaatcctccagcagacccgggaaagtgctgacgactggttttattga

SEQ ID NO: 145729 - DNA, 201 bp, Enterobacter cloacae
atgaagaaaagctggttcactcacaccgggctgacaaccgaagaagccaatgagctggtggctcgctataagtctaaaggcgtccccgtcgagaaaagcctcgatattgaccctcgtctttggatagtcagcgcattactacctcagcaaaaatcctcagctaagacagcgcaaagtatgcgttcccgggcatgggggtga

SEQ ID NO: 145730 - DNA, 921 bp, Enterobacter cloacae
atgagtcatgatgcagagcttattgccaaggctatatcagcacttcaaccaaaacccgattatcttaaggactatgttcttccttttgtgattgctctttttggtgcactactgggtggtctttccgctgttcgcataagcaaacgtcaagagttaaaaaacattgccagagacaattttgtagcagcaaaccaagtttttgtattagcacatggatgtctggcaaagctggtagcaatcaagtcaaattacgagcacatctcatcagacgtcccgctggtaagggcgggagaattccccacaatagtcaccaagctcgaagatgttaaattcaatgctcatgagctttttttcattaggactagacccacagcaaataagagtctttggcaaaagataaaatggacattccttcatcgcattttaagaagaaaaattaagcaaccttcaatagatgagttgcgtaaatcctggagaaatgttgtcaagattggcgcgatgtttgaaaactacaatcaagttatggagcttctgcgtaaaagaaaccatatcaatgaaagggttaaagaggttatgtctcaggttggtatcttggaatacagggacgtgaatttagtacgaaaaatgcttggtgatgaactctgcggtggatttgtagatataacagaatcagcaatttctttaactgattatgtccttgatgaattacatcaatttctcttggagtttccgaagattgctgagagcaacattgaactgagtaaaatcaaagagtggggacaccttcctacctatcacaataagcaacaagcatttttaaactgtttgaaaccaatagtgaagcctaactatataacgatgtctgaatacacaggcatgacagaggcaactgttttgaaaaaatataattacgagagataa

SEQ ID NO: 145731 - DNA, 534 bp, Enterobacter cloacae
ttgcgtagattaactgactgcgatgcaattgcccttagctataatatccctgaaattgttaatattaacggcatccgttttttatatgaagcggctaaaaaagaattatcattaagcatgcgcaacccggaggctaaagagaacctaatgcgccttattattgcaggcacactttcccagtataaagagtcgatgcacaggcttcgcgtcaaggcgatcccgtttgcgtctcgggaaaataatacccaacagattgccgtctccaccagtatcaaacttatcaatcgttctgacgcacttaaagatgccgactcagaaaaacagagtgataagctcaactggcatgttactggagagcggcttgaaggatcttcttatgaggcctacagcgacggaaaaacgggggttatcgatactgtctcagccgttggcaggccgacgtttcagatgcatacacgcgctttgagtatggccgatggcgccacaccccgtaaaatcggccctgttattaccatgtcattggcataccactaa

SEQ ID NO: 145732 - DNA, 285 bp, Enterobacter cloacae
atgaggaacatattcaagcgtcaggctgcgtcggtgtggatcggcgtgaaacagtcgtggggattcaacaacgccactgagtggttccgccgcatgttcataaaagccgtattcaacctcactaacagggtatttttctattacctgattgccatggtgatctacaagcagatggacttttgccgcgcccatcttggacaagttttcgccagccataccatcctcatgccacacgttcggtttctgaacgtaagtatagtgcgttggatcatcatccgatattga

SEQ ID NO: 145733 - DNA, 402 bp, Enterobacter cloacae
atgcggtgttttcagcaagggagtagcgttttgtttagtcaggaatgtttaatttctggtgataccaatgcgggtaactggggcagaagagaaaacggcgatgcgatactgttcgactgggaaaggttcggcaccggcagcccggctattgaccttgctccgctggtaaaagggatgggctcaaaacaaagccttttgcaacttgccgagcgctaccgtgtttttgccacgcattcggtcgcaggcagattagccagagaaatcgctcttgctaaagcatggattgtcactgaagtcgtgttacttctgcacgaaaggaaaaaaagtgattttaagctctacctgagctggtacagagaacatctccccggctggctggatgagtccatctcgctgctttga

SEQ ID NO: 145734 - DNA, 126 bp, Enterobacter cloacae
atgatttttagaattgagccgcgtattctcttttactttcagtgttccgttagcaaaaaaaatagttggcgcatcgttcatattctgtctggcaagttcgacaatataagaaaattgaccaggtaa

SEQ ID NO: 145735 - DNA, 567 bp, Enterobacter cloacae
atgagtcattttttatccgaacgtttactgttatgcttattgaagttattatttttcccttataataaattgcgcaataaatattatggctttgcgttttcgacgcatggcctcattgtaggtaaaaatgtatcaattgttggttctaaaaatattaaaatagggcggcacgttattttaggaaaccaaacttggttggatgccattggtacaggcagtattagtatcggtagtgatgtttcattaagccaaaatgtgcatattgctgcagctaaagccgtaattattgaaaatggttgtctcattggtagcgatgtacttattagtgatcatgaccattccttcggtgataactcggcaatgatattaccaaaaaatcggcccttatctgttcgcgatataacaaagcttggtaaaaactgctggctaggtgataatgcaaaaatcttgtcgggtgttactttaggtaataatgttgtggtggcggctaattcagttgtgacgcgctcctttcccgacaatgttgtaattggtggaatacccgctaaaattttaaaaaatatctaa

SEQ ID NO: 145736 - DNA, 909 bp, Enterobacter cloacae
atgaccaagcaagtgttaatagtcggtgggtcgagttttatagcagttaatcttattgaacgatttttaaaagagtcctggcaggtgattgtttatggtagaaataaacctgctttagaatccagaggactatcttttataagcggtgaactttcagaaataaattcaaaactgagttttctgtctgattcaaaaatagataatgcaatttatcttattaataatattcctgttaactctaatgcgattaattatgaggcgtgtttaagtgagaatcgtgcagcaattgattttctctttacccttgtaaaaagggtggtttacttttcctctggtgggaggatatataaaaccagcccagaaccgcataaagagacagatgagctatcaccgacttgcgcttatggtaaaagtaaggttgagcttgaagaatatgtgataaagtgtagtgcgattgcacagaaagaatatctaattatcaggccatcaaatccctatggaaagtatcagaagttatattctaatcaggggcttatagcgattaccttgggtaaaataaaacgcagagaggagattgaaatctggggtacaggctcggaggttagagactatatttatattgatgattttgtctcagctttttacgctctttttaattgcattaacttaccctataatattttcaatattggctcaggatatggtgtttcaactattaaaattattgaaacgatattggagttaacggacagtagcgatattaaaaagaagtatattgatatacatcgtagcttgatcccttctaacattctatgtaatcaacgattaatagatgtgattggatcatattcaataacacctttaacagaagggatttcagcttttattaaaagtactatgaagtcataa

SEQ ID NO: 145737 - DNA, 444 bp, Enterobacter cloacae
atgaaactttggctatcgggtttggcacttctggcggtcacctccaccgcgcaggctgagaatttccgcatcgtgcagtctcctgcgcagaagctggatatctggatcgacaacatcaaagacaacacgccgcagagctggtgtaagcctgaggtggcgctgcgcattgtggcgaacggtaagaaagacgtctccgtgctggagaactttgtgccgcgtcttggctccctgctggaacatcagtgcagcaaagtgaataagcttagctggacgctcaacgatccggcgggtaccacgctggcgcagggtacggcaggcaaagcgcaggactgggcgctggtggtgaaacaggagcaggccgcgcctgctgcgaccgtcacccccagccagcggcgcgctgctgccgccggaccagaacgtggcttcccgcacggttgccgctga

SEQ ID NO: 145738 - DNA, 249 bp, Enterobacter cloacae
atgataaatttacaatcttataatgaagtgttagattttctggaactgttttttcaaaaatatattcttgattctaattgtctacaggatatgcaatctattttagatgattgtcgaaaagaaaaaatggtggctattcgagctatagattcatgttttatggaatataggcgaaagactcaggattatagagtccctacaattgaggaacaggagatatggaagcagttgttcaatgtatggcaataa

SEQ ID NO: 145739 - DNA, 219 bp, Enterobacter cloacae
atgaatgaagttatttttacagattttggtgttgacataatcaaaagaaatggtgaatattttatccaatatgataccggaactattgctatgattaaaaaggagtcgaaaattactccggaagaggcattgaaagcacagaaaagtgaaaatgatgcttatgaggttattatagccactcagactagagaaggaaaaaagaagcctttcttttcataa

SEQ ID NO: 145740 - DNA, 297 bp, Enterobacter cloacae
atggttcgacacgctaaagacgacgatgcgcccggaaagcgatttttcccgcagcttgtcgagggtttccagaccgttcatgccgggcatattcagatcgagcaggatcaggtcgggatcgagggattcggcaagctcaatgccctgttcaccgttgctggcttcgccaaccaccgtgatatcgggcgccatgctgaccagctgtttcacgccagtacgcagcatcggatggtcgtcgatcagcaggatggatgccggttcctgattagtcatgggtttctccttgagcagttgtaa

SEQ ID NO: 145741 - DNA, 450 bp, Enterobacter cloacae
atggaaatcttgattcggaataaattcagttcagtggggatgttgctcggggttattgcactgcttctctcattagctcagttcaccctcggtccgttttcttcaaagtcgacagcgcttgaagttgttgtggctgaaaaggtttcggcggtaaaaaaaggaataatgactggtataaaaggagagcagccgaccgttgagaagaaaaaggaaccggtagatattgaccggttactgatcgctagcggaataatgttatctgtgatggcgttgggacttgctttcattagtggcctgcgcaaagagaacaaatggaccgtgagtggggcactctttttttccggggccacgatcgcttttcatgcagcgttactggcttttggtcttatcgctgcggttttgctcctgatgttaattgtttcaatcataagcggaagcactccgttctga

SEQ ID NO: 145742 - DNA, 570 bp, Enterobacter cloacae
atgaagcgattacctcttatggtagctgtactgggcgtcatactgctttcaggctgccatgaccgtcgggcaggtgtgaaaacgctgttagggaacggcgtggagcagtatggacagaagctgccttacgatcactggcagtttaattttttctatcccgtcaacctgccggcactggtgaccatggtgtatctggaggacggggatatccgggaaagtattttccggcgactggaccccacggaaccgagccagagcagcgtggggacatggagccagcgcgtgggtggtttttcagccaattttaatatcggcaaggcgctacctgtcaggatgacggtgtgctgggactcggttatcgacaaaaaggcgtacgaaacggagatctggttcagtcgggagacatggcagcagatgctcacagcctatcctgatacctataagccgggaaagacgtattaccgggataatatgattatcggactggcaccggtggaacggtgcgggtctggctggaggataacggcgatcccgttgtcctccagcatcccgccagacagttcacgctga

SEQ ID NO: 145743 - DNA, 189 bp, Enterobacter cloacae
atgtggattaaaatcaaatactgcataatgttaaacaatgctgaggatatcattttaaatatcacggacattttaactttgcactggcccggacatctgaacttagctttgacaaatatgggatcagaaaaaatctggcattttatgggcatcgttttgggcgttggcctgaatgctaatgacctctga

SEQ ID NO: 145744 - DNA, 957 bp, Enterobacter cloacae
atgatacctaatgagaagtcgaaattaataaaggcaagactaattcttgcacaacaactacttgaagaagctgacgtattacctggtcttgaaggctataacttcagcaatccagacagtgattctgatgaccctttctttcatatgcggcatgaaagagaagccctagtggtttacctcctcctaacttgttttgaccttctgggacagtcacaaccgcacgttccctttatgaaatggctaacaagtaacgattctgtacttgttgatgaaagaagagtagcggcggaagggcttgattctgaaaacagtgatagtgttgctcatgctttagggctgtttaattactataataggcatcacggggcaacaattgccttttattccggaattgatctgcttcccgaaaatgccagaaacgatttgttgtctacaattgatgttgcaaaagaagatcccgatgcaaggaaacctgaaaataaagataaaaatataagttattgtcgtattccaattaatgatgatgctaaggtagtaaaactccaaaaggagtatttatatacaaaaagaaatgaattcactcaccagctctcacagagacacttttcatcggtcccgatgatgtcaggttttggccgtaatgcagatttcagcaatactctttcggagtctggagcctcttgggctatttttgtttccgacggaaaaatacattacggcggcgttaatcaggaagtgaaagataaatatgtctacacgctttctgattggccgtttgttttatttgaggttctgtattcagcgcttggtgaagaatttgacaggacctcaataaaattgaagttcttcattcaaattatgaattctggagaagactttgttgtaaaatatccttccgttgatcatgaaaaagtagctgaactcctgttaaatcagcatggcgtctccagaagctga

SEQ ID NO: 145745 - DNA, 306 bp, Enterobacter cloacae
atgagtattcaagaacacgttattttggtaaacgaccagggaatggtgattggcactcaggaaaaatatgccgcgcacaccttacataccccgctgcatctggctttctcctcctggctttttaacgcaaacggcgaatgtctgatcacccggcgcgccttaagcaaaaaagcctggcccggcgtctggaccaactccgtctgcggccacccgcagtccggcgaagagacgatacaggcgataatccgccgctgccgctttgaagtgggcgctgaactggccgatatcaccgccgtcgccccctga

SEQ ID NO: 145746 - DNA, 393 bp, Enterobacter cloacae
atgtgcatcgcgaaagaacacatttcagacttaactgaaaggcgatgtaacagcagaagaaaggcgatcatgcaaagagaatattctgaaagcgtgactcatccggtgcggtgtaatcggttccatatgtgcgcctttgcggcgccacccgacaaaaaaaggccagcccgaaggctggccttttatcacgcagatgtcagtcgattacttcagaccggcagcttcacgcagcagggcggctttgtcggttttttcccatgggaaatgttcacgaccaaagtgaccgtatgcagcggtttctttgtagattgggtgcagcagatccagcatctgaatcaggccgtatggacgcaggtcgaagaactcgcgcaccagcagagtcagctgttctga

SEQ ID NO: 145747 - DNA, 1410 bp, Enterobacter cloacae
atgagatcggtatatcctgggttttacagtatctctgatgaagttctacaagagatttggagtgcagatacaactttgtttgtttttgatacaaattgcctcctcaatttatatagatgtgaagatcacacccgcgaagaaatacttaaagtaatgaaagcaatcgcccacagaatatggattccgtttcaagttgggtttgaataccaaagaagtaggcgttcaataatatccgacagcattaccagtttaaggaaaatccaacaaggtttacaaaacatctataacgacaatattttgtctcatggcagtgtaaaaaaacacttatataactcacttagcaatgaagctttagaattacaacttcaattaaaagaaccgatagaatcatttataaacgaaaaaataacccccagaattgagagcaaagtaatgatttcaacccatgatttcattcgggatgaagtagattctatagtgagtgataacgtgggtgcacttcctacacaagatgatatagatgctataaatagagagggggaacttagatacgaaaaaaggataccgcccggctttaaagatggtgcaaaaaaagacatatctttcttttcaggtatatatttccaagacaagtatgcagatttatatctatggaaagaaatcataaacaaggcaaagtcagaacagataaagagtgtcatctttgtatgcgacgatgcaaaagaggattggtggttcattcactcaggcgaaactcacggacctcttgaggcgcttaagactgagatttgcaaagaagcatctattgataatttcaaactggtgagtcaatctacgtttttacacgatgcaaagacataccttgatgatataaaagtcagtgaatcgtcattgatagaagtagaaggattatcaaaaaacaatattactaaagaatccgatgacatttattttggtgatcatttagaagaaaaactggattctataagcgatatctatcgagattacaaatcttctttttatattaacaataaaaatatcgaaaattttttaagcccggcccccaaagatttagactcaagcattgaaatgaatatttcgctgttagatgcttatgaagttatagcaaccagagctaagagggtattagccgagttgcaggaaaaaagggttatactcgttgatatagtgggccctgataaatatttaaactgcaagagagaattgaatgttgccttgcgttcagcatcagaaatagctgacaacgtaaaataccgcatggatataataatgaaaagtgaaactaaagttgatattatttcccatctaacagagtcgttacactctaaaatactacgccttaataactgggtagataaagccagagggattttgagtaatatatcttaa

SEQ ID NO: 145748 - DNA, 798 bp, Enterobacter cloacae
atgaaaaaaacacctgaacgactcagcgatatggatggggtaaaaaatttaagaattaaagaactaagtaaaatgttctcacctcattttagctcattgcgtaattatcaagtattcattatgcatctagtaatcttgcttggtaagcataaacctgtagatgacagagatcgaactatcagaaacttacttgcagactgtaatgacatgcttgatccgatagcatcaagcttgaaagagggcaagtacaacgttgcttcaacgcttaccaggcgtttatatgaagatatttccttagccaatgccttcatgcttaatcacgagttacacgatcgctggcattcaggtgaagagataaagaatcaagaagtaagggaagagctagataagtcagaactaggtgctgatattgactcaaccagatatctatacggattactatctgacttatcccacccgagtagagttgcaattatggatagatttcttggagaaggtgtagatttttcattaggaggctaccctaccccgagcgtatatcacgtagcggagacattagtacaatgtctctcccttgtattttggctctgtgcggccacagcccttttttacaaaccacttatttataaacataatccagacttggttaaaatatataaatttgcagcggaacacgctcaaaagatcaacggtcaattgcataaagaactggatagactcctctctgaggaaaacataacattcattgagaaaaaataccctccacgcaagaagggaaccctcaaacgaaagccttga

SEQ ID NO: 145749 - DNA, 438 bp, Enterobacter cloacae
atgcatagtcagttattcagcaatcaaacgcgcggtttttatccgattaaaagtttgcgctattacaagtctgttaacgctctaccggatgaccttgtccgggtcagtgattcagagtatgaaaaatttgtcggcgctgctcccgttaactgcgcccccagttacaacgtcgagagcaaacagatggagtgggtcactgtaaccgcaccggtcaggacaccagaagaaaccctcgcggctaatcgcagagagttattaagcaggcaacgtgaggcggcggtaagcgcttttccgctgcagtctgcagttgatttggggatggctaccgaggaagaaaaaacacaactggaagaactgaaaaaatacgttgttgaactgacgggggttgatctcaatgtgcctgactggcctaaaactcctgagtggatatctttttaa

SEQ ID NO: 145750 - DNA, 816 bp, Enterobacter cloacae
atgggactctggaagtacccggtccggtgggggggtgctgactactatcagacaaacccgtctggcgcttcgggatggtatggtgccgggagttttgctggtcagtattcaaattctgctccttttctgattccgttacgatattcaacgccaaagggtatctctatatatcttcccttgattaaagggctgtcacaaacagattatcatggctacggttcagctgtaagtttcgggattttacgctcaggagtgggcgattttggttccgcaataattcaggttattggggataacggtagcggtgccatattagcatttaatgcaaatggtagattagatgtgccatcacaagtctatagcggcggtcgagtcgatgctgctggggatattaattctgccgcaaatatatatgcctcaggtcagcttaattctggtggaaatatagttgctggtcagggggtttttgaatctggcggacaggtaagagtttactcatcaaataacccgcccccaaatcagtcggggtcaacaaataccgggaattattccgcctactaccgtcacggtaatggacaggttttcatgcagtgtattggtggtgtgtattccaattcacgaacaaacccggacgtcaccgtatatttaccagcatcattcccgaacgggattcttgcgatttcaggttcatacagcggaaatggtggtaatgattcggattcatggtggtcagcttctgctataagcgctagcgctttcaacctgcacacacgtaacacggatggcacattctcttttgtggtaacaggatattag

SEQ ID NO: 145751 - DNA, 972 bp, Enterobacter cloacae
atgcgctactattttctggaatgggtaaatgattttgaaattatgatgcttaattctctggcgaaggattatcccgtcatgaaaattaatcgtattatgcggcgctataaatcagttaatgcccttatgcccggtacgctgttaaaaaaatggcataaacgttttcattgtgcagttaaattatcagcgataaaaccagatgatattgtaatttgtaacggctatagcgttttccccttcctggattatattgccagcatgccgtgcaaaaaagtgttaatcctgcgcgattcggttgtggccttaacacgtaagcgccgcctcctgggtcaactcaaagaagacgaagactatatcgaaacggttcgcccggtatttgacgtaatatttagttttgactctgcagactgccaacggtatagcctggcaatgattgagcaatttttaccgttcagcctgcatgaaattcaacggttacaaaaagagagcaagtgcgagaataagcgctgtttttttgttggaggctatgaaccgattcgtgcagaaactctgaaaatccttacgcctgaacttgagaatagcggttataaacccgatttttatctgttggataaatacaataatcatgatagctatccggacaactgtcaaaataaaagacttagctacatcgaaaacattgagaaggtgaagcacgcctctgttttactagaaatcaataaaccagagcaacgaggattaacgctacgtgctttggaagcacttattttcaataaaaaattaattaccacaaacgcgtcgattcgaagcatggatctttacgaccctgcacgaatctttatttataacgtggatgatattgaaggtcttcaggactttttgcaaagccctctcccctatgtggatgaaaagctactgagtaaatacagtgctgataatttgataatgacattgcagaaggttaatttctga

SEQ ID NO: 145752 - DNA, 174 bp, Enterobacter cloacae
atgctgtggttgatgacgatggggcgacgcctgaacggcgtgtatgccgcttttatgctggtggcctttatgatgggcgtggcgggggcgctgcaggcgccgacgctgagcctgtttctcagccgtgaggtggggggcgcagccgttttgggtcggcctgttttacaccgttaa

SEQ ID NO: 145753 - DNA, 255 bp, Enterobacter cloacae
gtgcgtcgctaccttccctgcttcattctgtggctcatgatgctggcgctgctgtcgcgctacgcgctggccgccacgcttcaggtggccccggtaacgctcgacctgcagagcaatcagcgggcagcggcggtctatctcactaacagtgggaaagcggccatccatgcgcagattcgggtgtacgaatggacgcaaaaaacggtaaagatgttctggtggccaccggggaggtggtcagcagcccggcgatga

SEQ ID NO: 145754 - DNA, 1266 bp, Enterobacter cloacae
atgttgaatcgcgtttatattaataaaataaatgttaacattatttttataattattgtgtttgcaattggaagcgacctttttatggaggcctatccaaggaaactattttacggaggctgctatctttctatttttggtcttattttcttagacagaatgcagaactttcgtcagtgggtattgaacaataagatagctacggccttcttattttgtatagttcttttgggagccagcaagctaatttggtctgtaagttttccttctacatctttacaagatattaaagataattattatgctggcgggaaaatgcttatcttcgcaggattaatggcattttatttgctaaaatctgtaggcgagatatcacatacaagttggaagtttgctgctggcatcagcctggtgttaggtatagttacagtttggtttggttaccaggaccaggccaaaggcttggacagaatcaaactcctggccgatgctgctactactgctgcttatataatagttattcagtcgattgtttgtatatcattaattaaaaaagtcattttaaataacttgtaccgaattttaagtttagccttggtgtttattatttcttcttgtttattattaatgacggaaacccgaggagcgatcgcgactttcttcatcgtctacttcgttttggcctgttctgaactaaggaaaataaaggttcgttattggttcctggcagttctggtaatgtctgttattggggggggaatcgcctataagattcaaaagagaatcgttgatgcttatgaaaatatacagcaattgcaaaataataatgctgatacatcattgggggctcgctatgttatgctcgatgctggttttcatgtggcaaaaatttcaccctttgggcaagatgctgatcgtcgttacaataatgcaaaagaatatattttgcaaaaatataaatctcccgaagctgtcagagttatacaatatcatttccacaatgagataattgaaagctttagtttgcaggggctttttggcgtcgtctcagttattttattttatattattggcatcgcagcatcatttgaaaaaaagataaacattggattgttgctttttattgtcgcactaattctgatgggggccactgatgttctcctgattcaaagaaacactgctatggtgataggggcttgcacactagtgattctcctctgccggaattatgacgcaaaaaataaaagagttaacaattctgattga

SEQ ID NO: 145755 - DNA, 1014 bp, Enterobacter cloacae
atgatgaattcaactacttttgattttaaccatgctgtattgaactcgcaaacattaaattttaattatgatgctgaggtacagtattcagcagttgtttatggtgttgacgagaattttttaatacactgtgggatttcgttgttatcaatagttaaaaatacttctgaaatgccgttgcattttttcattgtgactgataaaaacaacgagatgaatttttccatgttgcactgcttaataaaagatacgcagcatgcattgactattatagttatttcttctgattgcctgaatgtattccccaaaacatccgtttttcccgtgtcaatttattttcgcttgctagcgccatatttaataaaaaaatatcgttactttttatatattgatgctgacattgtggcgctgaaaagtatttttcatttattagaagactgtaagcctgaagaatatatttgttgtgcagtaagggagccagagcagcagcttctttctaaaatgataaatatatctgatgggcattatttcaactctggcgtactctatattgatgccagaaaatggaatgaaagtaacatatcgcaaaaggtttttgaatgcctactggagcgaagggctgacttcctttattttgatcaggatgccctgaatgttgttttacataaaagagtcaggtttattgagccaaaatataattgccaaattaaaacagggcataaacggaatgatttagaccgtgtgccgcctgaagaaactgttttgctacactatgttggtagtgataagccatggcagttatggaatcaacagaaaataagcgcatattatcgtaaatataaagcgctatctccctggtgtgatgttgaggatattcaaccacgcagcgccaatgaactaaagaaatactataaaatgcttgctggtaaaggtgaatttgtcaaaactctctgtgtttttgtcaaatatcattcggttaggaccctgaaaaaaaaggcaaaaaataaatgttga

SEQ ID NO: 145756 - DNA, 945 bp, Enterobacter cloacae
atggattctttatatcgtgattttcttctgctggattctgtcaaagataatggtaaatttaaatctattaagttagacagctttaatagtcaatttatttcaaaaacagaaagccatagcccaatatttttgataaaacagcaggatcaacctctctttcatcccgatatatcttttagatattttaatgtgatgtttaatgtgaagtgtgttgtttatgtaaatgaatgtgaagagttggaagatgttttttgtataataaaatttgactcatctaatgcagaattgtttgaagttttcgtgcgttgcgtctcagcaggtctttcacaatttaaaggtgcaatgttagtaactgatataaataatctgattaattcactaatcaagttatttcgttccaattcaactccttcggagaatcaattaattggcctttggggggagctttttacaattaggaactcaaaaaacattactaaggcaataaactcttggcattcggaaagtaattatatttatgattttgaattaatgagtgagaaatacgaagtcaaagcaactataggagaaaggcgaatccataacttttctcttagacaggtttcttctaccgatgaacaggatgtgtttgtcatctcttatctgctacagaagatgaccaatggaaaaacagttttagatctggctattaagattgattcattgatccctgattttaaaacaaaagagaaattatgggcgaatatatttgatgttatggggaacgatatttctttatcaacatcattagcttttgatgaaacacatgctagaaaaaatgtgctttactttaattctaaaaacatccccaagcctattgtcgaatgcaaagcaattagctcagtcagatatcaatgcgatctttcagatatagaatatatcgctgacgattcttttgtattttag

SEQ ID NO: 145757 - DNA, 2280 bp, Enterobacter cloacae
atgatttcgattaaggttttagaaaagataaacccacctttgaaatggtctccgataactggggaagcaacctttagttttattgatagcaaatcaaatccagtaagtgggccaacaatcgaggagctgacacaaggtgaaaattcgcttgtccaagaggctatgagaatattgggtagatgtttgccacctactgaattagccggatccgagactggtttagtagttggctatgttcagagcggtaaaacaatgtcctttgaaacagtcatctctttagcaaaggataacggatatgggttagttattttatttgctggaacaaaaacaaatctacaacaacaatctgaagaaagattaattaaagatttggaaataggggaagaggattattggagtcatttttctacctcacaaaatattcaacctgaacaagtgattggtaagttaaattcatggaaaactaatcaattacaaaagaaatccattattataacagttcttaagcaagcggttcatttacagaatcttcattctttattaaaaaaaatgccccttaagggtgtgccaacattaataattgatgatgaaagtgatcaggctagtttaaatactttagcatctaaaattagaaccggaaaagaaaatgccaatgcgaaaagtacaatttatgaatggatttgcaatgtacgaaaggttattcctcatcattcttacttgcaatatactgctacacctcaagctttattattaatggctcaagcagatttattgaatccaagttttgcagaaattgttacaccgggtgttgcctatactggtgggaaatcattcttcaaggggaatggggaattattagagaatattccaccaaatgaagttccaacaaaagaaaacgaaatcaaaaccactcccaaaagtttgataaaggcgctaaagttttttgtgcttgtatgtggacaacatgcaattataaaaaataactgtaccgttaaggctgatagaaaaaaagatagaaatagatcaatgatggtccaccctgctatgcagacaagttcccataaacaatataaaagatggatggacgctgcgttgaaggcgttaagtcgtcttattagcgataatttaaagaagggaaatcttgcaccagttgagtcatatttttcttctgaatatgactcgctttgtaagacatcaccggatgttagcaaacttactgatttaatacattctatatcggaaaatgttctaaatgatttatattgcgtagagatcaatggaactcccgatgcagaaaaaaaagttaattggaaatctaatccatattggattttggttggtggtgcaaagcttgatcgagggtataccgttgaaggtttagtaacaacttatatgccacgccctctaggaacttcaccatcagcagataccctgcaacaaagagctcgcttttttggttataaaaagaattatcttgggcagtgcaggatttttttacaagaggatgttaaagaagcttttatcgaatatgttgagcatgaggaatatgtccgctctgttcttgttaaacatagaggtgagcctcttagcagatggcgtcgtgattttattttaggtgaagaactaaaaccaaccagaagcaatgttatcggaaggactatacaaagaatagacatttctaattggttggttccaaaacgtttacatcgtgataaattagctatcagagaaaaccaaattttattaacacatgttcgaaaaaaatgggagaaagaattttcacctgttgttgatgcaattactattttgcagactagcaaggtctctcattcaaactctgaactcatacgtaatatccctttaagaaccattttggatgattttttattaaatatacaagtaaaagatcctcaggatgctgaggagcattctgcaactttgatagccttatcttccttcctagaagagtggccagatttgaatgttgacgtttttttaataaataaattacaatcgcaatatcgttctaggcatggtaaaaccccggaggaacgtaaggctttacatgcgcctataaatcaatattttagtaacagtgcaaattctgtaaatgataaatcttttaaatccgaaaacaatataactctgcaattacgtacttttgatcttggttcaatagtaaaagatccctcctcagcggatataaggaatgtcgtttggtatgctgttcacattcctgaaggattgacaaaaaatatcttaatagaagggcgggtataa

SEQ ID NO: 145758 - DNA, 1569 bp, Enterobacter cloacae
atgttcaaagaaaaaatttccaactctgtcgaaattcgccctcaggtaactgttttatcagttcttcgacatttgaactacaaaccttggtttgctatcgccgaatttatcgataattcaattcaaagttttattgaaaatgaagaatatttaaaaaaaatccatggcaaagaatataaatttaatataagtataaatatcgaaacagctgcgccagggcgcataataataaaagataacgctgcgggaattgctgctaaggattttcatcgagcatttcgtacagcacaagttccggaaaatcgttcaggattatcggaatttggaatgggaatgaagagtgcagcatgctggtttgctgaaaagtggtctgtgagaacgaaagcaataaacgaaacaattgaaagaacaatacttttcgatgtaaataaaatagtacaacaaaatattaataccttagatattgaatctaaaccgtcccaagaaaattatcactataccacaattgtacttaatagactgcatcatattcctcaaggtcgaactttaaaaaaaataaaagatcatctgtctagtatatatcgaatgtatttattagatgattttattaatattaaatttaatgaagaaaaacttagttatgaaagacctgtaatcttaaacgcaccaaaatataaatcaccgggattgatatcagaagatacaacctcttatgaatggaaaaaagatatatctttttcaattgacgataatgtaacgataagtggtttcgctgcgctgcgggaaattggttcaactaatcaagctggtttttctcttttccgccgtggacgtttaattgttggtagttgtgatgatgcttataggccagaattaatatttaagagatctaatagttttcaatcgcagagattatttggtgagcttcacttagatggttttgaagttagccataccaaagatggtttccgatgggagcattacgaagatatattccttaacaaattgaaagaatgcttagaaacaggaaccttaaatttaataacacaagcagaatattatcgttctttaccaccgcgaaaaaaaatcgaaagtatagccattgaggcatctcagaatgtcgcacaacatatcattaccgaagttgagcctattttacaaaataaaaaaaataatccaactgagcctgaattaatcaaaaattctttagaaaaaagcgaattccaaatttctgagcggaacgtaactattaatgatggtttttatctttgggatataacgctgcgtacatctactgatccttcttgcgaagattggttaactatggcaaaagacgatttcaattcggaaaaaagaaatttaattattgacctttcactcgctcaccctttttccgtcaaattcattggttcaaccaatgaaaatatagaactgcttttgagaatcgctacggcatgtagtatttccctagtattgacggaagaacttactggtgatgcgccagaatattttctttctaatttaaattctttactaagaaatgacttaataaatagtgccattatatag

SEQ ID NO: 145759 - DNA, 1356 bp, Enterobacter cloacae
atggaaagcaaaaaaacatttaaattcatagacttattcgctgggttgggtggctttcatcttgcgctggctaagttaggtggaaattgcgtttttgctgctgaatggaaagctaacttacaagatctttattttaataattttggattacgtcctgaaggtgatataaccaaagttcatgctgaggacgtcccggagcatgatgttttgactgctggttttccttgtcaaccattctcaaaagctggtgaccagcttggttttgagtgcaccaaacaaggcggactctttttcaatgttgttgaaattttagaaaaaaaacgacctaattatttcatacttgaaaatgttccaaatttactaaaacacgatgatggtaaaacttggagtaaaatacaaaaactcttggggaaagaagggattggatataatattaaagcgacaaaattatcgcctcataattttggcataccccaaattcgtgaacgagtttacattgttggttctttagaatctttagataatttctcttggcctgaaacaacaaataaagaaacaaatattgaaagtattttggatgattctccagaagatgcaaaaaaactgagtcaacaagtaaccgaatgtttggaaatttggaatgattttctaacggcagcgccaaaagatattgaactaccgtcatttccattatggtcaatggaatggggtgctacttatccattcgaaaacgaaacgccttatgctaaaaaattacgtttaggcttaaatggactcaaagggtttagaggaaatcatggaaaaagaattggttatctaaaaactctagaggaacgctggaacaatcttccaagttatgccaggaccgaggagtttaaattcccaaaatggaaaattaactttataaagcaaaatagaaaattctattctgataataaggaatggatcgatgcatggatgcctaagatattaaaattcccctctagccttcagaaactagagtggaatgtacatggaggggagcgaaatatttggaaatatgttattcaatttagagcatcaggtgttcgagtaaaacgtaaaactactgcgccaagtttaattgcaatgactgatactcaggtgcctatcattgcctggcagaaaagatatatgacacctaatgagtgcgctcgtttacaaagtatggaagaactcaagtctttaccagcgagccctacacaggcttttcaggcgttaggtaatgctgtcaattcaaaggttgtagagagtgttgcaagagcgttgctttcaattcctgagtgccccattgacaagaaagaaaatattatagtggttaatgatctttgtgcttaa

SEQ ID NO: 145760 - DNA, 1584 bp, Enterobacter cloacae
atgaaactcaacacactcaccattggacagcgactgggccttctggcgtcgcttctgttgcttgcaacgctttttattggcctgcgtggcctgctgatcaatagcgacagtcaggcgcagaatgaacagattatggccatggaacagaccatcaccagcagcatcgataccgcacgcaatgcccaggtacaatttaaaattcaggtccaggagtggaagaacaccctgattcgtggcgctcagggacaagaagcgttcgataaatacaaaaaggcgtttatcgctgaaagccagaacacgcaggcactgctgacccgtctaagcgagctcctgcccaaaattggcatggataatcaggaggttctggccacacgcgacattcacgccggactcgaacagaagtacctggcggcactggccacttaccaggttggcgatacaaccagcgcccagcgtgtggataagcaggtcacagggattgaccgcgagccgacaaaaatgatcgacaacgtcgtggcccgcacgctgcaacatgcccaggctatccatgagcagaccatcgcccgcaaccaggaacagtaccagaaaacgaaatggatgctgatgctggcaatggcgctcacgctggcagccggaatgcttgttacctggtggctgattcgcagcattactcttccgctggcacaagccgtcacgatagcgcgtaccgtagccgccggtgatttgcagtcccgctttaccgtggccggtcgggatgaaacggctgagctaatgcgcgctctgcaggagatgaatgaaaacctcacgcgtattgtctctggggtacgtaagggtaccgaaaccatcgccaccgcgtcagctcagattgccagcggcagtcacgagctttcttcccgcaacgaagcgcaggccagcgcgctggaacagaccgcagcatccatggaggagcttacatccgtcgtgaaaagcaacgcagaacattcacgcactgccagcgatcttgcccgtaatgcccgtcaggtagcccgccagggtgaagaagccgttgaacgtgcgatgaacaccatgagtgaaattcataatttctccagcgaaatcaactccatcatcagcatgatcgacagtatcgcctttcagaccaatatcctggcgcttaacgctgctgttgaagcggcgcgcgcggggactgaaggccgcggttttgccgtcgttgcagcagaagtgcgcgccctggcgcaacgttcagccaccgccgctaaagatattcgcgttctgatcgaccgctccgttaaccgcattgacgaggggaacggccaggtgcagcaagccggcgccgcgatggcggatattctgcacagcgtaagtaaggtgagtgaattgattgaggcgatttcacatgccagccatgaacaaagcacgggtatcgaccaggtcaatgtggccgtgacgcacatggatacagcaacgcagcagaacgcgaccttgtcacaggagtcttccgccgcagcgcaagccatgcatcgtcaggcggaacagcttctggaatcggtgcagatattcaaactgcgtcaggaaaccgtttag

SEQ ID NO: 145761 - DNA, 162 bp, Enterobacter cloacae
atgtccttatcttcccgcttgtggatgatctcagggggctattttaccggtagtattccggagccactcacaaaaaaagcccccgggcagggggcaacgtcatctatggctatgttctcgttgttggctttcctggtgctagcgttaaagcgttatcggtaa

SEQ ID NO: 145762 - DNA, 585 bp, Enterobacter cloacae
atgaatgtgataaagacaagcattcctgaggttcttatttttgagccaaaggtctttggtgatgagcggggattctttatggagagctacaaccagagaatttttgaggaggccgttggatacaaagtagaatttgtgcaggataaccattctaaatccagtaagggggttctacgtggcttgcattatcaacaggttccccatgctcaaagtaaactcgttcgctgcgctgtgggtgaagtattcgatgtcgcagttgatatacgtgaaaattcaccaacgctagggcagtgggtaggtgtactattatctgctgaaaataaacgccaactctggatccctgagggcttcgctcatgggttcctgacattaagcgataccgctgaatttctctataaaaccaccgcctactatatgccagcaatggaagctggaattatgtggaatgacgcagagcttaatatttcgtggccagcacatggtgagtttttggtttcaaataaggataaggtattaccatccttctctgatgtagtttcaaatttcaaaaatttggatactactcttgccaagagtaatagttaa

SEQ ID NO: 145763 - DNA, 1530 bp, Enterobacter cloacae
atgttctctctatttgagggaggggtagcctttgcaattaaaaccatgatggtgatgattatgaacacgaaaaaggtcttcctgcttagttatgacatttatcttttctcaggggttaggtcatttttacctaatctgatactggtggataccggaacctacatcaatgattctgatatctccacgccccagtacaaaacctgcctgttaattattgatagccgaatgccatttggcctggttaaacggtggctgcaaagaaacagtagtcagtttattaatatcaagagtgtggttattaagctgagtgaaaataaatgtattaaccgaggctttgaatacgcggagtgtatcgatgccagactggacactgacgacatcattgattcgctgaagaagattttgatggcgaatactgaaaacggtgcgctcgccagaataggctttgtggatgaatttcgcctgagcgattttgaacaggagatgctcaatgcctcattcacccgaaccggccaggatgaattttgccgggcgaattcgctggcggtgaaatcgctttatcgctatcgggataaaataacccatcgtctgggatttgataatttcaacgagtccattatttttctttcccgtaatggcctgctgacagaaagaataagtggaaatgagaagccgccgcgctttgtctgtgataataacgaagccgatcgattgagcctggcgctgaaaaatgaggagattattccgtattaccagcctatcatcggcagcaatggagaactgagcggggtcgaagtgctagcgcgctggccgctgggtcataattacgccatctcccagcgtgagtttattccgctggcagaaaaaagtgggcttattaatgagctgaccagctatttaatgaataaggtggccagcgatttaaatcacagcattcaccggcacgggcagtccttttttgtcgcttttaacgtaagcccttcaagcctgagcaatcccgtcttttactgggagtgccttaactttttagagttaacggaatcgttgccaataaagctgatgattgaaataaccgaaaaccagacgctggtggtgactccggcaataaaagagctgatccgctccctgcgcaatcgcggggtactgtttgcgctggatgattttggcacggggtatgcgaatctttgctatctgaacgagcttgaactcgatgtgattaaaatcgacaagagctttatcaacagcatccacgcgcatgagcagtcgctgccaatgctggagtcgataataaacctggctgccattctggggctgcaaaccgtggctgagggggtggaatatgactaccagcgcgactggcttgtggataatcaggtcgactaccagcaggggtacttttttatgcccccggtggcgctggcggagtttaaaggcttcatgaagcggtgtgaaaatatcgcgaggcccgtccgggaaaagaagtctccagggcaggaaaagcagaataatccgcgccttaccgcaccctga

SEQ ID NO: 145764 - DNA, 474 bp, Enterobacter cloacae
atgagtgccaaaattatttttattagcatcatgacagcgctggtcgcgcttttcttcattgtacttcaccgcggggcaatcccggcggcgctggtctgtacctctaaatatcatctcgatctggacacgcaacaaaacgggataaaaataaagggagaggttctccaggtattcaggatctcttcggaaaaagacgggatgctgtcgcaggtgggtatgctggacgtaaatgataaacagtacgccgtgaatcgcactacgtcgctgcgttttttagggaaggatagcgacggatatctgcgtacagagcgcctggcaataatcaagaacgataatgacgatctgcccgacgcgataacagatttgctgatgtcaaaacaaaagctgttttattacaaggttatccatatcgacgacaatgtatatggtatcagggatttgcgccgcacgctgatggtctgccgcgcgaagtga

SEQ ID NO: 145765 - DNA, 732 bp, Enterobacter cloacae
atgagaaagataattaatggtcgggttttgtacgactctaagaaacgagaattgagcgtacaagatcaacaagttgttctttccgcttcggtggcaaggttactggatttttttattataaataatgctcgccaattaagccgcgaactgatcattgaagaagtctgggctaagtatggcatgaatccctccggacatagtcttaataaaagcattagtttgttacgcaagggattttctgcgctggggattgatggcgttatcattaccatcccacgagaaggctttgtttttcaggcgcaggtcaacgataaccgcgaagatatattggatgctactgagaaagacgtaacgaatgttaatcatgcagggacgtttccctggaacaaaacatttatagtctgggttgttttttttctgtttgtcgtgggaggtatgggtatttttcttaccgtaatgtttcgcagtaacgacggcgtggtacatgtttcaaatgctggggtctgcgaagtgtatacgatggatgataattcgtcggagaaagtttttaagtttttgcattctaaaagatggaaaagttttaatgccatttgtcacggcacgaagagagctatcatattttatgacgataacagcctgtctaagggcaataagctgaaagaacatttttttagtatttgtatgatggatgaaaaaaaggtggcgtatgagtgccaaaattatttttattag

SEQ ID NO: 145766 - DNA, 681 bp, Enterobacter cloacae
atgaagcgcgggtatgcggcaatcatcagtgcggcgctgctgagcttttcggcgcacgccctgtatctcgattccacgatttacgagatgccggcggacaagtcattcatcagcaaacgcatttttaacgacagcaaaaagcagaatgtgtatcgcatttctgcggtgaaaattgataagcccgggccgggcggggagaagcggcaggatatagaagaaggggagctgatttttgcgccgctgacgttctcgctggcgccggatgccggggagttttttaagattttctaccgcggcccgcaggatgataaggagcgctattaccgggtgcagttcacggagctgcccgtcacgatgttcgcggagcgcaacgggggaaaaagaagcgaagcgataccggctatcgccctggatacgatactggtggtgcgcccgagaaaaatcgacctgcgctataccctggatgagcaggctggggtgcttaaaaataccgggaacactttttttaaaatcattgtgcagcaggggtgcaattcaacggatgatgaggccactatccgttacgtgctccccggagaaacgtatcgaagcagcgggttaaaaaatcaaaataaaaaattcattgttgctttgcacaagtatatccctattggcaacgcgtgttttaaacccgactcataa

SEQ ID NO: 145767 - DNA, 1614 bp, Enterobacter cloacae
atgaaaaatattaaccttattcttccgttactcgttgcgggtgcattgacgccgctggcggcgaaagcgttgactgcgtcctcgtccggctcggtcagcaataactttctgtttattgaaaacgccgtggacggtgagtatttcattaccccctccgcgctcgatcctcgctttagcggatccaacacttgggtgaaatacggcacctcgcaggtgagcctcggctatctcggctacgtgggctggacggctccggcgaataactatcaggatatgtggatcgataattcgccgattgacgggccgtttagcggcatccgttgttacagcggtacgcaatgcccaacgtccggctatatctccggtcagggccgagacggcaacggtttctaccacgctcaggtcggctcggttgcgggagtggtggggggggcgtacggctttgcatcgctgagcgattcggcctacgaatatttccgcgcgatgccgaccggcagcagcgaaacgtatgtctttaaccgctgctatacctcggttaactatgattacgcggggggcgagcgctgtaaggatcaaagcaccgggcgctggaactacgtgaactacaccttaacaaagcgcggccatctggcgctggaatctaccagcgctttccaggaactgtggatcgccagcgacgggacgccgagcattaccaatgactccggtgcctgcgagttgggggttgtcggaaacgtaagcggcgtgatctgcaaaatggtcagctacagccttcagcagaccgcgaacctcaccgcctcgctcaccttcagggcctatatcgattccgccgcgctgggctttaccccggcggcgtcaacggtgcgttattccggcaacggctcgaactggtataacttcagcgcgacgacggcctattacaatgtcttctcaacggacggccactacgtctatctctttttgtcgaagacgtttcttaaaaaccttgtcgactcgggctacagcattaccaacagccagccttttacctttgccttccgcaatagcttaacgccggagtcgggacattacgagttcacgccatcgctgcagctgaacattattccgaaggagtatggaatcagcattgtctcgtcgaataacaccacgtcggcaagcggcagcggcaccatcggcgatgattccccgattggcatggactatgtcgtcaccgtttccggcccgcgtcaggcggacagtattaccgctcaggtcacgggggacaccacgaccattaacaatacgccgtactgcttgtttacctccgcgcagggcgggatcagcgtgccgatcccggcgtatttgcagtacagcaaccagtcgggcagcgtgacgcaggtgcgtaatagctgtggcgaggcgcccatcagcctcaacgatgcgctgtggcagcaaacgccgtgggatgcgaataacaccgacgacggaagctacttcagcaccggcttatcgctgctgttcccgatgaatgactcccgctcggcgctgacggtttcaggctccgactgggaaggcgtggttagcgccagcggcgaaatcaaagtcaccgcgaactggctgggtgtcaccaaatga

SEQ ID NO: 145768 - DNA, 711 bp, Enterobacter cloacae
gtgacacagaacggctcctcagaatctacattaatgaagcaaatgactttaagttccacgattccgaatggaacgagatcatcggcgctgagtgcaaacgacacggttatcgaagaggcagaaattatagatccctcaatagatgcagaagccaagaagacgaactccaactcggaatcctccaacagttcgcacaccgagttggaggatgacggcgatagcggcgatgaagccattgccgaaatcgtaactgacgtcattaaaaaagaaccagaagttcttgaacggatcatgcaagacgaagaagttcgtcacatggttatggttcagcagaagagctatcgtggacctcttcctcctagcgaactgctttctggttatgaagcattttgtccaggagcaaccgagcgttttattggacagctggaagcaaaccaaaagcatcagcatgaaatggaaaaacttgctgtttctgcaacgattacgcgggatcaggagaatcgtaagtttgggtttgcattgacatgcctagcacttactgcaagtgtgattcttggggtcgctgatcatgatttcctcgccggcactattgctaccactacaattggtacgattttggttacattcattttgaatcgtcggccaaacaatagtaaagacgataatgaagagcagcaagctcccccacccgctgaaaataatgaaaaatag

SEQ ID NO: 145769 - DNA, 684 bp, Enterobacter cloacae
atgtgtggacgttttgcacaagcccaaacccgtgaagaatatctggcgtacctagccgatgaaaccgatcgcgacatcgcatacgaccctgagccaattggacgttacaatgtggctcccggaaccaaagtccttctactgagcgaacgcgatgagcaactgcatctcgatcctgttttctggggttacgcgcctgggtggtgggataaaccgccactgattaacgctcgagtcgaaacggcggccacaagccgaatgttcaaaccactctggcagcatggccgggcaatctgttttgcggatggatggttcgagtggaagaaagaaggtgacaagaaacagccctacttcattcacagggctgatggccagcctatattcatggcggcgataggtagtacaccgttcgaacgtggcgatgaagctgaaggttttctcatcgtgacctctgcagccgacaaaggtttggtcgacattcacgaccgccggccacttgttttgtcaccagaagccgcccgggaatggatgcgccacgatataggtgggaaggaagcggaagagatagcagccgacggagcagtgccagcagaaaaatttatctggcatgcagtgtcgcgtgccgtgggaaatccaaacaaccaaggagttgaattaatacaacatcaaataagggacaatcactaa

SEQ ID NO: 145770 - DNA, 513 bp, Enterobacter cloacae
atgaatgtagtcgattttttatcaagtgacatttggcaaggattgagtgttttaacccctatagccatttcgttaggtgcgattctatactctaaatttcttttcaaaagaggttttcgcactaaaaactctcgctttaaagacacaaaaaacttaccaaaagatttgtatgaaggacaaaatacaacactttacggcaaagttagggaggaggtttttcccggtccaccaaattatgagtccataaatgatggagatgagccgcagttctactggattctttatgtaaatgaacctattaagctggcgggacgaagcatggaggatgattctctttatgaaaaaggatcatcatgtatgttccagttatgtcttacacgtgaaatttatgataaacgattagatatccttaacaaatatgttagtgttcaaggagagatttttttaggtcatacaggccaccataaaaccaaagctcttttgaatgtaagcactataaaagttattaaataa

SEQ ID NO: 145771 - DNA, 591 bp, Enterobacter cloacae
atgactgaagtaatgactcaaattgagcttggcggtgcgccggggaaaatatttgggaaaacccaccggcggctaatcactaaggtatcggaagccgggacggctctagcaaaaacgattcctgggtttgaaagctatatgatcaatagtcagcgacgtgggttaacttttgctgtttttaaagggaagaaaaacataggtgtagatgatttgggatttcctgtcacaggtgaagtgataagaattgtacctgtaatcattggaagtaaaaaagccgggatacttcaaacgatattaggggcagttattgtggcagtcggggctattgcaactttcgggttcgcccaagcctggggggtaaacgtaatgatggccggtggagcaatgatcgctggtggtgttgtccaaatgctatctcctcagccaaccggactagccagtaaacaaagcgcagataaccgcgcctcatacgcattcggtggagtaacaaacactacagctcagggctacccggtaccgcttctttatggccgtcggcgaataggtggagcgattatctcagctggaatttatgtcgaagatcagcagtag

SEQ ID NO: 145772 - DNA, 756 bp, Enterobacter cloacae
atgagccttaatgctgattatcaaaaactcgagccgggcaatgaagtccggcttttttctgtcgatggtacggccttcggtatgtcagaagtgcttttcttccatgcacataatatcgctcatacaccagaagagattgaagctgcaggcggggatgaaaataaactgcctgcaaaacccatctggtggcagggaaaagaatataaagcctggccttgtcagattgaaggtatagaggcttcaactgatggcagttcggcccagccgaaactatcagttgccaatctcgacagctcaattactgctttgtgtcttgcttatgacgatctgctacaggcgaaggtcactatccatgacacgctggccaaataccttgatgcgcgtaattttacggatgggaatgccacggcagaacctacgcaggaaaaagtgaaggtattttacatcgatgccaaaagcggtgagacaaacgagtctgttgaattcacgctttcaagcccgatggacctgcagggactgatgattccgacgcggcagctgcattcgctctgtacctggtgcatccggaacaagtatcgcaccggcgacggctgcgattatgccggggccaactatttcgacaaaaacaataacccggtcagcgatccgtccatggatgaatgcagcggcactctgacggcctgcaaacttcggttcggcgaaaataatgaactctcgtttggtggcttcccggggacgtctttaatcaggagctga

SEQ ID NO: 145773 - DNA, 348 bp, Enterobacter cloacae
atggccatagagcattttgcatggaagattcaggcagcaagccagcccactctgagcagcaaagatacagtcagagctgcacagttcggtgatggatacaagcaggtaagtggttctggcctgaacgatgaggttcttaattatgccttttcttttactggcgatccggtaattgccagggagattcattcatttctgaggaggcataaaacaaagtctttcacattcactccacctggtggtgatttagccctctggcgtgttgaggcagatagccttcagcgagtcaccctgaataaaaaagtggaaaccgtaaccgcaacttttgaacaggcatttgcaccatga

SEQ ID NO: 145774 - DNA, 3144 bp, Enterobacter cloacae
atggcccagcagattagcgatctggttattaagctggatgttgaccgcgcaaccttcagcgagcaggtcgcccgaattaaagggcaactgacaggaatggcggatgagtctgataaagttcaggcgcgaatgcagcgtgctgcggaccgtcagagcgctgcactaaagagtgtgggcgacgctggcgcggcggcggccgcagacatgaaagcccgtcagtcggccgcaacggaagggctgaccaaagactggcagagcgtttcaaagtccgttgatgaaactcaccgccgcgttaccgagctaaatcagcgtatgcgtgataatgacgggcaggccgcagcgcttgcccgtcgacaggatgaactggcggcatcctttttccgccagattgacggcgttcgccagctcaatggtgaaacacagtcgcttgcgaacgtacaggcgcgctttcgcgcagccagggcacagggcaacatcacccagcaggattatcttgcccttatttcccgaaccacagcccggcaaaaagaactgcaggtcgtggaggaaaaatcggccgccgcgcgtacgcgattcctcagccagctgaagcaacaggttgcagaacaaaagctctccggtaccgagctgctgcgcatgaaggcagcgcaggttggtgcaagcgatgcggctgaggtctatatccgcaagctcgaagctgccaaagtcgccacgcacggtctggggctgcaaagtgctgccgcacgtcaggaactgggaatactgatcggcgaggtcatgcgcggtaacttcggcgcgctgcgcggctccgggatcacgttggcgaaccgggcaggatggatagaccagctgctgtcgctgcgtggcctggggatcgccggcttggttggtgggattgccgcggcggtattcgggctgggtaaggcttggtatgacggcagcaaagagtctgaggaatttaacaggcagctgatcctgaccgggaactacgcggggaaaacgtcagggcagcttcaggcgctggcgcgctcgctggccggaaatggcatcacgcagcatgccgctgcaggcgtgctggcgcaggtcgttggaagcggcgcgttcagcggtaatgacgtcagcatggtcagcaacgttgccgccaggctgcagcaggctaccgggcaggcccttgacgaaaccataaatcagtttaaacgcctgaaggatgatccggttaacgcggtcgctacgctcaacgattcccttcactttctgacggccacccagtatgaacagatagcttctgctcaagcgctgggggattcgcagaaagctgccgagctggccatgcgggcatattctgacgcggtcattcagcgcgccggggcggtcgaggataatcttggctccctcgaaaaagcctggaactgggtgaagaatgccgcatccggcgcatgggatgcgatgcttggcatagggcgtaatcctgacaccgcgatgaagcgccaggattcttttgctgaatggcaggcagcagagaaagagtaccgcgcgctgtccagcaatcttaaggtcgacccggattatgccggtaacaacgttctgcagaaagcggatgcggaaaggttgagaaacgcgcgacagcaggtggagctgaaaaagcaggcttacgatcttgccgatcagcaatacgctcaggaagggctggcagccgcgcgggaaaaaatgcggacggaccagcaggctcaggcaatccgcagccagcagcagtttaaccagctggtggagtccggcgctacggcggcagaaaagcgggcttcagcagagaaaaagctcagtcagcttattgagaaaaaccgccaggatgcgaaagacggtgtcgccacgctgtggactgaaaaagacattgccgcggcccgcgccgggattgaaaagcagtttaaggacgtcaaaacgccgaaaggcaaaagctattcaacgcccgccggagacaaggccgaggaaaaggcgcaggccgaactcctcacccttcaggcccagcttaaaacgctcgagcagcataccagcgtaaacgacgtcataagcaaacagcgtcaggacctctggcaaactgaaaatcagttcaccgttctgcaggaggctgctggtcgtcgtcagcttacggcgcaggaaaaatccctgctggcgcacaaggaagaaacactcgagtacaagcggcagctggccgacctgggcgataaggttgccagtcagcaaaagctcaatcagctggccgatcaggccgtgaagtttgagcagcagcaaaaagccgccagggcgggcttgcaggctcagtctgagggggtatccacccgggaagccgggcgacaaactacgctgcagcgtctcagtgaaagctattcgtacaaccctcaggcgcagcaaaaggttctcgaagagcaaagggcgacattcgaggctgaagatgccctgcgcgcaaactggctggccggtgcgaaacagggctgggccgaatatcaggattcagcgacaaacgttttcagctctgtacagcagatttcgcaggcaacgttcagcgggctggcgggccagcttaccagcctgacaacaaccgggaaggcgagcttcagggacttcacgacgtcgatcctcaaaatgattgtctcagttatcaaccagctgctggtggcctacaccatccagagcgcgatgggctgggtgagtggtggtaccaatacagcatctgcaggtcagtcattttcggtaccgtctttccgccctacgggctttgacgcaggcggctttaccgggcacggcggcaagtacgagccagccggtatcgttcaccgcggggagttcgtcttcaccaaagagtcaaccagccgcatcggcgtggccaatctttatcggctgatgcgcgggtatgcatccggtggtctggtcggcggggggagcgcagcagcttctggtatcggtgggattaacgtttacgcacctgtttcagtgactacagcgcagtctaacgatacgaagcagcaacagagtggtgatggtgcacttgctcaggcttatcagaaagtggttgatcgttcggtccgcgaaggcatcgcgcgcgaaacaaggcctgggggaatcatctggaatgctactaaacagaggtaa

SEQ ID NO: 145775 - DNA, 273 bp, Enterobacter cloacae
atgctggctggaatgacttccagtgagctgggcgactggcaccagttctaccgggagcattattttcaggacgcgcagctcgatgcgcatttctctgagctgctttattccatctccactcttttcttccgcgacccggaacttacccccgcacatttcagcctgctttctccttcggatgtcgtcatcagcgatgacgagccggatgatgacacgctgatgaccgccgctgaggggataacaggaggtatccgatatggcccagcagattag

SEQ ID NO: 145776 - DNA, 207 bp, Enterobacter cloacae
atggtgttgtcagtcgtgaagggttcgaccttaacaaccttctttgttggcctgtcgccggtcctctgcctgatattatttgcgcagtcgatttacatgttcaaattgagctacaagacgctggctataacattgatgattttagctctagttttaggtctgttttattttgttttaacaaatattttatctgtcaatttgatgtag

SEQ ID NO: 145777 - DNA, 666 bp, Enterobacter cloacae
atggacatactgaatcttttagaggtcttaaaaccttccagtcatgttgtgttggtcaagttggaaaatagttccgatgtatgggattctgctggaaaagtattgattgcgattcttcctgcctttatatctttcatcgcgttatggttctcatattatcagtttaaagctaacacgcgaaacacgagtaaacagttttccttgggtattcatcaacaattattaaccttgaagctaaatacccgacttgccactgagatagaactgaaaaaggatatctgtaaagaagttagggctgcttttgttggttttttaaagcatcattctgaactttataatgctaaaaatgagcatttaaggctcaaagataatgtggacgaggaaagcaatcaaagaagaagtaaactacatgaaattattatgagtaaatctcaattaataatagaaagtaaattgcttattgactcatattttgacttaaaagatcctgatgataaagaattctttgatcaacttaatgaagctacaaatattgctttgacaggtggtgatggtactggggcagatttgggttattctcaagggaaatgtaatcgattatgtttcaagtacattgaaagaagacgtaaagaaattacaagcctggttgatactatcggtaattaa

SEQ ID NO: 145778 - DNA, 291 bp, Enterobacter cloacae
atgaccaccaacaattatgcgactctgcgcggcacaatcgctagagccaaacgccacgactgtcagaaagtcgtgatgcgtgtgacgttagctgaagaacttctcgatcagttgtcaaaagcagaggagcggatcgcggagctggaagcaatattggcatgtgataggtgcgggacaaattgtactcgtcctgacggggctcattattgccacgttagcgacaacgccgactcgcgctacagccccccagtgaatcaaaagccaagaattaacaatggagaaagcaattga

SEQ ID NO: 145779 - DNA, 678 bp, Enterobacter cloacae
gtggataaaaatcttagaaacattcatgaaaatatgattagtttgggatgtgggtctttaaggcatgccaattatctggggcatttctacgatatggttaatgattattgggaggaattgtctgtactccaagctgctcacgcctgcgaaatattcttgaaagctagactagcccaagagcatccattattaattttcgataccattccaaaatcaacgagtaagcatgttgatagtgctggcctgcttaatttcgaaagtttgctacaagatggcagaacgattgattattctgacttaccagaaaaagtatgggctgcgacaggtttgaaatttacacctgaacaattacggctttatagggagttcggctttcttcgcaacaaaatacaacatttcgcctctcctaagggtaacattcaaagtcaaataacaaactttatctatggtttcatagacccgttcataaattcgcaatggggtttgtatgcaattgatttttgcgacgacaccgaaccatatgaaaaccttattcctacactggcttgcgacgatatggagtttttgatttctccaggtttaggggggaatgtcatgcgattaattgaggctggatcgcctgcctacgttcgtaaaatgagaaagcaggcgatcgaaaagggttatattactagttaa

SEQ ID NO: 145780 - DNA, 1764 bp, Enterobacter cloacae
atggaagatttgaccctgcgttattacgacgcggaaatgcgctacctccgtgaagccgcgaaagagttcgcgcaaacccatcccgatcgcgcagcgatgctcgacctggataaggccggcacacccgatccgtatgtcgaacgcctttttgaaggctttgctttctcgatggggcggctgcgggagaagattgatgacgatctgccggaacttaccgaaggtctggtcagtatgctctggcctcactacctgagaaccattccgtcactctctgtggtggcgctcacgccagtgattcaggccgtgaagatggcagaagtcatgcccgcggggctggaagtatactcccgcccggtagggccgaagaacacggtctgccgctaccgcaccacccgcgatgtgatgctcaatccgctgaacatctcaggggtaaccatgaccactgagcctgacgggcgttcgctgctgcggatgcgttttgcctgtagcacacaggcggactggtcccatgcggacctcagccacctgagcctctatctcggcgcagatgcgccagtcagcagccagctacacctgatgctgaccaggcggcaagccgccttgtatatgcgtctgcctgggcagactgaccgtattcgcctggacgggtacttttcgccgggaggatttgcggaagaagatgggctgtggccgaagggggatactgccttcagcggctaccagctgctactggagtactttactttccgcgacaagtttatgttcgtccacctcaacggtctggacgggattacgccgcctgcgggagcagagtacttcgacatcgaagtcgtgttcagtacgctgtggccatcagacctaccggtcaccaatgacgcggttcgtctgcactgtgtgccggtgattaacctgttcacactggaggctgacccgctcaccattaccgggcttgagagtgagtacctgctgcgccccaaacggctgcaggacggacacaccgagatttattcggtggattcggtgacaggttcaaaccggaccagtgacgcagagtatgtgccgttcagcagcttcaggcacaagggcgggatgatgcgccgtcatgcaccaccccgttactaccacacccgcgtgaagcgcagcgtgaccgggctgcatgacacctggcttatccttggggggcaccagtgggaagaggaccgcctgtttgagcgtgaagccgtatcgctgcaaatcaccggcaccaacggccagctgccgcgccgtgcactacagcgtacgctgcttgaccgctgtgagcaggtggtcagtacacaactttcagtacgcaatctctgcaaaccgacgctgccagtctatccgccttccgaagaccgttttcactggcgggttctgagccacctgggatccggtttcctgaacatgatgagcaccgccgaagtgctgcgcggcacgctggcactctataactggcaggaagatgaactgaacacccgccgtctggaggcgattcagcatgtggagcaccaccgcctgcagcgttttgagcagggctacctgctgcgggggctggatatcgaagtgaccctcgacagcaacggcttcaccggtgagggagatattcacctctttggtgaaatgcttaaccggttctttgcgctgtatgccgatatgaaccagttcaaccagctcacacttatcgttcagccagaaggaaaatgcatccggtggaaagagaaccacagtccgcgtctgcccggctga

SEQ ID NO: 145781 - DNA, 1155 bp, Enterobacter cloacae
atgagttgggagcgtcaaaaatcacatgttactccgatgccggaagaatcttctcttcttatttggcttatcggtggtctcgctgccttgatcgcaggagggttgattttcgttctccatgctaatcagttgatgggagcagggcaggattacaatatttgggttgtgtccggctctccaccacttatctggattttttgcatttgcctgagagcctggctctataacaatggtgttgataagcacgaatttgaatcgaaagaagctgactactctcaacagcaatggaccgaatgggccgggcgttatctggccgtaatgggcagtgaagtgatcctgcctcagtcactgacagtgccaatgtttatacctggaagtaccgaattagaagaatacaacgggctggctaggaggcttgaaattagcccagccatagcagcatcattaaaacagctcgaaggcgttaaagttgcgctgaagcgattaccaacagatatagcgttgaaggcatttctgctaactgattcacctgaggaagatactgccttaaaagcgatctttgatgattgctggagtgagttgatgccagcggagcgtcctgtccccacattgtcagtgcaacgttctctttcttttgattcagtagaacgaagaatcaaaacgccagatatttctgttgagcttgtcatggtgcaacagctgtgtggtcgtgatcggtatagcgatgcgcttgctacgctgttgctgacaactgatgatgttgcgaccaaatatgaacttggccacaacgtacgtctgctccgtcctatgtctctggaaggcgatgacatgctcagtgaatttgaactctacttttctactcagacccagtctatcagtactcagcatatcattggtgaccacgttcgttgggggcagtcgttttcattgatgcttaaagccagtgagttacatcaggggcactggaaaacagaacagttgcattggcttgagacatatgccgggcgctgcgggccattttccccctggataatgactgccatagtcagtgatgcggtacagctactgaagacagactgtctgatgttatcggaaggtgaagggcagcgttttattaataccgtgacaacagggaataagaatgaaagcagttga

SEQ ID NO: 145782 - DNA, 609 bp, Enterobacter cloacae
atgtatcgttcaaccacttgcttgaagagtcataaagattcaaatggggatgtagtaaaagaacctaggtatcattttatcaagaaagaattccatcttgcatcaggtgaaagtatatttaacctcgacatttcacgcgatggtggcgggcagtgtaattggcgattaagcaatgtaactctagggtttaatctaaaagaactcccatcagataaagatgaaaaaagtgaaaacattccaattaaagaaactattgtatttgatgatgattcacctcagcggctaagtagagcatatgaggttattaatggaaatgtcaccctgaatgatgattacttccctttaataacaaagcgtaggagtatcggtagcccagtggaatattccatggttaggtcctcaccagatatgatttatcaatcaatatcggcaaaagaagtcatttttgagcctaggcttcatttgttaaaaaccttgcgagccacagagccagcggtgcaaaaggtcggggtgtatatgtcagtgttttacccagatggaatcgttgagaacgggccatatttccctaactacaaaaagcttcagttgcttgcaaaaggtagtgattga

SEQ ID NO: 145783 - DNA, 774 bp, Enterobacter cloacae
atgaaagcaacagctaaaatcatttttgttatacttctaaccttacaatttactgggtgtgacggaaataataaatttacaactgactctaaacttggaaatgtaaatttggtggtgaaacttcctgatgaaatggatttattacctgctgggatcatgtatcgttcagatttgtgcccaaatataaccttaagtagcagaggggagaaagtgacaacaccgggctttcattatgtgaagtctgactttttgaagtcagctgatgatacttatttacttccagttaatattgatggtggaggtaagtgcaaatggaagttaagtaatgccacgattgatgtaaaatataagcttagttcatttagtaatggagttgagcgatcaataggatcaggtattataattgtttttgatgataatttgccacagcgatatgatggtcaaataaatgcgcttccatcagattttgtaatcaaaaaagattattacccatggataaatgaaaaatttttgaatggtcatttgaaacagatttggttgtatggtgataatttgtattcaacatataaatattctaaccccaaggataaaagcattctttttgagccgatatcacatacagatctagtcacatactctactgggccaaaggtaaaaatagagggtggtaacaattatactgtgtttaagtatcctgatggtactattgattacaaaggaaaggatttccctgattttgataaactccagtccctttcagggaaaaaaaactaa

SEQ ID NO: 145784 - DNA, 1911 bp, Enterobacter cloacae
atgagcgaatcaagaacatctgctgtagggacattcggtaaagcccaggctccggcgcaaaaaaaatgttggattgaaattcaactggttgatgagaatggtaacgccgtagctaatatgccatggcgaggagagaatgaggctacccgtgataaagtaattagaccttatagtggcattactgattcagagggcattttgagaatcgatgatttgcttcatcctgatctcaccatttttgttgaagcccaaccacttgttgacgaaatggagcagaggcctttaagcatagagagaacatactcctattctatgaaaatgtcgccagtaacagtcgataagaaaaccaataacatttgttattatgttgttgtcggtcaattgtgtgataaagctccaagtatccctgactggaatagtaaagaattaccggcttttcattttcctgatcctgatttttccgggttaaccatttcgaatatgtactttaattcgagggttatagtgaaggtatgtccatttagagcatggaatattcttcttcatcatacaaaagattactcaatcgttaatggatttaatctaggcttgttggctgacttttcttatactaacggggaaaaagtatatacattctttaatgatgaatgcctagatctatcacgggtaccaactttgttatatcaatctatttcgattgatgtcccatttaaagaacgatatagaaagacagtatttattgatactacagtaggggaagatggagagggaggaactcaactattttatgtatcatctcctaaacaaatgctagtatgttggagagggacagagcctaaaaagcttgcagatatcgcagcggatggaacatttagaccaatcccttgcccagatataattcctggtggacagggtcataagggatttcttgatgcattcaatttagctaagaagaaattttcagaagattttgagtggattgagcaaaatgcaaccagccgggaattgtttatctgtggtcatagcttgggaggctcattagcattgatccattcggcaattctcaaggattcaaaaccttgtttgtacacttatggaatgccaagggtttttacagcctccacgataaagatgctggattctattactcattatagacatgttaatgattcagattcagttactagtgtccctccagaattagagctagataataagctatatgacttgtgggggccgtatggtattgtttacggatttattggttctgtttggggaatgggggttcaggcagcaggacttaagtttggtgatccatattggcatcatggtaatatagtttgcttttttaaagctgagcaatccttagttaaatacaccgacagagtaacacctttaataggaatggatgtgaaaaatccatatatgaaaataagagaggttttgtttaaaaagtgtaagttttatcttgtttcagatcttaataaccaagtcttttgcaagtctggtgatgaacaaaagtctttcttaaaatgtcttgatgaaaagagtgtggaatgttatttccctaaaaatacaaacccaattctagattctattacaaaccctataaatcatttaatgtcgagccaatacttgccatatataaataatcaacttattgaactcgttgatcctcagagagacttaaacagaaaaaggataagagcagagttttcaaagcaggtcgaagattcggccaaattatctaatagcgtatcacttgatgaagttgcgagaaatagatcatttttgatattacaaagcatgctttccaaaaccctagacatttcctctactaatattacttggaataatggtcttattcgctttaaaaatatcgctaaggaagagtatgaaagcaacagctaa

SEQ ID NO: 145785 - DNA, 2547 bp, Enterobacter cloacae
atgagcctgacggataccctgaacacgatggtggccaccgtcaccggaaaagccctgaatcgctaccgcctcgatatcccttcctgcacggccgatatcgacgtggaggacttcagtggttcagaagcgatgagcgagctttacagctacaccatcaacttcaccagtgccgacaagaacattgatgcccgccagatgctgagcaagccggcgaccctgaccatgggcgcgggcgatttgctttcccttacgcagcgcaaggtggttcacggggtggttacgcattttgagcgtaccggtggctccgcggatgaagcgaagtactgcatcgtgctggagccgtttctggcattgttggggaatcagttccgcacccatcgctttttcgtcaacaagtcggtgccggaagtggttgcagaagtgctcacggaacatggcctgaaaggctgggagtttgagtttaccctcaaggccgaatatccaaagcgtgagcagattaaccagtatcaggaaaacgacctcgccttcattgaacgtctgctggcggaggtggggatattctacttcttcaccctgcagcctgacacccagaccgaagtggtgcactttgcggacaagcagagcgcctggacgtttggtaaaaagcttccgctgaacagcccgtcaggggcgaatgacaatgcggccgactcggtgtgggatgtgcatgtctggcataacgtggtggagcgttcggttacggccagtgactacaaccaccgcgaagcccagaacgtcctgacgtctgtgccggcggacatgacccgcgatgacggggaagggaacacctacggcgatgtgtaccattatcgcccgcgtcaccttgaacgtggcgacaaaattaatcccgcagcggaaacaggtaacttctgggcacgcctggagcatgaacgctacctttccacccagaccactgtaactggcagcagtaccgaccataccctgggcccggctcaggtgttggctatcaccgagacggctatcccaccgacgctgccgcgagaaaccgaaaacggtcttgtcatcatcagtgcgggttactccgccagccgtcagaacgcgctaaaggttgaatgggcggctatgccgtactacgagaaccgatgctggcgtccagccgcgaaaaagcgtccggtggtcagcggcactctgatggcgcgtgtcaccagtgccaaagataacgacatctacgcctggcaggatgcatcgggcatgtaccgggtgaaatttgatgctgaccgcgacgataaacgccagggcatggaaagcatgccggtgcgctttgccaaaccttacggtggcgacaagtacggttttcactttccgctgatacagggtactgaagtcgccattgcgttccacgaaggcgatccggatcgaccgtatatcgcccatgccatgcacgactcccgccacgttgaccacgtcactgaagccaacagcacgcgtaacgttatccgcacagctggcctgaacaaactgcggatggaggacaagcgcggcgaagagcacattaagctcagtaccgaatacgggggtaagacccaactgaatttagggcacaacgtcgatgaggagcgcgttgttagaggagaaggtgcagagttgcgcactgatgattgggtagctgttcggggggggaaagggattttactaagtgctgattctcaaccaaatgctgaaggtgtaatgctcgatatgcgtaaagctgtacagcagctggaacaggctcttgccctcgcaaaaagtctgagcaaagctgctgagacagcaaaagcaacttcggcagattcagatagccaattgagtctgaataacgcgctctccggactgcaaaaaccagggatattagcccattcaccgatgggaattgggatggtaagtcccgaagcagttcggattgcgtctggtagtcaaagtgtaggaatcgtatctggtcgcaatacggatataagcgctgctcagtcggtaactgttgcggcgtcgaaagctgtaagtttatttgcacaaagtgcagggatgcaactttttgcagggcatggaaaagttgatgtacaggcgcagggggacgcactgaatgttcaggcattgaaggatgtcactgttaccagcaatagcggtagcgtgacggtaaatgccagtaaggaattaactcttgtttgtaatggggcttatatcaagatcagtggcggaaatattgaacttggatgtccggggaatatcctgctgaaagctgcgaatgtgcaaaaaatgagggcggcaaacttaaatctgtctcctcaggaactgcctaaaggatttaaaggcgggtttgcaataactaaccaggaaacgggtgaagtgatgccttacacccattataaggttatcaccgctgaaggtgatgtttactcagggacaacagataagctcggaaatactatgccaatttatactgcgtttccatcatcaatgaaaattgagtttcctctaagcagtactgacagcgaacaaggagcgtcagcatga

SEQ ID NO: 145786 - DNA, 228 bp, Enterobacter cloacae
atgaaaatcctgctgtttattgtgctgttctggagcgagatccacttcattcctgatgtatgggttgcgagttttgtgaaggcccatatcccgattagcggtgacggggaagaagcgatggacagcttcgagatgcatatcatcgtgattaaaacaacgttgtgtgctgtcggggcgtacctcctgatgaagctattctactggttgaaaacacgtcgaaaaaaataa

SEQ ID NO: 145787 - DNA, 606 bp, Enterobacter cloacae
atgcagatttgcatgatggattacgacaacctgtcggcggatggcaaaacggcgtacctgaaatgctatggcatcgggacttttgaagtgctgacgggcgtggatttttatatcaataatcctgactgtgctgaccatgaaaatgctgctatcccgccggggacttactgggtgaccgacaggcctgccggcagcttgtataaccgagtccgggcagaggcgatcgatgcctggcatggttaccgaaatcaccattccgaatggtttgcccttttcagcgataaaactaaaagagacggcatcatggtgaatggcctgaaccgtacaggatttcgtcttcatcctttgaacagcgatggttccggtgagtcttggggctgtatcacccttcgccgatccagtgattttcagcatctgcgacgtctgctactgcagcgggggacgttccctgttcctggcggcaatggcctgaaggcctatgcccgtatcgatgtgcgtggtaccccggactacagcctgtgtgataaagaaaccgaagaacgaaaagaggctgagaaacgccggatgcagcaggccctgaaaaagcgggcggggaatgccgaatga

SEQ ID NO: 145788 - DNA, 1338 bp, Enterobacter cloacae
atgaaaatttaccgcccgctttgggaggatggggccactctggccccgcaacagttccagcagcaggttcgctggaatgagcacgttgctgacatggtcgcccgaatgggtatttcacatccctggggcgtggttgtggcagaatttgatgatgctgcgctggcgctctctcgcctgaatgccatccgtctggtggtacgctttcaggatggtactcttgtggataccgacctggcagatacacttcctccggtctgtgacttgtctgttgcagccggcagtgaatctgttgatgtggttgtcgcactaccgctgctgagtgtcagtggtggcaacctcgataacggccaggacagtgagcgtccgcgtcgctggaaagcggagcgtgtagtagtgcaggaactggccgggtatgaaagcggggagttggccattctgcgtcatgcgttgaccctgcgtttgtccagccaggaaaatacggcatacctgacctgtccggtggcccgtctggtgcgtaatgctcaggggcaatggagccgggaccctgcattcattccgacaatgctttccctttctgcaagcccgcttctgaccaccgaactgggtgacctgctgatccgtttacaggcccgccgccgtcgcctcatggccatgcgccgtgaaagcaatgagaggatggccgactttgcagtcgcggatgtctccctgttctggctactcaatgcgctgaacagcgccgagccggtgctgacggaactgctgcagacaccggatcggcacccggagttgctgtaccgcgaactgactcgtctggctggcagccttctgaccttctcgcttgagcacgacgccggggacattcctgcttatcagcatgatgcaccggaacgggtattccctccgctgctgacactgctcgataaactgctggaagcgagtctgccgtcgcgggtggtgagtatccacctggagcatcaggaccagatctggaaaggcgccctgcacgatgctcgcctgcgtgaaggggctgatttttacctttccgtacgtgcctccatgccgaaccatgaacttcagacgaaattcccgcagttgtgtaaggcgggcagctttgatgatgtttcggatgtggtgaatgtggctctcagcgggatggttatcaaacctctgacccatgttccggcggctatcccgttacgccttgagaaccagtacttctctctggatctgagtaccgatgcggcccgggcgatgctggaagcgggaagctgcaccttctacaccccgcgctcattgggagatgtgaaacttgaactctttgcggtgctgcgcacatga

SEQ ID NO: 145789 - DNA, 582 bp, Enterobacter cloacae
gtgcacgaaatattcactatgctgctggcggtttttgaccgcgcggcattaatgctgatttgcctgttcttcctcattcgcattcgcctgtttcgcgaactgttgcacaaatcagcccactcgccaaaagagctgctggccgttaccgccatcttttcgctgttcgccctgttcagcacctggtccggcgtgccggtagagggttcgctggttaacgtgcgcattatcgccgtcatgtccggcgggattttgtttggtccgtgggtgggcgttatcaccggcctgattgccgggacgcaccgctatctgattgatatcggtggcgtaacggcggtgccgtgctttatcaccagcatcatcgccggggtgctttccggctggatcagccgcaaaatcccgaaaaaacagcgctggcgcgccgggatcgtcgcaggcatggtgtgcgaaacgctgaccatgatccttgtcgtcgtctgggcccccaccaccgcgctgggtggatatcgtttcgaaaatcggtattccgatgatcctgggcagcgtgtgcatcggctttatcgtgctgctggtgcaaagcgttga

SEQ ID NO: 145790 - DNA, 552 bp, Enterobacter cloacae
atgctaacgctggatacgcttaacgtcatgctggccgtcagcgaggaggggttgatcgaagaagtggtcattacccttctggcgtcgccgcagctggcggcgttttttgaaaaatttccgaagctaaaaaaggcgatgacggacgatctgccccgctggcgggaaaatttgcgtcaacggttcagggagaccgaagttccgcctgagttaacggaagaggtggcctgctatcagcagtgccagcggctctccacgtcacagtttatcgtccagctcccgcaaaccctgacgttgctcgataacgtccactctccgtttgccagccaggcccgggcgctggtcacggataacgccacctttacccccgcactgcataccctcttcttacagcgctggcgcctcagcctggtggttcaggccacaacgctgaaccagcagctgctggacgaagagcgtgaacagctgctgagtgaagttcaggaacggatgacgctgagcggccagcttgaacaggtgctggtggagaatgaaaacgccgcagggcgtctctga

SEQ ID NO: 145791 - DNA, 1392 bp, Enterobacter cloacae
atgctggccttcctcaaccaggtgcgcaagccgaccctggatctgccgctcgacgtgcggcgcaagatgtggttcaaaccgttcatgcagtcctatctggtggtcttcatcggctacctgaccatgtacctgatccgcaaaaactttaacatcgcgcagaacgacatgatctcaacctacgggctgagcatgacgcagctggggatgattggcctgggcttctccatcacctacggcgtgggtaaaaccgtcgtttcctactacgcggacggcaaaaacaccaagcagttcctgccgtttatgctgatcctctccgccatctgtatgctcggcttcagcgccagcatgggcgcgggctccgtcagcctgttcatgatgatcgccttctacgccctgagcggcttcttccagagtaccggcgggtcgtgcagctactccaccatcaccaaatggacgccgcgccgcaagcggggttcctacctcggcatgtggaacatctcccacaacctcggcggagcgggcgcggctggcgtggcgctgttcggcgcaaactacctgttcgacggccgcgtgatcggcatgtttatcttcccgtcgattatcgccctgattgtcggctttatcggcctgcgctacggcagcgactccccggaatcttacggcctcggcaaagccgaagagctgttcggcgaggagatcagcgaagaggacaaagagaccgaagaaaacgagatgtccaaatggcagatctttgttgagtacgtgctgaaaaacaaagtgatctggctgctgtgcttctcaaacatcttcctctacgtggtgcgtatcggcatcgatcagtggtcgaccgtgtatgccttccaggagctgaagctctctaaagaagtggcgattcagggcttcaccctgttcgaagtgggcgccctggtcggcacgctgctgtggggctggctttcggatcttgccaacggccgtcgtgcgctggtggcctgcgtcgcgctggcgctgattatcgccacgctcggcgtctaccagcacgccagcaaccagtacgtttatctggcgtccctgttcgcgctcggcttcctggtgtttggtcctcagctgctgatcggcgtggcggcagtcggtttcgtcccgaaaaaagcgatcggcgccgccgatgggattaaaggcaccttcgcctacctgatcggcgacagcttcgccaagctcggcttaggtatgattgctgacggcacgccaattttcggcctcaccggctgggcgggcaccttcgcggcgctggatgcggcagccatcggctgtatcgtcctgatggcgatggtcgcggtgctggaagaacgtaaaattcgccgtgagaatcgtgcgcagaaattaaaaacagcctga

SEQ ID NO: 145792 - DNA, 1215 bp, Enterobacter cloacae
gtgaaggctttagaagatttaaatgtaactaattacagagatagcctaggacgttactatactaaggaaatcattagtaatcttctcgtatctgagctttcgatcgaagagccacgcacaattttggatcttggctgtggggacggatcactttccaaagctgcattaacacgatggaataaagcaagatttgtaaccgttgatatcgatattgaaaagaaacctttaaatgaaaatagtttagatccttcgaatcattcacattttgtttgtgatgcgctgtcgtcatctttaataaaagatatcgggttatccccaggtagtgttgatttggcggtttgcaacccaccttttctctcgccacgctggcgttatgaatatgaagaaattctgacaagagcaggatttacttcaaatttgaaaaagatccagaaaagcagtgctgaaataattttcattgctcagaatttaaattcattaaaaaatggcggccaattaggactaattgttccagatggtattatttctggtaggagaaatttatatttccgagagcagttattaaatttacatacgataaaaacagtaattaaattacctagggatgtctttgtaggtaccgaagctcaagcacatattctgattataagtaaagggagggagggtgaacaaaagataaccttaaaagatttctcctctgggaccttcaatggagaaccaattcatattgatgctattaatgcgttgcattctctggattatgattttcattccttgcgctctagtcttttaagaaaaaataatctgactgtcgcagatttaaacgttgagataaagagaggttgcacaaactctaagaaagctaagatttctgatgttgcttttttacatacaaccgatatccacaatttctcaccaacattagtactagatgaacataatcagtgcttggataatgaagtttatgctgaacccggtgatttaataatggcccgagttggcagaaatctacataccaagatttgtattatcaagaaaggtcgcatgcctattactgattgcctttttcgtattagagggagccgtgaaaccttggatagaatttataaaactttctgttctgaatatggtcaggcttttatgaaggcaatgatgagaggtgtaagtgcaaaacatattactttatcttctcttaaaaacttcccaataatttag

SEQ ID NO: 145793 - DNA, 1728 bp, Enterobacter cloacae
atgtcagcagatatcaatgaatcttttcttgataatatacttgagcagcgtgctgattatatttcagacaatgcgattgtggaaaatacagctgtaagtgattattttcaagaaattatcgaaaccttactgaaaaagcaaactacccttatcgttggaccaaggggatgtggcaaaacacatatgatgcgttatgcatatatgaaatgtattgaaaattctaaatatcctcttgcaatatatgtttcatttaataagtattatcgacttgagcctatgttatttagtagagcaaatgcgattaatttatttcatacatgggtattagcaagaattatattatctgtgtatgaacatgttattacacatcttgatgaaataactgatgaacaaatagatcttgcatttgattttataaatatagatgaagttaagaaattagtggacaaacttgagagaagtatgccacttaactctgaagagttaattatcgtcgagtgtctttccatatcaagattacaatcaatactttataatacactttcgctttgcgaaaggaaaagagtcgttctattattagatgatgcagctcttactttaactcctgattatatgacggagtttttcgatatttttcgcgcggtaaaaaatacgtatgtctctttaaaagcttctgtttatcctggaacaacagaatatggagcgcggttccatccccatcaagaagggagtgttgtacaggtatggctctcagttaataacgcgaattatttatcttcaatgattgcaattgctaatgctcgcatagaaaactttgagcaaattccacaggaagtatgtgagtttttagcctatgcagcatttgggatcccgagagcttatctttttatgttattgagttataaggaaaaaaacttttccacagctcagcaaggtttgaataagattgttcaaactcattatgaatcattaattagtgaatttgaaacactagctataaaatctccaaaattaaaatctattatcgaaattggtggtgatgttttcaaaaaaataattatagatttcaaaaaatttaatgacaagttatatgaaagtaatttaaagcagattatattaggtgtcactaatattgatgagaatcctatggttacaaggatgtttaatcttcttgttgaagcagggctgttatacaatttaggtgaagtttcacatggtgatgatcggagttatgcacggttcataccacatatatcggcattgattgattctagggccttttcagggaaaaataaaggtggctcagcgaaacaagttaatgaaagattgagtcaaaaaaataatcgtcagccactacgtagatctgcagctagcctaattgataaaaacgtatttgaaaaattacgttttgatttgccagcatgtatacattgtggtactcagagaattaatatttcacagaaattctgtcataactgtggaacagaacttattgatgggtctatatttgaaaaatgtatgtctatgcctttttatagtgtacctggattgacatcttggcaaattacaagaataaaaaaagaacttgcacacttaaaaacaataggtgattttctctctatacaggatccagggaccgaattaagaaaaataaaaaatgttggtaagattagagctgagaaaataataaatcttgtatctggctatattgatgacttcttgcaataa

SEQ ID NO: 145794 - DNA, 894 bp, Enterobacter cloacae
atgagcaaatcggataatataaaactaattgactattcaacgatagtcagtgtacaacctttaagccaaggaataaaaactgagttgcttttttgccagtctcataaagatccctgcttatctccaattgacgaatttctcgaaaactcaaatgcgctaaataaactttgggtaaccaaacctaacattgaacctatattagccaatgttatatttcaaggatatttctctgctgtcgaaagttatattagagctttagttagagcattggttaagaatgatcattattctcttaagattgtcgagagtaaaaatataacgtttggtgctgcattacaccataataaaaatttcttaccagaagccttaatggatactttttcttttgtctcatctgaaaatatcattgatacctttagaaacttaattgacatcaaattatcacttgatgaagtcacaataaaagaattcgataaaatatgtgagttaagacactgttgcgttcatcgatttggtaaactgggagcgaaaaatgctatggccctaggtttaaatacgcatggaaaactctttgaaaaaccacttgaattgaaatcttctgatttgcagaacttatcgctggcatttagatcagtagtgaaaactataaataactgtgtttataaagctgtattagatagaacttattctacagatgttattggtaaaggagcgtcaaaaaggctgcctgatgttatgtggaagggtacatataatgaagataaaaccaacttcaaaaaatattataaaatattttcttctaaaattgaaaaatccccttcttcaatgagtttatacaatagctttatagaagaaaaaaaaagattagttgctaaaataatggaaaaaaaatga

SEQ ID NO: 145795 - DNA, 585 bp, Enterobacter cloacae
atgattcatctcgatacgttgtcgacccttgttgccgcaacgctggttcttctgcttggtcgcaagctggtacacagtgtttcctttctgaaaaagtacaccattcctgaacctgtcgccggtggcctgctggtggcgctggccctgctgatactgaaaaaaagcatgggctgggaaatcgattttgatatgtccttgaaagacccgctgatgctggccttctttgccactatcggcctgaacgccaacctggcgagcctgcgctcgggcggtaaggtgctcggcgtattcctgattgtggtggtggggctgctgctgatgcaaaacgccattggcatcggcatggcaacgctgctggggctggatccgctgatgggtctgctggcggggtcgattaccctttcgggcggtcacggaaccggggccgcgtggagcaagctgttcatcgagcgctatgggtttgaaaacgcgacggaagtggcgatggcctgtgcgacctttggcctggtgctgggggggcctgattggcggcccggtggcgcggtatctggtgaagcactccaccacgccgaacggcaggcctga

SEQ ID NO: 145796 - DNA, 267 bp, Enterobacter cloacae
gtgcgtgccgatgtggcaatgaccggtgaaatcacgctgcgtggtcaggttctgccgattggtggtttaaaagaaaaactgctggcggcacaccgcggtgggatcaaaaccgtattgatcccttacgaaaacaaacgcgatctggaagagattccggacaacgtgattgccgacctgcagatccatcctgtgaagcgaattgaggaagttctcagtctcgcattgcagaatgaaccctccggaatgcaggttgtaaccgcaaaatag

SEQ ID NO: 145797 - DNA, 978 bp, Enterobacter cloacae
atggaaatcgatattgaacaaataataaatcatattgaggagcttaaaaatgcgaatgaagctcagactgttgaaaatttgttacctgacatcttgctcccgctttttaagagtgaaggatatgattctattcatagaaatgtccggctaaaacctttgccaagtaactctattaatgaatgggacatgattataagcaagggttcaaactcagactttcataaagactcgattggagttgaagtaaaagtatatagagacagaaaagtcgatacaaatattgttaatcgaatagtcaataaagccaaactttccgaactgaaaagaagttttattttcagcccaaatgggttttccgatagtgcattaagttttgcttctaaccatcctcaagagcttgaactttatgattttacatctttgagagactgggtttatacgttaaaagatcaagaccaaaatatcgaacgtgaaattaattttattattaaaactgcatccaaagcatttattgaggccattgctaaaaaccccaaagctcttgaaagcatagaatggcgtgacttagagaggctcttggcagaaacttttgaagggataggtttttcggttaccttaacaccttcaagtaaagatggaggtaaagatataattattcagcatgaaatggaagggaagattaaaagctatattgttgaagttaaacattggagatgtggtaataaagtaggttcaaatttagttgattcttttttcaaggtagttgttaaagaaaaacatgaagctggtatttttattgcaactaatggctacacaaatactgcctttgaatctttaactaaaattgagagaaaaaaaataaagtttggaggtgaatcaaaaatagtttctctctgtaaaacttacctacgtgtgcaaaatggtctttggtcaccagagatgaacatatctgatacgttattcgagagtactatttag

SEQ ID NO: 145798 - DNA, 357 bp, Enterobacter cloacae
atgaaaatcatcgtaacgttatcctgtttcctgctgagcggctgtgttgtcggtaacatggactctaccgactataaatatgttcgttatgctcaaaccttccagaagccggggccgggaggctacaccgataatgagcagcgcaagaaagatctttacttctgtggcgtagacaaagacgccaatcttgatgacggcagctataacgggggcagcagcagacctgaccaaacacttcaggaaatcgttgccagaaacgacaaaatatcgaattgcatgaagcagaagggctataccgtctacggctatgacgagtgtggccccctcaaagcaccaaccggacgttgccctaattaa

SEQ ID NO: 145799 - DNA, 579 bp, Enterobacter cloacae
atgaagcatagaattatgctgctaacggcattgttattctccggcataacacatgccgcagtaactgaattaagtgacacgcaactatcgcaaattaatggtaaaggaaacggccttgttactaacccattgttcccaatacccaaaccaacaaccccaaccaacccttgggctgggataaagtttccgaaatactcaagtctgacgttgaccgactccggcagcataaaaaaacctcttgaagggtttgataccataaccggaacaaattttgttggcatgcactatatgaatatgattcataacttcggcgtcgatgaagatagtcgaaattatgtattgcacagccaggacttcgtcaacggcccgacaacgattaccgataccggcgatggtaaaaaatattcggtcgttggtgatgtgtggcgctacgcgcgcagtactgaaggccgtttcgaagcagcgaaatcatcggttgttgaagagtattatcgtgtcgtgaacaccgatgggaccttatcgaaccaggcactgcgctggacaaaatggaaccgcgacatcaacatgacaaagtggtga

SEQ ID NO: 145800 - DNA, 1215 bp, Enterobacter cloacae
atgatgtcgagagtggctggcgtcgttgcgccatttatatttgttacgattgcgcatgctgacattctcagactgaacaacggagacaatatcactggagatattgtctccttcaaagatggtgtgtgtgtgttcagtacaccctatggttcaagtctgcggatcagcgctgatcaaataaaaacgatagacaccgataagcagtatgcagtgacgtttaaaaatggtgacagaatcacgggattccttaaatcagatagcaatcattcagcatccattgtgcgaaaggataacgcgtatcccatttccttcccggatgtgacccatttcgacgtcgtcagaaaagataatagtcgaatagctaacatagaaaaaaaacaggaggagtatagcgcgcccattagttatctttccgactatacggttctgcttaatcacggggaaactgacgttgatttcggtttcaaataccgcacatggaaatccacgtcctcattgccgcagcaggggccttatcaagtttccagttattcgattaaaaagctttatttttatgtttcgccaaaattcggtattaccgacaggcttagcgtctggttgaacgtaccctggacctacacaaaaatcgaagatgtttcgagtaatgcctggacccgggatacctctcagggccatatcggcgacatatcggccggtatccagtatctgctactgaaagagaacaatgatcatccatccgtgacgggctcacttgccgtcaatacgccgaccgggcgcaaaaaatacgtctccgacttggacgcctggaagcagccgctcaataacagcgaaggctactggagcctgacgccatccctgacgtttgtgcggattacggatcccgtaaccttttttggcggtatctcatacgaaaaaacgtttgagaccagtaaaggtggggagcgaattaaagctggcgataccgcatcggcattcctgggcaccggtttcgctctcaataatgtcagttcgttgggcagcagatttacctatagctggtcagataatatgaaatacgaagggcgcaccatgaaaggcaccagccaggagtctgaatcgcttgcattttatttctcttatctgctatcaccgcgtttcagtattacgcctgaagtctccttcccactggagacaacgggttcaacgttcggcgtcagcatgacaaggaacttctga

SEQ ID NO: 145801 - DNA, 528 bp, Enterobacter cloacae
atgaaatggtcagcggcatgtttgttattactggcctgtcatgcgcaggcctataacgcaaccatgaaaggctggatgcgcttgcgtacagacgggattgttcgccagacgaccgatttttcatgcgggccagcagcgctgtcgcttctgctaaatacccgcttttcggtagagatcagagagatagatatcatctcagatattatctatcgcgctgagcctgggacagaagcggagaaactgcaaacaggtttttcccttctcgatctaaaaaatgcggctcagcgtatgggttttcaggcaaaaggcctccgatatgacgttaatgaaccactgacgattgaccaacccatgatcatccccctggaaggggaaaagtattcgcattttgtggtgatcaccgccattcataatgacactgcagaaattctcgacccggaaacaggacgaaaatcgataccattgtggcgtctaaaatcagagtggaaaggttacgcattgaaaacggaggcactgataaaaccttag

SEQ ID NO: 145802 - DNA, 150 bp, Enterobacter cloacae
atgtgcggcgggtgcttaagactttctgtcttgagcattgttgagggacagaaagtagaaagccccgggaaattttcatttacccgaggctactccctcaactccgacaagttgagagtagcctcttattctttttttgacaaggagtaa

SEQ ID NO: 145803 - DNA, 2118 bp, Enterobacter cloacae
atgaataaactttatacacttgagacgctgctgcgcaagttggatttgaggatatttaaacgcatcccagttgtctttcaaactgaagcgtccgaatgtggcctggcctgtctttcaatgatatgcagtttttatggcaagcaggtcgatctactgcaactccggcaacaattcaatttgtcatcacgtggggtcaacctccatgcgataaaagcaattgccagtgaactggagatgtcgtcacgcgcattgtccgtggaccttcaggaattacatgccgtgcgtaagccctgcatattgcattgggattttaaccattttgtcgtactgattaaggtcgataagaacagcgcggtgatccacgaccctgcgtttggacgacgggtgattagcatgcctgaattgtcccaacattttactggtgttgtgcttgaggtatggccgggaaccactttctcagttcaaaagaagcaaaacaggttaaaagccaccacattattaaagaatgtcaatggactgatgacatcactggcgaagatatttttcttatcgctggtgattgagttaatcagcctgctggtgcctgtgggaacacaattagtcacggataatgtcattgcatccggagattacggtttacttaatatcatctgtcttgggctgtttattctgattctgttacgtttgacggtcagtgtcatacgctcctggaccacgctgatactgggaacactcatcgacgtccagtggagttttagccttttttctcaccttattaagctaccaaccacctattttgaaagacgcaaactgggggacattcagtctcgtttccactcgcttgatgttatacgggccacttttaccacaggtttaactggtagcattattgatacgctaatgctcatgggtttgctggtaatgatgtttttatacaaccttcagctcagcatgatagtggtctcttttaccgcaatatataccttcattcggtttgctacctatcgatactatcgccagttatccgaagaagagttaatcaaggaagcacgtcttaattcttattttatggaaaccctgtacggtatcgcgacgattaagattcaggggatgactgacctgagaatcaataactggtttaatcttttttcagataaggtcaataccggcattcgtttgacgcgaatggatctcttctttggtggtgtcgtctcttttatcgccgcctgcgatcaaattgttatcctgtgggttagcggcaggctgatgatggatagtcatttaaccatcggtatgtttatcgcgtttaataccttcaggagtcagttctatgaccgaataaatgccctgatcaactttatcattcagctgaagctcatcaacttacataatgaacgcgttgccgatattgcgctacaggaagcatctccttcaacggccaccagcccgctgcgtttaccacacggagccttaacgctcgaaactcaggatctgacctaccgttatgataaccatgcggaccctatattcagcaaactgaatctgaccattcatgccggggagagtattgctattacgggcgtatcgggtgcaggtaaaagcaccttgatgaaagtgttgtgcggtttattcgaaccgtcgagcggctgcgtccgaattaatggcattgatattaagcaacttggttttgagcattatgctgaacgcattgcctgtatcatgcaggaagataagttgttttcaggctctatcaaagagaatatcgccggttttcgacctgacattgacgagcagtggatggtgcaatgcgccatcgcaagccatattcataatgacattttaaagctaccaatgggttacgagacactgattggtgaacttggggaagggttgtccgggggtcaaaaacagcggatttatattgcccgggcattataccgcaaaccgggtattttattcatggacgaggcgaccagccaccttgataaaaccagtgaaagtcaggtcaatcagtctatacaggagatgaacatcaccaggattattatcgcgcatcgcgaaaccacgattgcatcggcagatcgggtgttcgtgataaatggagcagagttaccctaa

SEQ ID NO: 145804 - DNA, 1275 bp, Enterobacter cloacae
atgtttcgcaaggaagctattgaatatcagagtacccggtgggaagggaaagccgttcttctgccgggcatcccttttgcttttatcatattgctcagcattctttttattgcttctatttctatttttattaccaaaggttcctatacccgtcgcgtcatcgttcacggtgaggtaaccactttccctggctcagtgaatatctctgcatcaatgcagggtacagtcatgaagagttttgttaatgaaggcgatcgcgtaaaaaaaggtgacgccctctttctcattcattcgggtgtatcgacgcaatcaggcctggttgatgaaaataaaaaaaaggagatcgcgctacagataaacagtatcagcgtaatgatggcaaatttgaactcttctaaaaaacgtactctcgctgcgttaacaactcaaaaagatcattatcagtccagttttaatacctcatctgggttactcgtgcaggctgaacgggaactgaatcagattgagaagaacgttaacgattaccgtagttatcaggaaaaaggtctggtcaccaaagaccagatgagcagtcaaaacgcactactctatcaacagcagagcaatgtttctgacctggtcgccagaaaatcacaagaccaggttcaggtcgatacgctcaatcagcagatccagtcccagggcgccgattatgaccatcagatttaccagcttgagcaacaaaaatacgagctggaaaaagaaaagttaaatacagaagcggaaggtaattatgtcatcgaggcaacagccgatggcttaatcgactcgatcaatacggcgcaaggtaagatgatcggcgcaggcgatgtactggcgcgagttcagcagaatatccattcaccatgctatctcgaaacctgggttcccgatgaagttcttccttatctggcgattggccagcgcgttaatgtcagttacgacgcctttccttatgaaaaatttggtcagttcagggcatcaatatcagcaatatccaggcttccggcatcgaagccagaacttctgtcaaaacagaccatcgcacacgaattctatgacgataaaaagtcctggtacaaaatcatgatcaaacctgacctacagtctgtgcaagttcatggaaaacaactcgcactgagccagggagccaaagcgcagatttctcttttccttgaaaagagacatatctatgagtggttattatcgcccttttacgaaatgaaaatgagcgtaacggacgcgggtaatgaataa

SEQ ID NO: 145805 - DNA, 285 bp, Enterobacter cloacae
atgcgtgaactcaatgaaagtgaattaagtaacgtcagcggtgcaggaatgtggggttctatcggtagtgcgattggtgggatgttcggtggtggtagtgctggttgtaatggcagctattctcacaccagcaccactaataaagatggttctcactctgaaagcacatcctttagcggtggttgctcggttaacgttggtggtaaaagcggtggttcatcaaaaggtaatggtggttcgaaaagtggtggtggccgccagggtaatgatcacggaagacattaa

SEQ ID NO: 145806 - DNA, 777 bp, Enterobacter cloacae
gtgaagattaaaaagggatacgtcctcagtgccgttttaatagcaatactctgcgcattcgctatttattcatacaatgcctaccaatttaaaaaagccagcagagatattttatatcaactctctagccaattaattgtgaagcaagggcttgaaccaaaatcttcaacccacctcgtttttgatacgttatatatcgacggaaacatatccaaagatgatgacaaaatcattgtgggacttatcaaaaaaaaccttatccctgtcagaacaatatcgataaacagtggtggcggcgatgtcgaaactgcaatcaatatagcacgaattattcatgataaagaaattaacattgaggtcaggagattatgcctttcttcctgtgctaactatcttttcccagcggcaaaaaacaaaatcatcaactatggttcgattattggtttccatgggtcacctaattctgatgacaataagttaacaactacagttaatggagaaatcaatacagacacaacgataacagatcgcattttctcagaaataagaaaaacggataaagcattctacaaagaaataaatgtgtcatggatgatgccactttgcgggcaaaaagaaaatattggtgatccagacacaggtctgtcgacgtacagcgaaaaggattttacgcgttttggcgtaaaaaacatttcattcacggatggtgaaatggtatggaaaaagtctatggatattatgggtataccttttgctcactattgcaaggaacattaa

SEQ ID NO: 145807 - DNA, 129 bp, Enterobacter cloacae
atgaatatttttcattttttcactgcggttcttaccgtcaaaacggggctttttacattctgcgaggaggttcccacggttatgcaagggtttcagtatgcgcttaaaatctctgaacgggcggcgtaa

SEQ ID NO: 145808 - DNA, 528 bp, Enterobacter cloacae
atgaaaaaaatgtttgtaattgcctctatggcagctgctatttctatgtctgcggcatctgtttatgctggcggtgctggtcaggtgaattttgcgggtacaattactgatgctggctgtactatcaccaataccgttagtaacccactgaatgtgaatctgggcacttacagcgataaggaatttacaagttccggagcagctactgctaaatccagcttcaaaatttctctctctgattgccctgatacggtcactaaagcctctgttatcttcgacggtactccagacagcaataacaccaatttgctgaaactgacccaggacgatggcgttgcaactggcgttgcaatccagttgtatgacatttctggtgctgaactgccgctcttcactgcctctaagtcttatacgcttgcgtccggtactaacgatctgtcattcatggctgcatataaatctactgcagcgaccgttactgctggtccggctaatgctgtcgctaacttctcaattagttataactaa

SEQ ID NO: 145809 - DNA, 687 bp, Enterobacter cloacae
atgaatgtcattattaaaacttttcttttctctgcgattttggccagttcatttgtgcaggcaggtgaagtgcggggcgttacagttggcggtacccgtttgatttatcaaggggggaaaaaggaagtttctctgaatatttctaattcagatatagggccttatcttatccagtcctgggcagagacccaaaacggtggcacagagaaagctccctttatcattacacctccgctatttcgtcttgacgctcaacagcaaaatatgctgcgtgtggtacgtgctggcgggaatttacctgaagaccgcgagtctcttttttggttaaacattaaatcaattccatcgggttcgccaaagaacaacaccaataccctgcaactctcagtgaaaaccagaattaagctaatttatcgacctcaaagtattaaaggggggccggatgatgtggctaaaaatcttacatggaatctgaaaggtacgaatttaactgttaacaacccgacccctttttacatgaacttccaacaggtgaaagtgggtggtcgagagattaaaaacgtgactttcgttgcaccaatgagcacggctacttttacaactccgccaggagtttcgggttctatcacctggaaagtaattaccgactacggcgctattggtaatgaacattcttcggataaataa

SEQ ID NO: 145810 - DNA, 2577 bp, Enterobacter cloacae
atgacgtcttattgtaagaaacgcccgcaattccgtgttagccgggtagccgtttttcttacgacccagctagtgctatggtcaggtgttacagaggaagcccttgctcgggattattttaaccccgcgcttttagaacttggggctccaggccagaaaggggtagatttatcctcttttgaagaccagggtggacaaatgcctggcacctatcgcgttgatatctatatcaataaccagaaagtggatacgcgcgatgtggaattcaaaatgcgaaatgatgagagcggcaaggaaaaattaacgccatgtctgccaatggctttgcttgaaagctggggtgtgttgataaaaaaatatccaactcttgatgcctcggacagcacttgtggcaatattagcgcgatcccgcaagctacaagtaacttcaagtttaaccaacaacaattgctgctgacctttccacagtcgtcaatgagcaactcggcacaaggttgggtcgatcctaaatcctgggatgacggtattccagcattcttgctgaactattcggcctccggtgctaataattacgcgaaaaacaataacggctatgacagcgaaagtcagtacgttaacttacgtccaggcattaacattggtccctggcgcgtgcgtaactacaccacctggacgcgttcttcatctgacgcgcctggcaatgatactcaaagtcattgggatactgtctacacctatgctcagcgcccggtagtcgctctcaaatcagagctgaccgcaggtgatagttcctcaccctcggatgtatttgacagtatttcgtaccgtggcgtccagcttgcctctgatgacgacatgctgcctgattcgctgaagggctatgccccggttgtgcgcggtatagcgcgaaccaacgcgcaggttaccatccgacagaacggttatgtgatttatcagacctatgtctcaccaggtgcatttgaaattactgacatgtacccgaccggcagctcaggcgatctcaatgtaaccataaaagaatccgatggcagcgaacagcagctcgtcgttccatatgcgtcactgccagtgctgcagcgtgaaggacgcttcaaatatagcgttaccagtggggtttatcgttcctacgatcacagtgtggacaaaacgccgctgacccaggcaactgcgatttacggtttgccaagtggcttcaccgcttatggcggcggtcagtttgcaagtcactatcaatccctggctatgggtctcgggaaaaacctcggagacctcggtgccgtgtctttggacatgacgcaagcgtgggcgacgatgagcaatcagcagaaagagaatgggcagtcctggcgcctgcgttacagcaagaactttgtcgacgtcggaacaaactttgcgatcgcgggttaccgctacgcaacagacggctactggaacatgtccgaagttctggattcataccgcgacacgaactacacgccaatgccggagcgtcgccgtaaccgcactgaactgaccgtttcgcaggcattaggtaacattggtggcagtctgtcattgagcgctgtaaatgagagttactataactccgataaaaccgttgagtcctatggcgttgggtataacagctcctggcacagcatcagctacggcttgaactacagctataaccgtaattcatacggtagcgataatagtggcgaccgatatgatgaagaccagattttctctactaatgtgagtgtaccgttcagcatcttcgagaaaacgtccacgacatctgtgagttatatgttgaacacggataaggaagggaataccacaaacagcatgagtctgagcggtaccacattagaacagaataaccttagctggagcgtacaggaaggttacggttcgcagggcctcggcaatagcggaagtatgaatgccgactggcgcgcgacctatggtgaagtgaatggtggctacagttacgacaagcagaatgagcgcctgaattatggtatccagggtggcattgttgctcatgagaatggcattacgctaggtcagccgcttggcgataccgttgttctggtggctgctcagggagccagcggcgtatcggtacagaataatacgggcgttaaaaccgatttccgcggttatgcacttgtgccttacgcaaccccgtatcgtaaaaacaacatcactttggatcccctgaccttcggggaagacaccgaagtatctattactactcagactgttgtacctacgcgcggtgctgtggtgagagcgaagtatcagaccagcgtaggatatcgggtgctaatgaacctgatacgtgataacggcatgccggtgcctttcggcgcgatggtgacggatccctcgaataaagcggacgctggttttatcgttggcgatcaaggccaggtttacctcagcggtttatcgcagagcggttctttactcgttaaatggggtgacgcttccgatgaacaatgccgggttgattaccaactgccagataatacgcagggtatcgttaacattaacggcaagtgccattaa

SEQ ID NO: 145811 - DNA, 960 bp, Enterobacter cloacae
atgaaattcttagattttattaaagtgatgcttggtaacattaaaagaagcgccactttattattggtttgcgttgtgccatttataacgggcaaagtattcgcgggtgaatgcccttatgcggtgcatgttagttatgcagggtcagttgagattgatcctacactgccggtaggttctgtgctcggatcgattaccctcagttggcctatgataggtacgacctggagctgtgttaatgcaccatcaggcggcagtattaatttccttgggaatggtactccaaatggaaatttgtacccgacacctgttcctggaatagcctacagaggacgtttacccgactggcaaaccttgggcatgggaggatggtggccagtaaacggaggatatccctataaagttaataacggtgtagctgatgggtctgcaataatcgaatttgttaaaacaggacccgtaggatctgggacacttggtccacaggtactgatgtatgggaaaatcgctaaccagtcatggtttaatataattttagatagtgctgtaccgatagggccaaaggatgatgcttgcacgattacgcaatcgacaattcccgtcacgctagaaacggttccttctagtgtatttgcatcaagtgtgactgcgggtgatacagggttttcaattcctattaactgtgcaaccccagccaacgtcgcgctgagtttcagcggagatacggtggatgcagcaaatggcgtgtttaaaaatacctcagcaataacgggggggcaggttggaatacagttactggataagaacaatacccctgtcgaaattggcaaatcgacaatcgttggtagtgtaactggagagtataattatccaatgacagcgcgttattaccgactgtctaccagtgtacctcctggtgaggttaacgggattgctaacgttactattgtatacaactga

SEQ ID NO: 145812 - DNA, 612 bp, Enterobacter cloacae
atgcttaatgttcttattagagatcatgacgctctctatatgagtagcttaaaattatttttgtcggagctgtttttatctaactataagagggatgttcatttcttgtcggtgtttgatgttgaaaacgtcagtaaagccgatgttatcattattgggtttgggcctggggagttttatacctgcactccggagttaaggtttcgcaagaaaagcattatcatcggtattgttgactatgaaaaagaaacgcctggcgtcattaaaacatgtactcacgatattgtatttatccggcgggatttgtctttgaaagacctacaaagaaaaattataagcctatggaatcaatcttataaatactcaggggttgacgcgtgtagaagttgctgcgttaataaatgtaacgtgttatcgcttcagcagatgcgtattatgtctcgtctgtctcgcggccaggcaatctctgatatagcaagagagttaagcataagcaataaaacggtttattcccaaaaacatttagtgatgaataagtatcagttatccagtaactttgagctgcttatgtttctggaaaacttgcaaggtaaaaaccggatggataattga

SEQ ID NO: 145813 - DNA, 537 bp, Enterobacter cloacae
atggtcaccacacacgtttttatcgcggtcagtcttgatggttacatcgcccgacagaatgacgatatcgactggctgctgcagcgcgacgatccaacggaagatcatggctatgaggcattcatcgcggacaaagagtggatcgtgatgggccggggtagctatgaaaaggtactgacctttgacgcatggccttacgatcgtcccgtgctggtgctctcccgacagctggccggtacgcccgtgcctgaggcgctaaagggaaaagtgcagttttcatcccggacgccaaaggaggtgctggacgatctcgctgcgcaggacgtacatcgcgtctatcttgatggcggacaggtgatccagtcgttcctgcgcgaaggactggtagccgatatggtgatcacgaccgtacctgtactgctcggggagggaaaaccgctgttcggaacgttgtcccgggatattgatttgacactggtatcaagccgcagcttcccttcgggcctggtgcagtcgcattatcgcctgacgccataa

SEQ ID NO: 145814 - DNA, 1785 bp, Enterobacter cloacae
atgagaattttattaagaaaattaaaagtaagctatgagaaattaaaaataaaagcatattatttagatgttttgtttttaatgtttatactttatttactgagtgaaacactggttgtttttagtggtgatatggattttaaaaccacaactcagatgtttttaaagtttatctggctatcatccccggttttgtttttatatttgttgcttagggtgctactgcttccggtatttttatgtgcttatgttttggtcgtcatgattgtaattatgacatttgttaattccactaagatggcattgactggagagcctttatcttataatgatattaccgtgggattcaatttaagtgtggccggtagatacattagcctgacctctgtgttcggtgtggttattattgttacaggtgcagtggttgctatcttactaagtaagaaaaccacaacaacaattaaaaattacatagcgttgctatttttgattgttgtcattttccctttttcattttctccgtatattggtgtcatttttggcgtaaacagcaagttagctgaaaaaataaatgtattatcaatggcgtttgacgttaattataaacagtggaattggcgtgataatgctactgctaatggcttgccaatgcatctaatccagaccagcgtaagaaggtctataccaggcgcaacagttgaagaacggattcaatatttaaatgaaaaaaatcaatacgcttctgctgatataaagaataaaacaattatttatattttatgtgagtcatgctggtacgacaaaaaaaattttagagagaactttaaacctctcattgataatggttatgctgaatttcgagcaacatcacctgtttatggtggtgggacagcgaatgttgaatttgaaatgttgactggcttgtcaagtgattcagataaactatctggaattatctatcaggaatattcatctacctttaaggataacgcggattcattggctagtgcattgaaaatcaaaggctatgggacttttgctgcgcataattttcataaaaatttttggcgtagagatgaagtgtataaaaagtttggttttgatatgttttctggtctttccgatatgggggaggcgccttctgaatttgtcagtattaaaaaatcttggcaatggcaaccggatgactatttgctctataattctgcattaaaatatattcagaatgcagaaggaggtaataaatttttacacttgatttccatgtcaactcatggccctttcaagcacataaatgactatggggaaggtgtatataattatgagacccatgaggcagttgagcgacttgttaaattttcagagcaggtggaaaaaatagaaccggatgctgtaattgttatctacggcgaccacaaaccagctctgaataaatattttgtagaaaatggggtgttatcacgggaaatattcagtaagattggggaggaaaaagatgaggattttatatttaaatcaaatgtaacacctctcgattttggtgatgttcctgttcttattaaatcaagtgataaaaaagctgtccaagagttgattggtgctgcgaatcaaaaacctttcttctgtgtttctgcattagtggataaatattttattcaatctgggcttgtatcatttaactataatgtagagcatggttgtgaaaataaagaatatcttgattatgctaaattgaaaaacatgactccaccatggatttactcaatggcattatttcatgattag

SEQ ID NO: 145815 - DNA, 534 bp, Enterobacter cloacae
atggcattgaattttttggatttagatgaaaaaacgagactgcatatggcttctgaaataaattatgataagcagcctgataatttctatcgcagtaattacctgtctgagcatggtaaaaccctatgggaatttttgctcgaagaatcagttcaacatgatgacgtttggttggaaaacgagattaaagcaagaggtatgcttgctcaattttacaccaaacggaaaccaaagagcacagaactcatgcaggccaaagtgccagtaaccggggctcaaactctagcagaaggtgagttcaatcgtctttatgcgagagggctatgctctgctgtgttgtcagaaggtggggagtttgtagaagcttatcgtgccagggagtctactaatcctcgacaagagtcagaagcaataatcggtcgtcgtttctctgcacaggctgttcttgatgatttacgttctagccagggagttgatagtgcgttaggtatttctcgaccaaattcaggaatatccattaaaagagttaaatga

SEQ ID NO: 145816 - DNA, 585 bp, Enterobacter cloacae
gtgattattcacatagctattcctcgctttgcattgtcaggtggaaaccttgtatctctggaactcgcaaaacatttggaaaaagaaggactgactgtttattgtttgtcaggctgccagagcaaacgtgcctctgaggtagtgcttataaaacctaaacgaggtattgtaaattccttaaaaaacttactttcttttttacttctttccgtacaagctcttttctataaaaattatatttcaacccatcatttaacatcggtttttaattttataaaacgcagtcagtttgctctggtacaagatttagaagcagatttttacccggaaaggtttaaaagaataggagggattctttggaagaattatttatgtgcgcatcatttgttatttacaaatacgactcttgcggcaaaagttgaaagtacggcatcttcagagattaaaggtttatcatttgtaccttttgaaatggtcgctgtcgagcaaaatgaaaaaaacattgatgcgattgctattatcagagatggtaaatacaaagaccctgataagacattacaagtaatgctttcattacaaacttaa

SEQ ID NO: 145817 - DNA, 840 bp, Enterobacter cloacae
atgaaaaatatcatcttggttgttttgtataacgaaataataacgaaaacacatagttttatctcgttagaaaaatcgtttaaaaacttaaaccgaagtactgatgagtatgaggttctattttgggataatagtaaagctgatattaatgataagcatgttgctgaggcaaaaagcaggttgcctcaattaggggtagtaaccaaatatattaacactcctgaaaatctggcgttatcaaagctttataataaagttattgaaaattattattgtgaaaaggattatctttttgtactagatcaagattctgatttcgaccatggttatttcttagcatttgaaaaagttatcaacttgaaaaatcctaatgtcatattgccaattgtgaagtttaaagatcgtattgttagcccgacgaaagtgctgtacttgaaaggtttttactacaataggccacctgagggatttatcaatagcaaaacggtttctgcgatcaatagcggaatgattatatcattacaattcattgcgaagcatggttacagatataatgaaaagctgcgcaattactgtactgatgataatttcatgcaatttgtacggaaactaaatggtagcgtatatgtaatggattgtagttttgatcatgacctgagtttatgcacgcttaatagcaattctgatagcttacgtacgcgctataacgagatggttcgatcgaaaaaaatattgtattcaaggaattttctagagattgcattcgtaaatgtttatttttttgcacatcgttcttatatggcattaaaatataaagatttagaatattttaaaggttga

SEQ ID NO: 145818 - DNA, 288 bp, Enterobacter cloacae
atggcagcgtcaggcatcctccaaatattgatttggattcctccgattgtggccattgcgaatctgttaggaatacaaattatgctacctcgcggcatgaaaaaacagttcagccttacgtatattctttgcggtattatcggtctgccactacttttcacgggtgcttatttctttgctgcatggggtattagtattgcatcaattattatcgaaattattgtagtaagtatgttctggtacttcatcacaaaatctccaaatccatttaaattatttgataaataa

SEQ ID NO: 145819 - DNA, 894 bp, Enterobacter cloacae
atgccgcgaggtagcataatttgtattccgacaaaagatcgcctggaacatttaaaaaaaacaatcgattctataatcaatgatggcgtaaacatcaacgattatgaaatagtgatctctgataattcagaaagtgatgttattaaaaatcattgtgaccatattgctgcacaaggctataatattaaacatatccgcaatccaattttgggtttttataattcgatagttgctttacggaatggtaatggggcactattaaaattgcataatgattacagctgcttcttacctggtcaattttcttatattgtcgaacttgccagacagaatatgaacgatgcgccaactattttttttgctaacggaacactgaaagtaaaagagaatacgcggctcaattctaaaaatcattttatctcggcgacgcatttccaaaatagttggagttcagcatttagtatctggaaggctgattttgacaatattccgcatgaaaaagacgatgttaactctatgtttcctcatacatctttgctcttgaattccgctaataaaaacttcctaatttgtaataaggttgtatttgaaaatattgctgtagccggaaagggtgggtataatctctttgagtgtttctgcgtaacctacctgggattaatcaaagctaagacattaacatccgaaatttcatcgactacatttctatcggttaagtggaaaatgtaccttaagtttattatcccttggtattttaaaacagtttatacggatcaaggatatacttttatcacggataatgctgatgaaatcttaaaaaaaacttatggcttaccagcatggtttttaattcgcgtgctttgtaagataaaagaaattattagccggagctaa

SEQ ID NO: 145820 - DNA, 267 bp, Enterobacter cloacae
atgtcaaatggttttgtattgctgggagataaaacaacgcatggtggtgaagtgatctctgcttcttcaactatgatagttaataataaaaaggtggccttagttggggataaagtaagttgtcctaaagaaggccacggaataaatgccattatagagggttcgcctgaatggtcttctgatggtaaatcagttgtcgtggatggttgccattgtgaatgtggttgtcaggtcatctccagcgcgccggattgcgctataggataa

SEQ ID NO: 145821 - DNA, 582 bp, Enterobacter cloacae; identical to SEQ ID NO: 145789

SEQ ID NO: 145822 - DNA, 237 bp, Enterobacter cloacae
atgaagcaaattcgaatgcttgcccagtattacgtcgacctgatgatgaagcttgggctggtgcgtttctccatgctgcttgcgctggcgctggtcgttctggccattgtcgtgcaaatggccgtcaccatggttctgcatggtcaggtcgagagtatcgacgttatccgctccatcttctttggcttgctcattactccctgggcggtctatttcctttccgtggtggttgaatag

SEQ ID NO: 145823 - DNA, 642 bp, Enterobacter cloacae
atgaagggtatgcagaagataaaaaggggtaagagctttgctggtgttgttcgttatgtattgcaaccgggagcacatcataaaagcgatccagtcgtaattggcgggaacatgttaagtggctctgctcttgaattgatttccgaattcaatggcacaaaacagcttcggccggatgtccagaaaccggtgtggcataactcacttcgcctgactagtggagaatccctaacggctgaacaatggtccagcatagctaacgactacatgaagaggttagggttcagtgatactcatcttcgttgttatgtgcttcatgacgatccggctggtcagcacatacacattatcgcaagtcgcatagatctcaatggtgggaagctctacttgggtaggaatgaaaatctcatcagcacacaaatcatcagtaaactcgaagtcgctcatggcctgaccgtgaccaatacagcaccttccattgcaccaaagcaaccgaagcgaagaaaggtttcccgcaatgaacagatgctttcagaacggactggccttcccccccataaagaaaacctacaacagatacttgataaaagtttattattatgtacacctaatacttcggaaactatctcactgccttgctaa

SEQ ID NO: 145824 - DNA, 237 bp, Enterobacter cloacae
atggaaaaacttagcgaagaacttgataaattagttaattctgaaaaagatattaattataaaactttctatcgttacattaatagaggatcacattcagattccattaatataagttatttagggcaaatatcagccaataaatatttagagatgtttgaagggatatttaagaagactaaggatgaacaacatttcaataagatgttagggatagaagatgaatatattgcatag

SEQ ID NO: 145825 - DNA, 123 bp, Enterobacter cloacae
atggctgcattagtatttagttttgcccttaagggaccaatttacttctcagagaagattatgactgcgtattttatatggttaatctataattcgcaggaaaagaaagagctggatttttaa

SEQ ID NO: 145826 - DNA, 1287 bp, Enterobacter cloacae
atggcagtaatcaatactaacagcctgtcgctgatgacgcagactaacctgaacaaatctcagtcttctctgggtacagctattgagcgtttgtcttctggtcttcgtattaacagtgcaaaagatgacgctgctggccaggcgatcgccaaccgcttcacctctaacatcaacggcctcaccgttgctgcgcgtaacgctaacgacggtatctctctgtcccagaccgctgaaggcgcgctgagcgaaatcaacaacaacctgcaacgtgttcgtgacctgaccgttcaggcgcagaacagctctaactctgcatctgatatcgattccatccagtctgaagttaaccagcgtatggaagagatcaaccgcgtaaccaaacaaaccgattttaacggcatcaaagttctggataaccgtaccgcaactgatacgagctacgatttccaggtcggttctaaagatggcgaacaaatcagtattgcaattggttcaagttcaggttggaacctggcgacagcaggcgctaacggcacttcaacgacttctatcaatacaaaccaggctgcgcttactactgctaaaacggcctataccgctgcttacaatgctgaagtgacagctaaatctgcagctgcagtaactggtgcctctgcggaacttactgcatacgccgatgcagttaatggttcgcaggccgagaaagatgcgttgagtgccctgaatacaaaattaggcttggactcttctcagtcaatcgattcagctactttggcaaaaatcaaaacaggttatgtgactgcttccccagtagcagccgataaaaccactgccgatactgccctaacggctttgagcgctaaatcttctgcggtagtagactcagctaaagcaaaagggactacagcagcagaagccactccgggagcagtagttaatggaaatctgcgtaccgttgctgcaaaaggtttcgacgtattgaacggtactgttgattcaactggcgctaccgatggtaacccactggctgatattgatgccgcactgaaagcggttgacactcagcgcagcatcctgggtgcttcccagaaccgtttcgaatctaccattactaacctgaacaacactgtgaacaatctgaccgatgctcgcagccgtattcaggattccgactacgcgaccgaagtgtccaacatgtcccgcgcgcagatcctgcagcaggctggctcttctgttctggctcaggccaaccaggttccgcaaaccatgctgtccctgctgcgttaa

SEQ ID NO: 145827 - DNA, 408 bp, Enterobacter cloacae
atgattatgcaaaagttattcggtgtgtttgcagtcacgttaatggtcagcgcctgtttgtctcatccagaacaatatcagtcgctttcggtaacgctgaaaaataatgaaccctgctttgctatccctgctaattccgggttagaagcgccggtcaccagccattcacccaccattatgaaacgagcgggaaatgaatggaaaacgatatcgccgccgtcaacatatagccctgtagtgacgttaaatactcagcagtgcaaccagtggcgtggtatcgcgtggcaaaccggagaatatgatgtggcacagacagtgtcggctaaaaacgattctgttcgttatgccgcgcgattcactctggaagaaaatgcttcgggccaatttacgatctctcagaccgaatag

SEQ ID NO: 145828 - DNA, 714 bp, Enterobacter cloacae
gtgaatactatggttaacgaagttgaaaacaaatatgtattattaaataccaagataactatagtcgttgccggtcagtttcatccaggtgttttcacaccagattggttttccagtcaccaaatagtttctaaagaagattgtgataatgccgagataaagtacatcgaaccatcagttatagatatagattttggctggtttagatggtattcagatcctcagcgagcaatggttgaattaaaagttgatggatatgatgatcaaatgcttgatctcgttcgaagcatattaacaatgttttcttatactaaagttagtgcgttaggattaaattatttctttttcttcaatatgaatgcacttggtgattggcatgagttaggtcattctttaactcccaaggatatatggaagtcttcgtttgggcatgaagaaaaacattatggtatgaaagaaactgcaattcaggttgaagatttttacggtgaaggctcagtgtttaacgttactgttaaagcagctaaccatgttaatgacccaaaacatcgccatcgttttgcaattgaatttaataatcattttgatatacctgatcaaaatcattggaatgaccatgttgagaatatactttctaggtattttgaaataaaaaatcataatattattggctacaaaacacttttgtcatctattcttggaggtgttcagtga

SEQ ID NO: 145829 - DNA, 648 bp, Enterobacter cloacae
gtgagcgcattgccagtagaggatttttataatattgaaagtgttgacataactagcgtgcctagtggattggttatgggggctggtttaagtaatggtaatgggtatatctctaatgcctcattcatggtcaatgtaacgttaaaaaacactaatcatacatatttcccatcattgatgggggattctttttttaatggtaaaaatgagcctatttcagactcgatagaatcagatgatatgctttttgaacgatttaaaaggatttcagctgaatactcagagcaaaaaagtaaaaatttaaaagccaaaattaatttcgttgcaattcgggattgttatggggttgtcgaaaatgtgcagtcaagtgggtctgtacgatttttcgaagcccgtatttatcaaaacagttctaatgagtttatcgaagttatacgtgcgccagtggcggcttttaaaaaaagcgatgctgatcttctggatgtaggtagtgtattttattggaaggccggatatcgctatacagataaaggcactagagtaaaagttaatgatttcaatcttcggcgtattatccgagaaaaatcagccattcgagaaaaacgtgtcaataaagtggttgatgacttattaagtatctttagataa

SEQ ID NO: 145830 - DNA, 1074 bp, Enterobacter cloacae
ttgaaacttgtactttttggccgcggtgtgggtgaaggcatattatgtaattatgattctggcgattggattatcgtcgattcgtgctatggcagaaacaaagatgaaaaaatacctgctgcattagagtatctagaggaaaatggcatttcttgtgagaatgtaaagctcattgttatatctcattttcatgatgatcatatcaaaggaatgttggatgtagtaaagaaatgttcaaaggcacgaatatttatccctgatgccttatcttcaaaagaattcttaacttatattgcgactattgctgatgtaaatgcaacaacagcacctcaacaaggtgtaagtgaaatctacaatgtttttcaggaagtgcttgagtctggccgtcatgttgaaaagacaaaggcggatttttccttacatttcaatcatgatactaccgcgcgtataagtgctctgtctccctcgagtatggagtgcgaggagacactggcatattttatttcacaagttgaaacattgaaaaatagtccttctcttgagttgccagcgaatgtgaaaaatcaaaatataaatcataactgtatcacgctttgtatctctcaaaataataaaaatgatattgttttaggtgcagatctagaggtgtgctctaatcctcttaaaggttggacagcgttaactaattcgcaaatggcacctaaacaatccgcctctgtttttaaagtcgctcaccatggttcatctaatggttattgtgcaacgtcttgggggaaattatccattgctaataaaaaaccaatagggattttgactccttatagtcgtcagaatttaccaagagcagaccagattaaaatacttcaggatgctacatcagagctgtacagcacttctccagttaaagaatatccaatggataaagctgaccagaaagttttagatgaaaaaggggttaaatctttggctagggtcaatttaaattttggttatgtggaactaaatcaaactctaaatgatggtgcggcgtggtatgatgttaaaactgtaggcgcagcaattaaattgacgtaa

SEQ ID NO: 145831 - DNA, 456 bp, Enterobacter cloacae
atgagtgaatttaagccctttgacgacaggctcgatggtctgattgctgccctgtcaccggcagcgcgccggaagctggccggtgagatagcaaaagagctgcgcaaggcgcaacagcaacgcatcaaactgcaaaaagccccggatggctcgccgtatcaggcgcgaaagcgtcagcctctcagggctaagagcggacggattaaacgggcgatgttccagaagctccgcaccagcccctacatgagagccactggcagtgaaaatagtgctgttgtggagtttaccggtaaagtgcagcgcatcgcgcgtgtccaccagtatggtcttgaggatcggccaaactcctacgccagtaacgtgcaatatgcaaaacgccagctactcggtttgagtcggtacgataaagattttattgaagatattatctatgattatttagattgcaatatgtaa

SEQ ID NO: 145832 - DNA, 1797 bp, Enterobacter cloacae
atgaagataataaatgacttattttcgacagtaacggttgacctaaaaagaaaagctttttatttggatttattatttctgtttgtttgtgtatggacgctaatagcctcaggttcggaggctcaatattatctctttaagtttattaatagtgatagttcaacactctacggtagtgtatttgaagatgcgattgcgcgcataccaacctttaatgagtatgttaaaggtgcttattcattttccggtagttatggttttttagctgctctgattatagttgttgtggctttattttatcagactactgttcaaatatttatagttagtattattagttcggcgtttgggctaacagtaacggatttcttgatgtttgcttttaatggaactctaacggcacaagcaatgatagagtgtgttatggcaaacgctttggggtcacctataattgcaagctttattgttttgcttttttacataaaaaagtttctatttaatgtgtcaagcattaatctggctctcagatatatatcaaattatgttgtttactcaataatttgttttttgattttgtttgttacttactatatcgtgtgtttcttttatagacctacagcagtaaatttttcagtctctacgtctgaagagttttctggtgattacttcctaagtgataagaatgatgtcttaaaagaagctaagggttctttgttaaaagatcgattttcgctattaaactcaccagtaaagttaaatggaacaataaatgtttttggcgagatcgattctatactctcaaaatttaatgcgagcgatgtctatactgtaagagtcttgcctttattaaactgtattgatggggggggagttaatgcagcgcttgctgactatttaagttatgaaggcgtaagggagttttctattaaatcttcagaatcaatgactttgattacctttggtgataaggcggggtatgttaaaagtaatgatgagctcgttaatatgtttactgtcaaaaaaaataataaatcgggatttgatattactaaagttaatgatggagtgtttagttattatccttctgaatcgagtgggagcatgtatgtcgctactggagtgactgattttaaaggtgaccagagtaagaaggaagtgaagtacacgttggatgtaaatggtgtaaaaaaaatattccatgtggatgtgagtaggctgcgcgcgaaaaatgcagaaagaaaattacagtgtcaaattgcttcattcacaagttcatccaacgatgtatacattgatgcaggagaggctgtatatattggcgtacttatcaaacctattcttaatcaaaagaatgaatatttttcactttttagcgaacgtgataataaattcgacgtcaaagggaagttgctatatgtacaggcaaagaatgtttcgcgagaaaacgtagtagggcattatgttacaaagggatatttgaatggctttattcttcattcctttgataagttatcaatagatgggaagaatgttgaatcaaataaaatggataatctaatggtgatgggagaggggatttatgggcatgtgtctgcggacaataatttagttattagtggtaaggccgatctcttctataaaaatagattgcggcaaaacaaaaccttatgggaaacttcgagtgataataccttaatcttgggtggtattggagctttaatggtttccttgttgttgtggtgtgtaaatagaatatattcctctttgaagaaaaatgaagttattaatagtttttaa

SEQ ID NO: 145833 - DNA, 408 bp, Enterobacter cloacae
atggcctgggcgattaaccactaccgcgacaacgccatcacctacaaagaccagcgcgataagactactgagaaactcagcctggcgaacgccaccatcaaagatatgcagacccggcagcgtgatgtcgctgcactggatgctaaatacacgaaggaattagctgatgagaaaaagaagctttatgatcttcagcgttgcattagcaatggtaagtgcgggctgcacgtcaatgccagatgtcccgcgccaggagaggccagcaccaccggcctggatgatgcagtcagcccccgacttactgacacctctgaacgggattatttcaccctcagagagcgaatagagaccagcgtgaaaatgattgctgggctgcaggactacatcaggcagcagtgcttgcagtaa

SEQ ID NO: 145834 - DNA, 282 bp, Enterobacter cloacae
atgcaaaaattttctgagcaagtagagttaattggttcatggattagttcgaaggataaatggacaaaggttcacaacacgaatggagagtccactcctggaagctgtggggtaaatgtcattataggctatctccctacgtgtaatgacaatgagaatgaaatcactgtaatttacaagtgtcagttgcctatttccgaagatcaaaatgtcgagaactatcagctcagctcgctggcattttctgattgggtcaccttcatgaaaaaaatccacggttaa

SEQ ID NO: 145835 - DNA, 204 bp, Enterobacter cloacae
atggaagagaaagagcagtggtttttttcatggaatgcttacgatgcaaccacatgggagcacttaccagcgtattcatatggtgaagtctacagttgcgatggtggacaatcctcaggtgaaatattcgagtccttaatggctgaaaaacagaggctgcgagaaaacctctggatacagtgcgtagcattcaacaaagtttaa

SEQ ID NO: 145836 - DNA, 363 bp, Enterobacter cloacae
atgttttcctttctcaatacatttaagcggctcataagtaagcagcaggaagctcccaccattcagccggagtattcagatgaacagcttttgcaatgggccactggatgcatgctagagggtttacccgacacgttttacgaagcgaggattacctgttttcggagcattgactatgacgggcgtacagcaattgcagctatacatgacttcaagttaactagtgaaagcgaatatatctctttcactccaccagatggcctttacgccacacactgcatagagaaaattcttgctggaaaaaactggaaccaagccaccataactttcacaccacaaacgacacgattcatgtgggaataa

SEQ ID NO: 145837 - DNA, 411 bp, Enterobacter cloacae
atgattcccgatattgcggcggcgctggccacaaggctcggcgagtgggctgatgctgaagggatcccagttgcctgggaaaacgtgcctttcacaccgccatctgatgcgttctatcttgctgtccatgacatgcccgccacgccgcgtacggtagaccttggattgcgctgccgcatttattcaggtgtataccagattaacgttgtggcccctgtcggcataggccgtactgatgttgtggctctggctgaccgcgtggctgaattgttccccgaggggcaggagattgaaggcaggggttttacatgctggatagaccaaacgcctggtgttttccgcgggatcactacatctgtcgcttataccgttcccgttagtctcaattatcgagctgatatctccagctaa

SEQ ID NO: 145838 - DNA, 261 bp, Enterobacter cloacae
atgaacagactgacgacactatatattaaagcgcgggccgggctgtctccctatgaaaagacacctgaagcatcattgattaaaatggctaagaaatgtggccgcaatgaaatagccgccattaacatcaggctcaaacagttccgctctgaactagcgatggttgaagagtgggatggagatcagcaggatatgatatgggatgcaattgacgagcattgtaagttattacaactgatcaccgacaaacagcccacctga

SEQ ID NO: 145839 - DNA, 303 bp, Enterobacter cloacae
atggatgaagggcgatgggattttcatattggtttaccgtatgtgcttgtttttttgattggtcctataacattggttcagtctttcggctacctgcgcaagggaatctataccaaaacattcaagggaacgagtcgaaaggagtacattcacaaggatgccaggccctttgaatactggttcagcattatctttgagtttggagcgagcttcttgctaattggcgtaggattctggctcttaagggatatccccgctgtcaacgaatggtatgctgaaatccgcgcgatgttaccttattga

SEQ ID NO: 145840 - DNA, 723 bp, Enterobacter cloacae
atgcgtcagaaaacaattcaggacatcctggcgcatgctgcgaaagactatccccacgaatgctgcggcgtgatagcgcagaaaagccgggtggaacgctatttcccatgccgtaatctggctgccgaaccaacggaacagtttcaccttgcgccagaggattacgctgctgctgaagactgggggacgataacgggaatcgtacatagtcaccctgatgcgacgacccaaccaagtgaactggacaaggctcaatgcgatgcaacgttgctgccctggcatatcgtcagttggccggaaggcgactttcgtaccattactccccgcggagaattgccgctgctcgggcgcccgtttgtgctcggacactacgactgttgggggctggtgatgagctatttccggcaggagcatgatgtcgaacttcaggattaccgtgttgattatccgtggtgggagggctcctatccggataatttctatcaggattgctggtatgaatgtgggttccgagaattcagtggatcaccaatgccgggcgatttgatcatcatgcaggtggaatcgaataagtggaaccattcagggatcttgctggaggggaacatgcttctccatcatctttatggtcacctcagtcaacgtgtgccatatggaggttactggatggagagaaccatgaaaattgtcaggcataaaagcctaatcatgcaggagggataa

SEQ ID NO: 145841 - DNA, 1356 bp, Enterobacter cloacae
atgtctgcaggaactattaccctgacaaacgggtccgctattgttggcggttccggaacctcattcgcaaccgaactcgccgcaggtgactttattgtctccactgtgggcggtgttgattatacgctgccagtaaaaacggttgacggtaatacccaggtgacgctggttagtaactttaccgggcctactcaggccggcgcggcctggtcagctgttccccgcgtggcgctgaacatggtaactgctgcgctggtggcacaaagtgcagaagcgctgcgtggactgaattacgacaaacagaactggcaaagtattttttctggaaacggcaatgtaacagtaactttgccggatgggacgaaatggacgggaccagcatggaatagcattatcactactctctcaggcaaggcggcaaaaggtgcaaacgatgacattacctcgctaagcggactcactacagcgctgtctctggagcagggtggtactggttcgacaaccgaaactggcgctcgcaaaaacctcggtctgggaacttctgcaacgaaaaacacaggaaaaacgagcaatgatgtcatgcagcccggcatgtttggtcttgggttagctaatggtgcaattacaacgaactcgactaatttcagttctctggtcaacgacaactttacaacgcagggaacgggattgtgtgcattcagaaatgatgctcaagttacgagcggtgatacgcctttttatcagtattccccatcgttgtttttcaggaccagagatacatttgctgtgctcaacttccattttaatggtggcccgataagggtttttgcaggtggaatcagcgagacgaacttaattacatcgacaaatggcagaacattgtgggacacaaaaaatactgctgtagacagtaatggctttataaagcaggcatccccggtcgtcaaaatcttcactgatggtaagtatgaaactaacgacgaatcagaaggcgtcacggtcactcgtctggatgtcgggcaatatcttattgaaggctgtaaagcactcaattcagacgctgcatggggaggtatcgacggagggtttgagattcccacagacaggaataagcaaccgcttatatggctggactacgaggttaacgcagacggctctgtgctggtaaaaacctatcaccgcgaacatccttctgcgccagcatttgccaggaatgagcgtgatggattggcaaatggcgagccggttgacatcccggctgaccagttcgtcagcgttcgtgtagaaatgccagctgacagcatctggaatcagaaacaaacggaagaggctttaaagcatgaacagggctcataa

SEQ ID NO: 145842 - DNA, 168 bp, Enterobacter cloacae
atgaaggcgtgcccggtacacgaaccgcctacggccccgatttttatgttgcctatctgcgcgatcctgacgggcataaactggcatgcgtttaccggaattattctcctgatgcagataagctatcaggcgaagaagagtcacttcactaataaaattttgcggtaa

SEQ ID NO: 145843 - DNA, 210 bp, Enterobacter cloacae
atgactgacgaagatttcagacgtaactatccaccagagcagtacgattacgtccataaaagcagtagaattaaaggctcaatgggtgaaactgaaatcgatgtttatgacattgtttcaaaggaaaccggaaaaatagttcttacagcaacatatacagagcacactagccatcgtcctgttaaaaccacatcatcatgggactggtaa

SEQ ID NO: 145844 - DNA, 795 bp, Enterobacter cloacae
atgagtggaaccattaacaattcagcaataaaaagactgtacggtctttctgctgggagatgtaatatttgtaaagttcttctactcgaagagtctgtacatatcggtgaaatggcacatattatagctaagagttcaaatggtacacgtggggatatttccaatgctaatgataattcctatgaaaacctcatattattatgtgctaatgatcatacacgcgtagaccaagatccttttaatttcaccgttgagaggttgcatcaaattaaaaatgagcatgagtcttatatagttaatgtgacggattttaataaattaactgagaaacgacgcagttcagatgttatatttcttaatagttattttcgttttactcctttcgaacgctcacgttctttagttgatacattgccaaatagctttcacattcacttactttcttttggtgatatgtttgattgtattttacttgacttacctgcgagctatcctctaaatgattcttacctacaggaaaagtttaataatttcattttagcgtatcacggtatatatgattgcttacgggaacaaatccccacatttaatgatttgagaattgaagtttttcttggggctaatgataatggttactgtcattttaattattatggcctgccatatgatgttgcaaatgagaaagagaacattctcatacaaagaaaatttatctttttacaagctttcaacgatcttttgaaatatattagaacatactatcaagaggttgaaattagttctaattatttctaa

SEQ ID NO: 145845 - DNA, 561 bp, Enterobacter cloacae
atgactgaaaaggccgattctattactgtacgttctatactcaaaaagtttcttgaagatgaaaatatcagatcaaggctacgattgatcaaatcaagaaatagaaatgattgggagaaatggttacaagtagaattagagtacttcatatcccaatcacctaatgtacatgttgaaagagaagttaaagcaaaaccggataacaggatgttacctaataggaactcaatgtcagttgacttgatatttagcaaaagtaaaaaaacagaaaaactttatatttttcttgaattaaaatgtacgagagaggttcaagcattaattaatggatttaatttagatatatccaaaataaattcaattaaatcatgcatgtatgatttgcgttcatattggtgtgtaggatttcatttgaattgttcgaatcttagtattaataaaataaaagttcatgtagcaaaatatccatacggttatcatgaggtcgtaaaattatgtaattgcaaagatgatagtcaatgcaattgtaataacaatgaaattggactggcaattatatga

SEQ ID NO: 145846 - DNA, 720 bp, Enterobacter cloacae
atgagcctttctgatggcgttcgtgttttacttctcacaactacgtgctatttattgacatttagttatgaaagtggttacttccgatactttgagcttcccaacgaattaatcaatgtttatcttaaaacacttatcacttttggatttatctttctatcattcaccttcgttattttcattcctttggcaaatctcatttccaagataatgtatgaacgcaagaaagttaatcaaaatacaccaatcaatagtactgtattaacttatacattcatgttcatagttttctttttatatattattgtctttcatcatgtgatgtcacttctgagtaccatacttcaatttcttttcttattaacattagttgctaatgacattctaattccactgctatttaaccgtgatctattactttcacaaagtattgatgaaaatgcaaaagaacagtctcagtcaaacgttcttaatttatttgctagggcaaccaaaaccaacttcaatatttatttggttttatttatgatagcaatatctatttcgcatttattaggtggacttgtagcaacaacatctaaacttgatttaacttgtaatgcctttgtcatttatgaaacgcaggattcatctgtcgttgtgagactaggggataataagtttaaattaatatctactgatgaatgtctatttgagaaaaacaatcataataaagtctaa

SEQ ID NO: 145847 - DNA, 270 bp, Enterobacter cloacae
atgttagttggcttactcaccgtgccaattgctaaaatgtatagtattgaaagtagtagtatcaaaagaatattaagtatcatttactggtttgtgttttcatgggctttatatgttattggctttatcgtcacttactttgtttttggtgatgatgaagcgacattaatagatctcaaaccagcaattgctgttgcttcattagttgtagccagtattcatactgaactgttcctagaaatattgaacaaagaagaagtatcaaattaa

SEQ ID NO: 145848 - DNA, 441 bp, Enterobacter cloacae
atggacggactgggcaagggtcggaggatcaagtgcctgacctgtgtggatgatttcactaaggagtgtctgacgatcaccgctgctttcggtatttcaggcgttcagatcacgcgtattctgtacagcatcgcgctgtttaggggctatccggcgacaataagaaccgatcagggcccggaatttacctgccgcgcgctcgatcaatgggcctttgagcatggtgtggaactacggcttatccagccaggtaagccaacgcagtacggaattattgagagttttaacggacgctttcgcgatgagtgtcttaatgaacactggttcagcgatattcttcatgcccggaaaacggttaatgactggcggcaggattataacgagtgccgtccccattcatcgctggattaccagacatcagctgaattcgcaacagactga

SEQ ID NO: 145849 - DNA, 537 bp, Enterobacter cloacae
atgaagaagcgtttttccgacgaacagatcatcagtatccttcgcaaagcggaagccggggtttctgcccgtgagctctgccgtaagcacgccatttccgatgccactttctacacctggcgcaagaagtttggtggcatggaagttcctgaggtgaagcggcttaaatcccttgaagaggagaacgcccgcctcaagaagctgcttgccgaagccatgctggataaggaggcgcttcaggtggctctagggcgaaagtactgccgacataccacaagcgggaagccgttaagtttatgtgtgatacgaccggtctgtcgcaacgtcgtgcctgcaggcttactggtttgtctctgtcgacctgccgccacgaggctcagcgtccggcggctgatgcgcatttataagggcgcatcgctgaactggcactggagcgcaggcgttttggctacctccgcatctggcagttgctgcgtcgggagggccttcatgtcaatcacaagcgggtataccgtttttaccaccttaatggactga

SEQ ID NO: 145850 - DNA, 171 bp, Enterobacter cloacae
atgacagatgtaattaacggaaagaataggaaacggcgcgtcactctcaaagtggttttacccatctttactcagcaggttagcgcgggacttggttgtttcttctgcataaatacgtttcaccagtatgaacagcggtttgacgcgattaatcagatcaacctcttatag

SEQ ID NO: 145851 - DNA, 558 bp, Enterobacter cloacae
atgcttattgggtatgtcagggtgtcaacaaatgaccagaacaccgcattacagcgaaccgcgctggaatgcgcaggatgtgaactgatatttgaagacaagatcagcggaaaaacctcggagcgtccggggctaaagcgagtgcttaagaccctcggaaaggggggatacgcttgtggtatggaaactagatcgccttgggtgcagcatgcggcatcttgtcctgctggtagaggtgttgcgggacagagatatcaattttcgcagcctgaccgacagtatagatacgtcaacgccaatgggacgtttctctttcacgttatgggggcgttggcggagatggagcgtgagttaattgtggaacgcacaagagccgctcttgcggctgccaaggctcaaggtaggatgggaggaagacgcccaaaatttacatcggaacagtgggagcagatggggagactaattgcagctggagagtcacgccagcgagttgcgcttatttttgatgctggtatatccaccttttatcgtaggttcccggcttcatcatttgaatga

SEQ ID NO: 145852 - DNA, 735 bp, Enterobacter cloacae
atgcggcccttaatgccaccggtgcagacgccggataatcttttccatgatggtaatccgctcactggtgagttggggaccatagttgatgctgaacaccttaataatgaacaagccgctatccgcgatacacaaagtgagctgattgccattctaacagcagcggcaatggaaccagaatcgacagcaggccagctgttagctgcgttgaataaactttatgccccacttaacgatactttgggagcgctttccagtctcgtcggaggggctaataaactcccatattttaccgccgctaatgctgccgctttaacagcattatccagcattggtcgggacatcatcggtaaagaaaaggttgctgacgttctcacataccttggtcttaaatctgccgcccagcgtgatgttggaacaggagccaaccaaatcccagacatggcctcgttcgctgctggtcctggttggatgaaattcccatccggtagaattattcaatatggatatcagacatccagtagcagcggttcacttattattaactttcctatccctttcccgacacaatgtttcggagtaacaggagctggtacagatgccagtgcagcaaatattgcaggttgtcaggtaattgataagtcggggttttatctttcagcgtggctcgtggctgccggctctgtatttaacagaacgatgacaaatatttcgtggatagcagtgggaatttaa

SEQ ID NO: 145853 - DNA, 606 bp, Enterobacter cloacae
gtgcaagtaatttgcacaccatgtgctcccaacttcacaagttttatatccaactgtgcctctatactccaatctttgaaagtaaatctcagagactcaattaaaatatatgaaagattaattgatattatcattaccagttcgaagaagttcgatccaaacttaatgttgattttgttgtcattgaattttaaaagtagcgagatgtattcaaaaataaagcaaggcgctaacatagatccttcttataaactatatttaattgaactttcctttaacttatctttcaacattacaagtgttagaaccttaaaatcacgagaaggttcatatgtttctaatagcaataaaaattaccaaaaattaagttgcgatgcgatttcatatatcaacaaatcaagggaggtgctctctgaggcaaacagtagaatgagtggcaaccgtcaaattaacatcactgaaggttggttaaatggtgatataacagcagaacatagcctaattaactttttaaagatgagctacgcccatgcaaaactaagtgattcagaattaaaattcaggcattatttcgatttaatagaattgagcacgacatttgaataa

SEQ ID NO: 145854 - DNA, 1911 bp, Enterobacter cloacae
atgtctcagcgatataaactctatcgtcgaaccagcggcatttatgttgtccgcattagcgttccccaacgttttcgtcgatacgcaggacagtgtgagattcacacttcaacaggcactcacgatcttcatgaagcaaagcagaagtctgcgctcctgttggcggtctggtatcagaccttacaagagtatgaacaattggattatcgaactttaagtgactgcgccccgctgcttgctggtgagggtatgatctcgctttctaactttgctcagtcagttgagttgcctgttgcgcaattaatacaggcggtgatgaaccgtaatctgcccgtattctggctggcgacggggcaggctggcttttatgttgcagcgctctctgaggctgagctagacccgcttgatggcagttacgttcttaattatggcgaagagaagggtatcgagggggttgctaaaggctatctgcaactcactgcgcaaccagcacatttacgtaacattattagcgacggttattcagaagcttcggtgttcaaaactgccggaagcgacgctaaaggcggttggtttttcacctccggttggccggtaattaaacccgatacgcttttgatcaataaagtccatgcagaaagcctaaggcttgattggctggctaagaccacgcctccagtcgctagcgttcatcctaccgtgcctcttgccgctcctgcccctactatcgataacgagtatgttaatcgaaagtattacactaagaacctgtcgtggttatgctctgaatatctaaagcatcggcgcaagggcaaggtatcggagtcggctataagtgatatccgtaactatttcagctttatgatcgaagcgatgggtgacattcagttggaagattttgatcgcgatttcctccgggcttatgagagcaaactgcgcacgatcccagcaaaccgtaatttagtcaaagctaaatatggagtgaaaacgctggatcagttaatcgccaaagcggcagaatgcggcgataaattgatgactgaggaatccgttaggaagtatatcaacggcatttatggtgcaatgaagtgggctgttgctgacggtaagctactgaaatcgccatgcgaaaacttttttccatccgatgataaagatgagcgagatcaggatcacactgacatatttgaaccgcatgaaattaaagcgattttttcgttaccgtggtttgaggctggaactgttgaacgcaatgcgcaagggcgattccatcaatattgcccgtttaactattgggcacctttgctgggcttgatgacgggggcgcgagttaatgaaatcgctcagttactgctgagtgatgttctggcagacgacggcgtctattatttgaaccttgaaagcgataatgaaagcggaaagaaactcaaaaacgctaatgctcgccgcaagattccgctccattcaaagctgattagtctcggtttcatcgactacgtgaacgccttaaaagatgcagggtatacccgtctcttcccggagcttaaaccacataaaacaaaaggctatggtaggccagtttccgcatggttcaatgaatcgttgcttgcggggcggttgaaactcgagaggaacagaagcaaatctttccattcttttcgccactcagtttcgactttgctcaaggagaagggcgttagctcagaattacgagcgcagctacttgggcatgtgcgcggcgaaactgaaacggaagtgcgatatagcaaagacctcaaaccaattcatatgattgaagtcgtggagaaaattgatttttcgttacctgatatagcggaattcaacattcctgacgggctggatgctgtcagagatgcgttgcgaagaaagcgtggcaaacaaacaggttga

SEQ ID NO: 145855 - DNA, 333 bp, Enterobacter cloacae
ttgaaaaccgtcgagatactgcaatacaccttacgcaaaggcagcggtgccgcttttcacgccattatgcaggaaatcagtgttcccctacaccaacgccacgggatcgatgttgtttcgtttggtaactctctgcatgacccggactgctattacctgattcgcgcctttgtcagccctaaaagcatgactacggttctcgacgctttttacgcaagcgatgactggcgcagcggcccgcgcgaagacatcattggcaacatagaggccagcattaaaacagtgatgaatctaccatcagaaagcgtagaagggctgcgggtgcaatcgtag

SEQ ID NO: 145856 - DNA, 516 bp, Enterobacter cloacae
atgagcagtagactttgggttgttggtattggtcttgccttcttacttggttattataagtatattgaatatggaagagatgaaacggctaaatctgtggctcaatatgaaaagaacatgaatgatccgaattcccctccagttttgtctgagcgcatgcgtgattcttcatggaatattgcatattggatagatgtcgataggaaaagtagtgactgtgttatggctgatgaaattatggattctggcggtaatgttaaaatatcctataagagaggagttgagactagccgtcactacctatcagagtatatttcatcatgtagtaaccgtataaatagaactattgaacaagttgaacgtcctgcaaggaaatggtgtgcatttaaagataatgatccgcgattagctcaactgtgttcagagtggattaataacaaaaatatgtatcttaataagataaaacaacttgatgctccaacgcttaatagatatgagcattatccaaataaatag

SEQ ID NO: 145857 - DNA, 1812 bp, Enterobacter cloacae
atgactaatgctttttcttcgaaaaccgtaaatatttacggcaatgataaaatcaggacaccccaaatagaagcttttcaagcgcttgaatcccattaccaagaccctaataaaacgcagaaagaggtaggggtaattctcccggtaggatgtggtaaatcggggtgtataacaatcaccccttttgcatttaaatccaaacgcacgctagtaatcgcacctggtttaaatatatcttcacaactacttaaagattttgatccaagtaatcaatcaatgttttatcggaaatgtaaggttatatctgataataactttcccgaaccagttgaaattagaggcgatgatgcaaatttttctgatttagaagaatcagaagttgttataacaaatatacagcaactacaaggtggaagtgaaaatagatggttaaaagatctaccaaatgatttcttcgacttaattttgttcgatgaagggcatcatagcatagcaagcagttttatgtcgttaaaacaacattttcctaaagcatatatagttaattacagtgccacacctttacgttctgatggccaattaatggcaggcgaaattgtatatacatatcccatattcaaagcaataaaaaatggatatgttaaaaggctcaaagctgttcaattaaatccaaagacattaaaatttgtaagagatgatagtggcctagaagtagaaataaccttagaagaagtaaaacgattaggagaggaagaccctaaatttagaaggggtatagtaacatcaaaagaaacattaacgactataattgatgcttctatccatgagcttacacgtctaagagaagaaaccagtgagagcaggataaagataatcgcatcggcattaaattatgatcattgccgtcaagttgttgaagcttatagagcaagaggtttaagagctgattacgttcactccagagaagatagtgcatttaaccaaagagtaatgaataaactcaatcaacacgaactagatgtaatcgttcaagtcaggaagcttggagaaggatttgatcatccatatctttctgttgcagctatattcagtatatttaataacctatcacccttcgttcagtttgtaggacggataatgagagttattgaacaaaataatcctcaaagtatgctaaaccaaggagttgtagtcttccatgccggagctaacattgctaaacaatggggcgactttcagcaatttagtgaagcagacaaagaattttttgaccaattattacctcttgaagattttacacctgatgcaggtggagatacaaaaacaatagagcctatacttcgagacgaaacagataaaatcgaagtaaaatcacaaactgaagtgacacttgaagaaattagtctatatgaagataaggaagctcttgaagccttaaagactttacaaagaaaaggatattctgaagatgaagtaagtaaagcatttaaatctctagagccaatttatgtaacaaaacaaagagagagacaagctaaacggagcagtttagatactcttgcaatgaatgaagccagaaaattattggccaaatacaatatcaatcctgctgcaaaaggattagatcctacattccagaaatcaaacttaatttttataaaaagtcagatagataaaaaaataaacacctttgtaagcatgcctgccggaagtcgctccgattttagccgacagcaactggaattaattgactcacatattgagaaaatcattgcagaggttagcgaggatattaaaaatgggaagaattaa

SEQ ID NO: 145858 - DNA, 1656 bp, Enterobacter cloacae
atgaccgttgagaagctgattaccgaccatatcgatatctggtcctctgcgctgcaaacccgttcttcggccgggcgtggtagcaatggcaaaatcgacctctatggcattaagaaactgcgcgagctgattctggaactggcggtgcgtggcaaattggtgccacaggacccgaatgatgaaccggcgtctgagttgttaaagcgtattgccgcagagaaagcggagctggtaaagcaggggaaaattaaaaagcaaaagtctttgcctgagatcagcgaggatgagaagccgtttgagttgccggaggggtgggaatggacacggttaagtgatatcagtgcgtacatacaacgaggaaaaggtcccaagtatgctgaacatggttctgtaaaagttgtatctcagaaatgtgtgcaatggagtggttttaaattagaacaatctcgttggataacggatgaatctattcattcatacactgaagagcgatttttaaaagatggggatgtcctttggaactcaactggtgctggtggtacggctggtagggttatttatcttccagtagttaaagaaaaacttgttgtcgatagtcatattacgttaattcgaacagttagagataacggacagtttattagtaactatatatccacttatgggatacagcagcgcttcgatccaaaacactcgaatacattattatctggcacaacaaatcaagcggaattaaatacttcagttgttacttctttcttagttccattccctccgcaaaaggaacaggaaaggataaacgacaaagcagcagagcttatgtccctctgcgaccaactggaacaacaatatctgaccaatctggaagcccatcagcaactggttgaaacgcttttggcaacgttgaccgacaaccaaaatgccaaagagctcgccggaaactgggcacgaatcagtcagcatttcgacacgctgtttaccactgaagcgagtatcgatgcacttcagcaaacgattctgcaactggctgtaatggggttattgatcgaaagtgctgagtttagccaattagatcatttgaaaaaacatctgtcgtttgggcctaagaatggtctatctcctagtgaagtaaaatatgagacggatattaaagttttaaagttaggagcaacatcctatggttatttgaaagttcaggaaactaaatatgttgatattgatgtaagtgataaattgcatttgttcctgaagaaaaatgacattctaattcaacgcggaaactcatctaattttgtaggttgtagtttgttgattgaagaagattttgataatttaatttatcctgatttaatgatgaaaattaaaacaaaagatgagctactacctgaatatgcgaggttgtggttatcctctccatttgccagaaattacatgtggtcaaaaatgacaggaacgtcaggaacaatgcctaaaataagcaagaaagtagttgaagacttacctatagctgttcctcctttggcagttcagcatcaactggtgattaaaattaaagagctatttttgctttgtggatctcttaaatcccgcatccaatccgcccaacaaaaccaactccacctggcggatgcgctcaccaatgcagcattaaactaa

SEQ ID NO: 145859 - DNA, 861 bp, Enterobacter cloacae
atggataaagctttctgtactattgatgaaaaagaatggagtgcagatgcatttttcgcattacctcctgctgagatccaactgaagagacggagtttgctttgtacagaatgcaagggggatgcatggttcaggcgtgcaagttacggaaatgactcacctcatttttgcgcccatcacctagaaaactgctcactagggacctcatacgaagctgtaggggaaggtgatgaaaataggggattacctgcttcagatgctgacagcggcatagtacttgatttgagattaatgcaaggctacgacattaatgtcaaaacagcagcggataactctgacactacacctcagggacaaaaattcacgggtgaaaaaatggttggtggtgggaatcataaatatcctgcacaccacactttaaaaaacctgctttacaagttagtacagtctaaaggatcatgctacgcagataaaaaggtagggttcacagaacaatcctttaatgatttaccggaccgtgggggagaactatttgtcgaattcattaacgttgcaccatggatggacggtgcacgtagaattttttggggttttattagtgatgttgggcaaacaagagatggaaaaatttggttaaatgcaggtaacattaagtctggcttaagcgtttgtatcaatcgcgaaattgcaagtgaatttaaagagcagtttaaagtcaaaaacagtcttgatgaattagatggatgtcatgcactaattattggtacatgcacatatgcaacaacaggcaaaccaatactatggtgtggtgatctgagttatatcgtactgagaagatataaattagaccaggatttataa

SEQ ID NO: 145860 - DNA, 2034 bp, Enterobacter cloacae
atgcgacccatccatccccttatcaaagcggcaagagataagaaattgccacatcccgctcagttgaatgaattcaaaccagagcactggattaaattcatgaatgaaataggtccgttaactgcagaagcctctgcatacatttcaggagctaattggcttaattttcatttccaatgcgtagagaacactcggaagcaaatttgcttcttaacaggttgcagacctgaatatcacgaaatgattagggcgcatatagccagcgctaattatgctttttggcaagtatgtgacgaacaggacgagaagtttgacgacataagcaatacagctatagaacagtttattacttcaaaaacctcgaaggtaggaaaaagcgatccagtaagtgttaatagtgtaaatatgcatagacttgacagtcttagaggcccattattcgagctatttaaatataaggatcgcatgcatatattatttcctgatgatcgtccaataaagttgtcaaaacttgatctttatctctcagaaatgaagatgtctcagcattttcataatttttcttcactttggcaagacttgctttatggccgtgcaatattcacttatcagcacaaaagagtctttttcatgcaatgtcattctgattatcaccgcatgaaaacgattgccgaatttcgtcgagatcattttttagccacctcgattactgaagctcgaaccataatggacaaatttaataacatccatcttttttcaacttatttacattttgaacctggtaaagctttgagcatagtaccatggcaaacattatctcaacgggctcaaatgatagccagatttcagcctttatcggctcttattcagcttgatgaccatcttaaagcgttattaacaaggaaatcactcccctgtattgaacgcactttacaaagtgttttagatgtatgggttcatctatccgtgctagctgttcaaattgatgaaaaactacatacaaacgtgtcaataaacgactggtcaacattacttcatcttgctcctcagtttgagcgctctattattattgagttactaatacaatgttgtgaatatagtaaagctgaaatcatcgcggctttagatttattgacctggaaagggaaatcaccacaggaagacttatgggtgcaacctctggtttctattgaggataattatattttcccgatcagcgcatttctgactgcaagtctcacccgcaatattgattgctggatggccaaaatagatcccaaagatactcgccgtggaagtttatttgagaaagatttgctcagagtattggaagagtgccgaaatggaaatcaggtaatgaaagaacatttgcactatacgaatgcaattgaaccaagctatcatgggcatagcgaagagatagatctttctttttctttcggaaatttactaattgttgtagaagctcgtagccgtaaaacatccataactccgctagattatgataatgaacttttcgactctaacggactgatgcacaaaaccaaccaagcaattagaaaagctacctttgttagggagcatcttgagcatttttgtcgggattattatccccatttatcaggaacagagaaaatagaggtaatcccactagtaatcatcaacggtcaatttcatgctggctttccattaaatgatgtgccgattatagatccggcacttttgtttcattatcttagagatcgtgaggtgcgttttatggcaacagtaccttacgataaacatcagtacggcattccactctggcagaccctcgaagaggctcagactcggttcaaggattatctttcgtttccaactttgataaagatttacgattctatgtgcagagagtccgtaaaatgctccaacaatctcggtgagaagtttgatgaggtagtatcgcttacatacgaaattgattttatgggatggcaagagcaattggctcatgtcgaacgagtctttccaaatcaatttgtaaaatattactga

SEQ ID NO: 145861 - DNA, 648 bp, Enterobacter cloacae
atgacttcaggctgtcaggcgaaagagccgccgacacaggtagtctatcgttttgatgaccatcgttatctcgaactgaagggctgggactgcgaaggcgagctctggtacaccgatacgcagcgggggattcattcgcagccgtattcacaattttatcgcatttttaccaaaaaatttattcacccttcagagcgatatattgtcctcacatcatggggtggtggtgcctttaccgtatcaaaagatttcggaaagacctggcagttagcgcagttttctcccggagaaaacgagccgaatggtgattcctcaccagcttatgatgaggtgctatctctgacggtaataaacgatcaaggctttctgcatacaaagcaccggctttatatgtcctccagaccgtttgatgatccacgcctggcaactggtgggccaggaattgattatgtatttgaaggcgtaactcacagaattaaaccacaatcaccaggacctgcgtgggggctcgattacatcactaaggaggcactggagaacgatacggcaaaattccatactaattatcagaacttacccgataaggtccctgaagtgaaaggttacaccggctgggaccatatgcgctgtgacatggatgcgcgataa

SEQ ID NO: 145862 - DNA, 786 bp, Enterobacter cloacae
atgcttgggatttgtaaactttgcctttctgaacaacagttacttgaatcacacagtataccaaaaagcttttttgccaaagcaaaaggtgatggtggtcaagttatttctatacaaagagggcgtgaacctaggagggaaaatttagatcccaaagagccaatgctatgttttgagtgtgaacagtttcttagtaaggaatatgagtcttatggaatacgattactccgtaatccacgtaatattaggcggaattcagatcatattattatcagtaacttcgactataagcgattttatctttttttactctctatattatggagggcttcaaatgccattgacttgcattattcctctgtagttggcaaccctaactttgcagagatgatgaggcattgtatcaagaataaaatacttcgatttaataataaaagccaagttcggattgatcattttataaaaataagagtgctgagagtggttgatagcacgggaaatattcctgatcacgtcataaaatctgttctcactaatttttcatttgataaaattgaaagtattaatggtattggatggtattttattgctgaaggattcatattccattatgtcttttctcctggtgaaagttatcatgatgctcgagcgacgagattgaactctcagttgacttcaggaagccatcaaaaaattttaaaagttgaactcgccaaagataaagtattggcaggaatgttcaattatatgattgagtgttcaataaattatcataaaagaaaataa

SEQ ID NO: 145863 - DNA, 615 bp, Enterobacter cloacae
atgcctaacaattatgaagagagatctactttaattatgggacaacttttcgccttgcatcttactccagagcgcttgatgaaaattggatcatttgttgttcagtatggtttatttgaaactactcttgagagagctgtttggacattaactgaaactgatgtacaaggagtgagaccatttacagagaaactgaacgctgaaaatatgttcaagatctttggtgatggtaatgcaaggttaagtaatagatgcaatgcggtattgcaagaggcatcgttgacagccgttgatttgtccaattacagaaatagtcttatgcatggctatctgattccatatgaaaaaaatccttgtttcttaagaaatcctggatggaacggcgaagtacgaaataaaaaatctggggatgcatatgtgggagaacctcttctcgatctagccattatttcagcgtggactttatattatgttgccattaatgccactactgtatttcatgatcctgaaagtgagcaaaacatagaggcattggaggcgaatgttagagaatcaagaagttttgcaagtgagttacgacatctaagaagcttgatgaatgatgagaagtattaa

SEQ ID NO: 145864 - DNA, 831 bp, Enterobacter cloacae
atggaaagaaaaattccgcagcctttagtgtcagttgtagccgatcacatatcatccgtagaaacccacgctagtttagatagtctttttttctatgccgatgctccgggagatgctcccgaaggttcaaagcatgtaaaagctttagaatggttacgtagaattaataaagtatgcgaagaccctttatcggtactcggcaagttgatcgagggatacatggagagtgaggaatcttaccctacaccatcgccgttcagctttcttgcagataacaaaaacgagccaaccttcaaagaaaacgtaaataaaatgttggctaaatacggtttttcttacatgacaggcggctttattgcttctggtggatcgaagccatcgctatcattgcaagaggcaattgtaggtagaaacatgcccgcgattgaaatggaattcaatcgagccctggagcacattcaaaaagagccaaaagaatcagtttcggctgcatgtaacattcttgaatctgtatgcaaaatttatattacagacgaaggtttacaaatgcccgccaaacaagaccttcagagcgtctggaaggtagtgaaagatagtttaggtatgaatccacaagtcattgaggataatgatctgcgcagaatcctcacaggattgttctctatagtagatggtattggcgcttttcgtacacatgccagcacagcacacggcgcaggaagaaagtcctataaggttctgcctcgccatgcaaggcttgcaattaactcagctcatacgcttgttttgtatattcttgagtcatgggacgagaggaaaaagaaagaatag

SEQ ID NO: 145865 - DNA, 1527 bp, Enterobacter cloacae
atgaaaattagtgaagttaattttggtagcatcgacgctaaacacgaagttgatggcagaacacctgaagaaatacgctattttgaagatagttatgtcttgccaccaaatataaacctagatgattatttagatggaaagaaatattatatttctggtctgaaaggaacagggaaaactgccttgttaaggtttatacaaattaaagcagataaagcaaatttcaaaacgagttttattttgtttaaatcagaattcgattcttatgaaagagcatccctacataattcaataatttcctccacgcctgagcctgatgctacaataaatcaatacgattatgaacaagcgtggcgaatgtacatttataaaactattgtttcccttactctttctgataagatcgatgcttttcagaaaaacaaaatatggtcagaattcagagatttgatactagctatatctccagggaatatagcctcatctgtatcgctaccaaaagttactgccgggaaagttgtcttatcaaaagatcctaaatttgaatttgattttgaaatggtggacaagaaaaaagttgttaatttctcggagtactgcaaggtatgtgatgaaaaatacaaagagttaattactacagatactaggaatataatatttgtagatgaattggaaattagggtgttagatgatgcatctacaagtcgcgatatccatcttgttagagatcttataactacagtcgaccgacttaaccaaattagccgcaagcaatcttttaatatcaactttattcttgcagttagatctgaagtaatgcaatcagcaagaagtattgggaaagagatcaataaaccattattcgatttcggagatactttagcttggagtcgtttctctaaagataaaaaacatcatcctttagtcaaaataattgaatcgaggattatcgccacagaaaaaagaaagggcattaataaacatggtgatatctgggataagtatttcaaaggtaatttccatggaagagactttagggaatttgcattagatcagacatggtatagacctcgtgatcttgtaaggttaatggaagttgcacttaaatctttcaaagggttagattatttgttacagagtcattttgatgagtcaaaaaagttatattcatctgaaagctggattgaaatcggagaagagctctcagcttcaatgacggctgaggaaatagaaggtatatcaagggtattgggaaaatttagacatccctttactatccatgaatttaaaactcaagttacagaactagctagtatttatagtgaagttgataagcttgatcagaacaacaaaacaggtgagctgttgaaaaaactgtatacagtgggagtaattggtaattatattacaggtagaaaaggaaacaaaatccctcaatacgctgcaagagacaatccaattgttcatcttgaagaacagtttatcgttcatcctgctgtaaaaccattctttagtacaaatctataa

SEQ ID NO: 145866 - DNA, 162 bp, Enterobacter cloacae
atggactgcttcgtcaatgtcgaacaggctatcgcgaagagcggcggcagagctatttacggctgggctatctggcaagaactaggcgtttatattgaagctgagtttcactgtgtttgggagaatgatgctggagaaatgctggagaaatgctggatgtga

SEQ ID NO: 145867 - DNA, 363 bp, Enterobacter cloacae
gtgcttacccgctatcaggacgtgtatcaggtaatgaaggagcgtgcgttcgtctcttcaggtgtctctgaagacgtgcatgctgcgctggaaaaagagtcttttaactttccgcccctgctttgggatcttctgcacggaattgtcctttttgaggagggcagtgtttatcgcgtgcaccttaaggctctgcaggccctgtttatcggcgaaccttgggaggctttaactcaactcatctcacacgaatcacattcagtggtagacgttttacctacggctcgtccgtttgacggagttcgtcagattgcggcgctatggggaaagctcttcaccgcgtggcttaacctgacgcaggcgtaa

SEQ ID NO: 145868 - DNA, 234 bp, Enterobacter cloacae
atgctgataaaagcgctcttccatctggatgatagctttcgccagcccgcacaggcgcacagagaaggttactactcgctgttttatagcagcctgctgaaaggatatggcggagaggagaatatgctctatgagcggtttatcacggaccacgtcactatactgattggtgggagtgaaaccagcgaagcgttaaccggaaacgtgctctgtatgctggcactgcatccgtaa

SEQ ID NO: 145869 - DNA, 1764 bp, Enterobacter cloacae
atgagtcaggaagcgcgtttatttcaggaaagtactttctcaaccagcgatggtgagtcgctttattttcgccactggcctgcagcggaaggcaacggcaagaaagtaattgtgctgtttcaccgtgggcatgaacactccggacgtcttcagcacattgtcgatgagctggatatgcccgacacgcatttttacgcctgggatgctcgcggtcacggtcagtcgccgggtgatcgtggttacagcccgagcctggctcgctctgttctggacgtagatgagtttgtgcgctttgtgtctaaggacgcgcaggtcagccttgagtatatcgtggtgattgcgcagagcgtgggggcagtactggtttccacctgggttcacgactatgcgccgaaaattcgggggatggtgctggcttctccggcctttaaggtcaagctgtatgtgccgttcgcccgaacgggtcttgggttgatgcagcggatccgtggcctgttttacgtcaactcctacgtgaaagggaaattccttacccacgatccggagcgtgtcgccagttttgagcaggataagctcatcactagggcaatcgcggtgaacattcttctcgacctctataaaacggcagagcgtattgtgtccgactctgctgccattacgctgccgacccagttgcttatctctggtgatgattttgtggtgcatgcgaagccgcaaaaacaattctacgccggtctgcgaagttctatcaaagagcagcatattttacccggtttttatcacgatacgctgggtgaaaaagacagggctatggccttcgataaaatgaaaacctttattgacaaactgtatgcggcaaaaccttacaccttcgattacagccatgaagaccaatggagcccgagtgccgacgcgtaccgcgaactgcaggcaccgccaaaagcacgctcgctggaggggatgttctattcctcaatgagctatggcatgaaaacaatcggcagactgtcaaaagggatgcgtctgggctacgagacgggctttgattccggtagtacgctggattatgtgtaccgtaactacccggaaggcacaggtattctggggcgcatgattgaccgacactacctgagcagtattggttggcaggggatccgggtacgaaaagtcaatattcagcaggtcatagagcaggctgtcgcccggctcaaagagagtgatatgccggtacgtgtagtggatatcgcagccggacacggtcgctatgtgcttgacgcgctggagaaacatcaggatatcgaaagcatcctgctgcgtgattacagcgacctgaatgtcgaaaagggccaggccatgattgaagagcgcgggttaagtcacgttgctcagttcaaaaagggcaatgcctttgactatgattctctcgccacgcttgagcctgctcctacactggggatcgtttcagggctgtatgaactcttcccggataacgccttaatcaaagcctcgctcgccgggctggctgcagcaatcccgcctggcggcgtgctggtttacaccgggcaaccgtggcatccgcagttgaagaccatcgcttataccttaaccagccaccagaacggcattccgtggatgatgcgagtgcgtacccaaaaagaaatggacacgctggtggagttggcgggcttcgagaaatgccatcaggtgattgatgagttcggtattttcactgtctcgctggccgtgagaaagcagcatggctga

SEQ ID NO: 145870 - DNA, 603 bp, Enterobacter cloacae
atgactctttacgaaattaaaccaaagtttcaggatttattacggccattagtccgcattttgtttattcggggtgtaacggccaatcaggtgaccgtcattgcggcaattttctcggtgatgcttggcgcagggttgatgctatatcccgaccccggcctttacattttactacctgtctttctgtttattcgtatggcgctaaatgcgatagacggtatgctggcgcgcgagttcaatcagaaaagcctgcttggggccgttcttaatgagatcggagatatcatagctgatgcagcgctttatctggcatttgcgtttttggccggtgtatcgccatggctggtttttctggttctgttgttgtcatggctgacagagttttgtggtgttatcgctcagacgcttacaggcatacgcaattatcgtggtccgatgggcaaaagtgaccgtgcctttgttctgggatctttaggtctgtttatcgcgctttgtccgcagcacacaagtgtggctaatatcgtgtttggcgtcctggcactgctgctggcatggacctcaattaaccgctgtcgcagtgcgctggaggttacaaatgcctga

SEQ ID NO: 145871 - DNA, 687 bp, Enterobacter cloacae
ttggataattttgtaagaaaaatggttaatggtctttcgttagtgctgaccgtactggctttatcgggttgtgcaacaaagcaactgagacatgacataaatgaccatgaaaatgaccgggcgttgtatagcaatgatgtgatcactgcagcaaccatcaccgaatcgggaaaagaaaattatagctgggtgtttattggcaataattttgattatgcccttacatcgggcgcgagtgattttttacgtgctatggtgtctggtaaagtggataaggctagggtcagggtgtctgaagacggtatcttcatgctaaataaagaaaaaaataagttcagtggcgaggttaccctgaaatatagctatcgggatcagtctgagaaaatgacaatcttaaatatcctcaagctatcagaatggtattgctctgctaataataaaggtgctggtgagtgtgaaatcagactctctggcctgcatggtactatacatcaaaaagcgcatgttccggctgatgtcttccggtttgaccatccgcttaaggtgaaattctatacccgcaatactctctctgcgaaacggcttctctatcctgctgcagtggcaacggatgttgtgctgtctccactgtatcttcttggtggcgtcgcggttttatctgtctacggtattattttactgcattga

SEQ ID NO: 145872 - DNA, 471 bp, Enterobacter cloacae
atgtcagtaaaatcacagttcctgaaaaagttgcaggcacgacaacctgcaccagttcctgccatcagcaagagtcaggctgatattgcagagtttcgccagcgaatggctcagcttcaggatgaaatggacgcgtggctgacggatacgggactgaatgtggagccactgaccgtatccgttccggatctgctggtggagggcggggcttttgatattgccgccctcgttctccgtatcgacgaccagtctgtaaaatttgtgccggcgttcctttatggtcagggtgtaaccggatgcgtggaagtgacccttcatgttgaaggccgcatgatgatgttggggcgcctgtttatgcgggcaggtcatttcagtgactggacctttaccccgccaggggttttatcccgccatgggcaggtttttgatgaaagcacattttttggtttgattctggcgctccttccatag

SEQ ID NO: 145873 - DNA, 1026 bp, Enterobacter cloacae
ttgactggcgaggctaaccgcagcgctgcggcttttgcggtaatgggctttgccctggtctccatcggttttctctggctttgccgactgctttattaccgcttctctttgcaccatgcaatggcctggcaatgcaacgtcaggcacgagcagagcctgtggtgggaagaacatcaaagcctgcttgggctacaagacgtcctgctgcttggcccggcaggtgcggaaacggtggactggcaaagggtgcttcgccgtattcagcggccccctgctgaacgtcacgagtctggtgggaaaacactgcgtattgcccgaaccttctccacagagagccaggaacgtgagcagcagctggttcgcgcgctggtgatgcagtggaagacgagctcacgcgatatgccgcggtcgatctcgcagtgcttttttctgggagatgccctcgtatggttagctttttatgcacaaatgaaggactcttttccagggatcgcattgccagaccagcctgaacgctgggagggagaggcgacgcttgcgagattgacggccctgcttcgggaggatgcgaaaagccagtatcttgtggttggatgcgtttcatgccccgcttcacctgatagcctgttgcccgcaggggagtctgcagtactgtggctgataggcactgacgcaccagtggtgatgcctcggggggaatattatgacgcctctgcttcagacaaattgaacatcgtctgcgaacgcgcagttactcaatgtgaacttaaggaagatccggccgcgtgcattttgttttcgcatcctcaaattccccagattgacgagtgtggctggaataccacccataacctgcaggacagctattggggaatgccgggaagcatggaacctcttattgttatttctcttgccgctctttttgcccaaaacgaagcacagccttgcggctggattagtaccgatcctcaacataccctcgctcttggaatagtaaagccacatggaaaaggaaaacgcccttaa

SEQ ID NO: 145874 - DNA, 534 bp, Enterobacter cloacae
atgaagataacaatatcaggcgtattactgggcgttttcttactggccggatgcagccagccaaaggctgaggcacaaacgcaaagcggtggtacgggaacaataaaagccatcaaccataccagatgggccatcaatcatttcagcgtaaacggtcagtcgggcatagatgctatcgggccttttgacggcggtggcggtgggtgttgctatggtgtaccgacagtctggaaacccggaatgacagtacgtatagactgggaaagcggtgaggcttccacagagggattcccgggatttgctgactatgaaaaatataaggcctgggaaaagaaaatgagtgaaaataacagagaacatagcaaaatagtaccgcttcccgattatacaggacaggaaacctgcggtattacggtacattttttaccctgtgatgacgtaaaggtaacaaccagctgctggtcacctgctaatgctaattatccaatcaaacttccgctggaaatgaaggagccgaaagtatgtccgaagtaa

SEQ ID NO: 145875 - DNA, 534 bp, Enterobacter cloacae
atgaagataacaatttcaggtgtattactgggtgcttttttactggccggatgcagccagccaaaggctgaggcgcaaacgcaaagcggtgggacgggcacaataaaagcgattaaccataccaaatgggccatcaatcatttcagtgtaaacggtcagtcgggcatagatgctatcgggccttttgacggtggtggaggtggttgctgctacggggcacctgcggtctggaagcccggaatgacggtacgtatagactgggagcgaggagaggcttcaacagaaggtttcccaggttttgctgatagagagaagtacaaagcgtggttaaaaataaagaaggctaataacaaggaacttagcaaaacagtaccactgccagattatacaggacaggagacctgcggtattacggtacattttttaccgtgtgatgacgttaaggtaacaaccagttgctggtcacctgctaatgcaaattacccgatcaaacttccgctggaaatgaaggagccgaaagtatgtccgaagtaa

SEQ ID NO: 145876 - DNA, 783 bp, Enterobacter cloacae
gtgttgaatgaatattctgaaaacgtgctggagagcgctcgacggctttgccagcagattggacacacctatatcgatgtcattgttgatcagtgtagtgtggattattcagtcattccggcgttatcaggtttttctccggagataaaatggcagtcgctgtataagggcttaccggaggagatttatcccgaagatgcgcctcttctggtgcgggttatgtttgacgatctgcaacaatggaactggcttcaggcgcttgcaaaagaaatgtcctcaacggcacctttactgattatatgttcgccatggacattgtctggattgggtaaatggcttactgaaatcgttaatgcccgccaggaaggcagagaaggtgtttttcggttctgggatactcgtattttttcttatctttttacggatattctgagcgctgaacagcaggcgcaacttaaaagacccgtaataggctggggatggcaggatcgtgatggacagtcggtatggcttacaggaagcgggaaaatcccgaagcgcgacgagcgcgctgagcaagtagatttcagcgataagcaatatgaaaaatttatgtgcttatgtgatgcaaaacgttttattgaccagaagttactgatgacaacgatgtttgcctcaaaggaagctgaattcagggcgtgctttgagggaatggtgagcgctacccaggccggcgtattgttcgacgatgaacgtgatgcctgggtgatcgactatttgacccgattgcatgccggaatttga

SEQ ID NO: 145877 - DNA, 684 bp, Enterobacter cloacae
atgccagggcgtatagtgaatgtattaatagcgtgttgtcttacgggtatttctacactggcatcggcaggtgtggttattggtggcacacgagtgatttatttgagtgataaatccgacacaaccattactgtcaaaaataacgaagcggctatcccttatcttattcaaacatgggttgaccccttcagtaatacaggaaccgcgaaaaaaccaccgtttaccgtcattccaccggtatctcgtctggaggctgggcaggaaaaaattctgcgcattatgaaaaccgagggcaatttaccgcaggatcgggagtcggtgttctggctgaacatcaaaaatattcccccggcgagcaataagccgaacgcgatggaaatcgccattaagacgcgtatcaagctgttctggcgtccggcctcgttgaacatcaccccggagcacgccgccacgcaggtgaagtggcacagagaaaatcggcagttggtagttgaaaatcccacgccgctaaatatcaacgttatgaatgtgacagtggacggcaaagatgtgccactcaatatcgtccatccctttgaaaccctgcgtttacccttaccggaaggcgtgaatggccatgcgctggtgtggcggtatgtgaatgatttcggtgcgattagtcaggatttaaaagcagcgctttaa

SEQ ID NO: 145878 - DNA, 1167 bp, Enterobacter cloacae
atggagtgttcccgtattttcatcgcgtttgcttccggggtggtgcttggtttatccgccgagacggcagcgagggatatgtttaaccctgcgttgcttgaaatcgatcatcctgtggacgttgatatccaccagtttaaccgcgcgaacaatctacctgccgggaactataaggtcagtattcatgttaacggcgaatatgttgaccgccgtgaggtaacctttgtcgaagatactgccaccagcaaccttcatccttgcttctcagacgtcaaaaccgtgctcgctgagcttggggtaaaagtggcggctatcaaggcccttaacgacatagatgacaaagcctgtctgaaccccgcgccgctcgttcccggctcaacctggacgtttgatacggataaactccagcttaacgtcacgttgccgcaaatctatattgatgtatcggcgcgcggctatatcagtccctcacgctgggatgagggcatcaatgcgcttatggtgaactacgatttttccggctccagcacggagcattcgaacgaggatgttaacgacgatttttattatctgaacctgcgcaacggtgccaacctgggggcatggcgtttacgtaactacagtacgctaaacgtgaccgatggcgagtcttcgtatcattcgatcaatacctatttacagcgcgatatcgccgcgttacgcagccaaatcatgctgggggatacgtggaccgcaagcgacgtgtttgacagcacgcaactgcgtggtatgcgtctctacacggatgatgacatgctgccttcgagcctgacggggtttgcgccagtggttcgcggcgtggcgaaaagcaatgcgaccgtgattgtgcggcaaaacggttacatcatttaccagtctgccgtaccgcagggagcgtttgcgctcaaggatttaaacactaccaattcgggtggcgatctggatgttaccatcaaagaagaggatggcagcgagcaacattttacccagccttacgcctcactggcgatcctgaagcgtgaagatcaaaccgatgttgatatcagcgcgggtgaactgcgcgatcaaaacgattttcagccgaccgtttttcaggcgcaggttttacacggttttcctgcgggtattaccctctacgggggcgtgtag

SEQ ID NO: 145879 - DNA, 15375 bp, Enterobacter cloacae
atggatacccgtcacccacccgttcgtttctcgcagcgtctgatcagctggattgtctgcggcctgatggtctggcagccgatggcacctgccgtcgcggcggcgcttacgccaaccgggcagaccacggtcgatcgggcggggaacggggtgccggtcgtcaacatcgccacgcccaacggggcgggtatctcgcataaccagttcggtgagtataacgtcggcaaagaggggcttatcctcaacaacggcacggaccgtttaacccagacccagctgggcgggcttatccagaacaaccccaacctgcaggccgggcgggaagcgaaaggcattatcaacgaagtcacgggcgccagccgctcgcagctgcagggctatacggaagtcgccggtaaagcagcaaacgtcatggtggccaacccgtacggcattacctgtaacgggtgcggatttatcaacaccccgaacgtcaccctgaccacggggaaaccgcagttcgacgccagcggtaacctgcaggcgctggaggtgacgaaaggcgccatcacggttgaaggccaggggctggatgccagcaagagcgacgcgctgtcgattattgcgcgtgcgacggaagtgaacgccgcgattcacgcgaaagatttgaccgcgaccgtgggcgccaaccgggttgccgccgacggcagcgtcacgccgattaccggcgagggggccgcacctgtggtagccgtggataccggcgcgctcggcgggatgtacgccaaccgtatccgtcttgtttccagcgaaaaaggcgtcggggttaacctcggggatcttaacgcccgacagggcgatattacgctggataccaacggtaagctgatggtgaataacagccttgcaagcggtagcctgacggcgaaggcggatagcgttgtcctcagcggcgaacataaaagtacgggagcaatgctgatcaacagccgttcagacgtggcggtaacgaacggcaaactgcttagcgacggggatattacgcttgccggtaatggaaagctgagcgtcgctaacggtacgttaacggcgggtaaaaacatcagcctgaactctggttcgcttaccgcagataccaccagtgaggttaatgcggctggcaccattcaggctaacgtcgcaggggctgcaaaccatgcgggtaagatggtggcaggcagcggtatctctctttccgcaggccagctcgctaacagcgggaaaatgaccgcgaacggcgatctaaacgtgaaggcgggaggttttaccaatagcggtgcggtacaggcgcagaaaaatacccggctcgatctgggcacgcttaaccatactggtcaactgctggccggcggcgtgctggagatctcaacgggggatgcctggattgacggcatgctcagcagcgatagcgatctgagcgttagcggtactggcgcgctgaatatcgggcaaaacgggcaattgttatccaccggcaggctcgggctgcagtctgacagcgtcataaacaacgggctggtcagtgggaaacagaatctcgcgctcaccagccgtcaattcagcgctcttcaggggagcacgctgaccagcgggggcagcctgcagctcaatgcgggtgatgcgcagatcgccggggaggttctggcccagggcgatctgtccttcagcggcgaccgacttacgacgctggcgagcggacagcttcagtcgcagggcgatatgctgttgcaggcgcataacgccgccgggctggacggtgtccaggctgcaaaaggcaacctgacgctcgctgccggcagcttaacgcatcgcggtacgagccgcggcagcaacgtttctctgcaggctaaccagattgacaccagcggcgccctgcaggcggataatgccatggcgttgagcgccgaaaccattgttcagcaggccggaggtgcgctgctggcgcagaaaacgctgcagcttaataccagccagttgaccaacagtggttcgctggatagcgatgccttaacgcttgccattaccgggcatacggataaccacgcgagcggcaaaatgacggcccgtaacgggctcacgctgacgggaaataccttcaccaacgacggccagctggctgccagcgcgctggcgctgacgctaaataacgcctttaccaacacggcctccggaagcgtgctcgccgaaaatacactcgacctgaccgctccagtgttcaataacgccgggagagtggcctcatccgctctgaacctgaacgcgaataccctcgacaatagcggcctgctgcagggcgggcaaacgttgcagctcgcttccacaaggctggctaaccagagcgggggaaaaatcatcagcggcagcgggctgacgctgaatatcccacaactggtgaatgccgggctgatttcggtgaagcaggggctaaccattgaaagcctgatgctgacgaacagcggcaatcttgaagcccagtcgatggcgctgaaagcgggtcagaaattaagtaatcagcaaggcggcgtactgctggcggaagcgtcgctggcgcttacgaccccggcgtttgataacgcgggcagcgttcagggcaaaacgctgacgattgacgccggggagtggagcaacgggggtcaggcttcggggctggacgatctgtcggtcaatgtccgcgatacgtttactaacctcgccgacgggcggcttgtcagccagcagactggccgcgtgaacgccgggaagtttgctaatttcggcggcgtcacggcagacaatctgcgcattagcggcaacagcctgactaacgacggctggttgcaaagcggcggggcgctggatctgaatgtcggcgcgctggcaaacgggctttccggcactgttcaggcaggcagcggcctggccgttaccgtacagcagctggttaatgctggcgcgatctccgctcagcaaggcgctgccattgatgcgttaacgctggataacaacgggcggattgaagctcaggatctgcagctaaagctgcgcgaaaagctgaataacctggctgaggggatcctcctggcccagcgcagcctgaagctcgcgacgccgcagctcagtaacgacggacgtctgatgtcggaaagcgcgacgctgaacgcgaagacgctcgtcaataagggtttgctgcaggggagcgcggcacttgtcgctgacggtgagcagtttaacaatgcctccgaaggcgaagtcgtcagcggcggtacgctgacgttcaatgagaccctagggttcagcaacgccggtaaggtgcagggcgagactattggactgaataccagaaaggcggataacaatggccagatgctgggattatctgcgcttagcctgagcggaaccgaaagcctcaccaatagcggtaatttgctcagcaaaggcaaactgggccttacgagcgagcagttggataaccaggggcagatcgcggcgcccgagctgaacatcaacacccggcagatgaccaatagcggtttgctacagggtgaccagctgtttggttttaccgcctcctcactccataaccagaagcagggcagcattatcagcggcagcgggctaagacttgccattcccgacctgattaacgccggtttgatttcggtcacccaggggctggctatcgaggccgcgacgctggacaacgctgggaacatcgaggcgaaggatttacagctgacgctgcgccagcagctgaataaccaggcgaaaggtgtgctgctggcagatgattcgcttcacctgtcgacacctgagttcaccaaccgggggcagctgattagccgctcaggcacgataatcgccaatactctgtcaaatgcggggttattgcagggaaatcaggggctttccgtcagcagccatacgctggataacctttcaggtggtcaactcctgagcggcggtgcgctcaccctgaataccgtgcagggagggaacgccggacgtctgcagggggacacggttcagatcggtgcggggcggctggataacagcggccaggtgcttgctatcaacggtctgtcgctcaccgccggggaattgaataatactgcaggcgcagaaatgagcggcagcggaggtagtttacatgttgatcggctggtcaacgccgggctgatttcggtcagtcaggggctggctatcgacgcgctgacgctaacgaatggcggcaatattgaagcaggcaatctggcgttaacgtcggtacagacgctgaataaccaggccagtggcgtactgctggcagacgataccctctcgattgacgccgcccgcggtgataacgccgggaagcttatcagcagcaacgcgcgtcttgcggttagcagcttaacaaatagcgggctgattcagggaaaccagtccctcggcctgcagagcagccagttgaacaacatcgccagcggccaattgctgagcgatggtgatgtgggacttaatgttgaccgtctggataacgctggccgggttcaggggaaaagcctgacgctcgcgggtggacagtctggcggcgttaaccgcggacaaatgctgggccgcgaggcgctgaatattctgttcgccggggctttcaacaacgacgggcgtcttatcagccagaattccctcagcctgaaaagcggggcgctttctaatacaggggtaattgctgctgcaaccgttaacatcgacagcgcagtggggcaggcaaataacagcggattaattcaggccgacggcaagctcagcttctccgccgcctcattgtccaatcaaaagagcggttcgctggtagcaggcgatgatgttgcgctgacggtacctgcgctgatcaatgacgggctgatgtcgacggggaaaaacctgcgcctggacgggacttctcttgataaccgcggtggtctggaagcactgaatgtgcagctgaatttgtccggtcaggtaaacaaccagcctgaggggcatctgtttgcagacgacctgctgacgcttaacgccggaagctggcgtaacgacgggcagcttatcggcaacaacgtcattatttcgtccggacgcgggcaaaatagcggcctgctgcagggggatattggtcttaaacttgccgttaccggcctcgataacgatcaagcaggcaagatattaagtggtgggctgctcgatattaccggccagcagctgaacaacactggcctgatgcaggggcagaacgctctcctgcacggcgtggatttcactaatgcgggttcgctgacaggtaaaggcgatctgacgctgaatgtggataataccgcgaccatcagcgggcaaatgctgagccagggcaagctgcagcttgacgccagtcagctcgataatagcggtattctggcagcaaatacggttagcgtgagcaccggagagctgaacaataccgggacgctgcaaagcaatggtgctttgaatctcgttgcagacgcgttcagcaacgttggtacgcttctggccaaacaggcgctaaatctcacgagcgcaatgctgactaacagcggtgtgattcaggccgacacgctgactctcgcggtaaaaaacgcgctgaccaaccgggacacgggcaaagtgcttgccacccaggcgctggcttttgacggcaatacgttcaccaacagcggcacgctggcggcagataatgcgcacctggctctcgggatcctgaacaatagcggcctggtgcagggtaacagtgggctggcgatccagggtcaagcggcacagacctcgggcctgagaagtgttgacgccgcgcagacgcctgctgccaaagtgattaataacctgatcgtcggacagctgttaagcggcggcgatttgacgattgccggggataagggcgataacgccggtacgctacagggccggacgctgaacgttaaggccggaagctggaataacgaggggacgctgcttggccagcaaggcgcgagcctgaacgtcagcagcacgctaacaaacagcggaacgttactcagcgaggccgggtttgatattcgcgcaggcgctgtagataaccgcgggcagttggcggcgggtacgcttaacctgcaatcggacagcatcagcaacagcggtttattgcagggtagcgctgcgttgacgttcgatacccgggccctggataaccttaccggtggacaaattctgtccggcggctcgcttaatctcgatctgccgcagtttaccaacggcgggctcgttcaggcgagtcaggatatgacgctgacgaccggcagctttgacaacctgggcacattgtctgccggagcgttaaatcttaacgtcgcgcaacagctgaataaccagagcgggggcaagctgctggcgacccgtcaacttagcagccagagcgccagcctgacgaataacggtgtgcttgccgcaatgagtgtcgagcttaccagcggccagatcgacaacaacggcatcctgcagggagacagcgcgctggcgctgcacacgccgcggctcaacaatctgacgaacgggcaaattgttagcggcagctcgctgaatctctccatcccgcagatggtcaacctggggctgatgtctgtaaaagaggcgctggtcctttctggagccaccctggataaccagggaacgctacaagggagccgtgtggggctaagcttcaccggcgacgtcgtgaaccgcggcaatgcacgcctggtggcacaaaaagatctgaccctgagcgccgccagccttaacaaccagggcacgttagcgggagattcggtgaatatcatcaccaatctgctgaccaacgtcggcttgctgcagggtaacagcgcgctggcgctgaactccctgacgccatcaactctggtacttaacaataagaccggcgggcaaattatcaccggcggggcgctgacgctttccctgccgcagctgaccaaccaggggctgctgctttcgcagcaggggctcacgcttaatctcgataatctcgacaaccagggcatcgtgcaggcgcgcgatctgggcctgaatatcggcaaccagctgacgaaccaacaaagtggacggctgctcgctcagcaggggctgaacctgacggccgcaaggctggataacgcaggtcagctggcggcgagtaatgccacgctggcggtcaatattctgaataaccgcggcgtgcttcagggcgacggcgggctgtcgattaccgccccgacgctgaacaacctgaccggcgggaaactgctttccggcggacagctgacgcttaaggccggtcagctcacgaatggcgggataatgcaggggcaacggctcggcgtgaacgcgagtggctggaacaacagcggcagcgtactcggtaccgacggactgaccgctcaggttgataaccagttgaccaacacgggtcgcctgcttggccaggggagtacgcgcgttgctgcgggggcgctgaataaccagggctctctgctggttgacggtgacctgatactggacggcggcagcctgtcaaacgggggcagccttcagggcagtaccctgacggtaaatagtggtacggtcgataacgccggttccgtgattggtctgaacgccctgacgcttcaacctcttcaggggctgaccaaccgggccggtgcatcaatgaaaacgcagggaacgctgctggcgggtgggcagagcatcacgaatgatggtctgtggcagtcgcagtacctgaaggttaacgcccggcagttacagaacaacggcacgctgcaaagcgcgggaaatacggatctcgcgctgacctcctccctggtcaatacgggctcaatggtggcgaacgggacggccacgctcggggcgccaacgctgaagaatcaggggcaaatgctggcgaagaagatgtcgctgtcgggcggttcgctcagtaacagcggcagcatcagcggtgccgatggccttggcgtcacgctcagcggcgatcttgaccagcaggcgggtgcgaagctgttaagcaacggcctgctcagcatgggcgccaatatcctgaccaacctcggtcatatccaggggagcaccctgacgctgaatgccggtagcctgaataaccagggccgcatggaggcgaataccgcgctcaacgccacgctgcgcggtaacgtcgataacggacgcaatgccgtgatgctgagccagggcgctttccagctgggcgcacagacgctgaataatgacggtacgctacaggggaacggtaatacgcagcttgacctgcgcgatcgcggcagtaatcaggggcagttactcagtggtgcaacgctaacgctgaatacgccggggctgaccaacagcggctgggtgcagggctttgcgctgtggctcaacgccggttcgctgaacaacagcggtacggtgctggcacagcagcagggaacgctcggtggtaattatattgtaaacaacggcatgttgcagggcgcgaacctgacggttaatccgggccagctcgataataacggtacggtatacgccacccagaatcttgggattgccgcctcgcaggtcaataacgctgctgctgcccggatgcttagccagggtaacctggcgattaacgccactaataccggccttcaggggcaggttgtggcgctgggggacctcaccctcgcgagcaaggcttcctataatcagctgactacgctggccgcggggaatacgctgtccgtcaccagccagggcgatatcacgaccaatggcctgatgcagggcaaggggatacagctttccgctgcgggtacgctgaataataacggccagctgcgggcgggctatggcgaaagccagcttagcgcagggcagctaaacctgaatggtacaggcagcgtcgaggcgggcggtacgctgcgcctgagcagcctgaacggtattaataacgcagggtttgtcggaactgcaggcgatctgatcgccagcgccggaagcacgctgctgaatagcgctctgctgtacgcgggcaataatatgagcctgctggcgaacagcatccgtaacgcgcgcggcgatattctggccggcaacagcctgtggatgcagcgcgacagcgcaggtaacgctagcgcggaggtcgtgaatacttcaggcagtattgaaacccagcgtggcgacatttcaatcctgaccgggcatttagtaaacgagcgggatgggctcaatgcagcccagagcgaaacgaatatcgcaccgtcctgggttaagggtggaacggcggatattcctgtggactggatttcctcttccggtaccggcaagtacggtatttatgtgacggaaggacagagttatcacggccacggtgacgactggagcgaaatgcttggcaactatgcgccttatgaagacgcggatgttcaaaaagttgccgttaaaaccgtttcggtatccgtgagcgcgaaggggcagcagtcccgcattgcgtccggccgagacatcatcgcccggtctgataacgttgaaaatatggcgtcgtcgattctggcgaacagaaatattcagctttcaggaagtaccttaaataaccagtcatggctaaacggcacgtcgacggtttataacgtttatcgctatggggtaggcgataaatatgcccgcagacctgatgagaccacgcgaagctatgacaagctggtatcgaagtcgattagctatgttcttgacagtgtgaccactgaaggggccagcggagacgtttatcgcgccgttatccaggccggcggcgcggtagtcgccagcttcagcaacaatatcagcaatacctccaccacggcgaacgccccgggctataagcctggcctcagtgcccccgggctgaacctgtctggcggcccgaccgttgcgtctggcgctaaggccaccggactcggcgcggcaagcagccaaagcgttgccgcaccgcaggcgaccattaacctgcccggcggtgggagtggcataggtaatgcggaagtgctcaccagccgcaatgccggtaataacggtctggcatcgattgataaccgtccccagagcatcggcgattttggccaggcaggcggcaagctggctgacgttcacctgcaggctgcaggcttaacctcccagaacggtgcgaacggtacgccggttgatttgaccgggaccggtgcagccctggtggttcccggcagcacgggtggcaagcatacgactattgccagcgataccgtagcgctggcggggcagaagcagtcgggaacaagcggaacgtccgcgctggcttcccgcgataagatcggtgaaatcgctgcggtaacggctcagatcatttcgctttccagcggcgggaaaacgcctccgccaccgggttataactaccgtcctgtttcgcttaccgatatctcgtcggttgccccagcgctgaccagcaatggttcgccgattaagctgagcgactatccgctaccggccaacaataacggctattttgtggcaaaccgcgatccgaaaagcccgtatctcattgttaccaacccgaaactggcgggtttagggcaactggatagcagcctgtttaatgatttgtacaagctggccgggacaacgccgccttcggcgccgcaggaaacccgtacaacctataccgataccacgcagttcctggggtcggattatttcctggcgcgtctgaatctgcgtccggaatatgattaccgtttcctgggcgatgcggccttcgacacccgctacgtcagcaatcagatcctgaacgagaccggtagccgctacgttaacggcgtgggctccgatcttgagcagatgcagtatctgatcgatcgcgccgctcaggcccgtgacaagctggggttacagctcggcgtcagcctgtcggaagagcaggttgcctcgctggattccagtatcctgtggtgggaaaacacggtgattgagggacaaaatgtcctcgtgccaaggctgtacctgtcggcgaaggacgtggcgtttaacaaagggagcattatcgccggaaatcaggtgatccttaatgctggcagcatcacgaatgacggcagtacgctgcagggtaaaagcctgctggctgccagcagccagagcacaatcaacaacatcaatggtggcctgatcggttccagcggaagcctgcagcttagcgccctgggcaatatcaataacgtggggtcaaccatcagcgggcagacggttagccttgagagcgtggggggcagtattgttaaccagacgctgaccaaccaatggaatatctcgggtaccacgaacggatggaacagccaggccgtctcgctgacgcaaaccgacctgggcgcgcttgcttccatcaaagcgacggacagcctgaccctgagcgccgggaaagatatcatcaataccggcgctaacctcagtgctggcggcgatatgttgctaaaagcgctggatgatatctctgttacagggaatcaactggtgacgcgcgaccgttatggccgcaatctcaatgagaccgtcaccaaccagggcagtacggtcaccagcggaggcaaccttggcctgcaggcaggttacgatctgaacgttacgggcagtaatctgacggccggaggcagcgctgcgctttgggcggggaacgatctggtgctggatgtggcgcagaatagccgccacagccagaccgcgaaaacggattccctgaagacggataatacgcgtacggtcattagcgctggcgacgatctgacgctggccgcaggccgcgatctgcgcagtaacgccgcggcgcttgccgcacaggatcgcgtggggctgcaggccggacgggatatcgatctgctggcggcagagaccacaaccagcgacaaatacagcgcgaagaaaaaggtcgagatcaaccagtctgtgcgccagcagggaacggagatcgccagcggcagcagcaccacaatcattgcgaaccgtgatgttaatacccaggcggcgcaggtcacagcacacggggatattggcgtgggcgcagggcgggacataaatctcgccaccgcaaccgaaagcgattatcactacaaagagcagaccaaaaccaaaaaagggttcctgagcaagaaaaccacccacaccatcgaggagaacagcgcgacgcgtgaatccggctcattgctgagcggcgataatgtgcaggtggtggcgggcaataacctgctggtgaacggttccgccgtggcgggcgacggcgacgtgaagcttaaggcgggcaacaacgtcgatatcgtggcagcgacgagcagcgatacctcctggcgctttaaggaagagaaaaaatccggcctgatgggctcgggcgggattggcttcaccatcggcagcagcaaaagtacccaggatctccgtgagaagggcaccacccagagccagagcttcagtacggtgggctcgacgggggggagcgttgatattgccgccggtaatcagctgcatgtcggcggcgcggatctggtggctggcaaaaatatggcgctcaccggcgacagcgtgacgatcgagccgggtcacgacaggctcaccagcgatcaaaccttcaagcagaaaagcagtggcctgacgattgccctctccggcgcagtgggtgacgcggtgaacactgcggccagcacggcaatggcggtgaaagaccagagcgatggccgtctcgccgcactgcaggcgaccaaagcggcactgtcgggtgttcaggccgtgcaggccaaccgtctcgctgaagcggctaacggcagcgatcccaccaacaatggcgcgttcggcgtgatggcctccattggcggacagtcctctaaatccacctcacactcggagcaggacaaaacgaccggcagcacgctgaatgccgggggtaacctcgccatcacggcgacaggtcagggcaacgctgccaacagcggtgatattaccgtggcgggcagccagctgaaggctggcaaggatctgacgctcaatgcggctcaggatatcaacctgacgagtgcagccgacaccaacaaactgacgggcagtaactccagcaagggtggctcaatcgggatcggtattaccgccggtccgaatggcgcgggcatcaccgtctctgccagcgtaaacgccgccagaggcagcgaaaaaggcaatggaacctcctggaacgaaacgacgctggatgccggacagaacgtcaacctgaccagcggccgcgatacggtacttaaaggcgcgcaggtcaacggcgataaggtcacggcggatgtcgggcgcgacctgaccctcagcagcctgcaggatagcgacaaatacaacagcaaacagcagagtatgaatgcgggtgcaagctacacctggggagcgggcagcggtagcggcagctttagcatcagccgcgacaagatgaagagcaactacgactcggtccaggagcagaccgggatcttcgctggcaaaggcggctttgatattaacgttggcaaccatacgcagctggacggtgcggtgattgccagccgtgctgatgcagacaaaaaccgccttgagaccggtacgctgggctttacggacatcaacaataaggcggagtataaggttgaacatcagggtgtcggcttcagcagcggcgccggggttgcgggtaatctggttagcaacatggccagcacaatgctggcaggaatgggcggtggcggccatgctgaagggaccacgcaatcagcggtagccgacggtgctatcattgttcgcgaccaggctaaccagaagcaggacgtcagcacgctcagccgtgacactgaccatgccaacggcagcatcgacccgatctttaacaaagagaaagagcagaaacgcctgcaaaccgcgcaaatgattggcgagatcggcaatcaggttgcggatattgcgcgcaccaacggcaagattgcggccacggaagcggccaacgagaagatgaaaaccgcgggcagcgatgcgcgtaacgccgccatcagccagctgaaaaaagacggtaaagaggttaccgatcaggcgattcatgaccagatgtaccaggccttctataacgaagcgtttaaccagtctggcatgggaacggggcagagcacccagcgcgccatcacggcagcaacggcggccattcaggcgctggcaggtggcgatattaaagctgcgattgcgggcggtgccgcgccgtatatcgctaatgccatcgcgaatgccatcccggagacggatcttaagggacgcgtgctggcccatgcggttgtcaacgccgcacttgcagcagcttccggcagagatgcggcgtccgctgcagctggcgcggcggtgggtgagctggctggtaagattgcggttgacggttttggcaaacaggtcagcgaactgagcgaggaagaaaaacagacggtatctgcgctggcgacactggcttctggtctggctggcgggcttgtcggagacagcagcgcgaatgcggtagcggcggctcaggcgggcaagacgacggttgagaataacctgatgggtggtggaacagaggacgggcaggtaaaagcggcacaggagcatgcgaaaaatatcatgtcctgcagcactgcccctggtagtgcctcttgccagaaaggactggcgatgcaggatgcgttgatggtagcgctgcctgccgggcttggtggcggtttactggctgcagctacccctgaactggccgcagcagcacaggcggtactggcaggatgtcaatcggcagcgatactttgcctgaatcaggcggggatcctgactgctgaagttgcaaccccaggcggggtgggtgctgcggggatccttaccgtcggtaagaatgcagcagagattgcagcagcaaaagctgaggttacggcggcgagttctgcgaagcctggctggttgcagaatgttcaggccggtaataagtttaacgcagaacagtctaaaaattatccgtataatgaactgtatgtaaacaaacccaacggaaacggctattatcgtgttgattcatataacccggcaacaggtgagatagtgtctcgtaagttcacacaatttgctgatatcacagaggctacggcgaccaattatatccgggaagctgtgaataagtatcctgctggggctacagttgcaaatgttccgtccagtggagatcttggaggcagcttattgaaagggaaaaatatactagaaatccctccgcaggcaaaacctattccgcaatcaataattgatactgctaggaaatctggtgtggtgattcgtgatacaaatggtaaggtgtataaatga

SEQ ID NO: 145880 - DNA, 477 bp, Enterobacter cloacae
atgagccgaaatgtttattattgcaaaacatggtcagttggatataaggagccaattgacttatggatggagaaaaaagcttataaaaaacatgaggctggtgacacttatacggttctcatcggttctgattctactccgtcgtgcttcattaatataatgaggaatagtggatgggtaagtgtaagttttcttgatgaacatttaagagaatatcttctttacaatttccaaatgctgggtgttgaaacattatttctatcaatggcggtttatagagagtatgatggcgatactgacatagtaatcaatgggacaacgtaccattttaaagaagatgggcatactataattatagaggataatgtttctgaaaatacttcagagagaagtgaaacttattctgatgtggcagggaactatgatcgatttcctgaatttgggaaatatgattctttgattagaaaagaacgataa

SEQ ID NO: 145881 - DNA, 330 bp, Enterobacter cloacae
atgaatttaaccaaagaagaaatttttgcattaacttttactttaagaaataagttagatcttttaaaaatagtacttaatgaaggctgcgtaattgaacgtagtaaaaccggtgtgggtttcttttcgaccatcaagttgccacaaatttttacattggaaaataataaagatagatattgggagcggggttttttccataaaaaactcccttatggcgggtgttttatgattgctgtagaggatgataattgtctagagattgaagcagtcgtatatgaaagtgaatggccagaaccttttgttgaagaggatttttttccgcaataa

SEQ ID NO: 145882 - DNA, 486 bp, Enterobacter cloacae
atgatgctttttgataatgggtatcaagagctggcacgtaatgtagtcggacgaaaactccaaaatgtcaatggtctgatatatatttataacgttcccgacttaggggctccgcaacaacttcagttcgttttttttattgaaaatcaaaatgttgtgttcaggtgtggactagatggggcttcacttgaactaactaatttaccaatgcaagaaaatgatctcggagagtatggcaaagagaaaattatggatttgtcaaattcatgtttttttcataaagttattggaaagatactcttacgattttacgcgatttattctgaaatagaacaaaaagtgattggggcaaaattagtttttgatgaaggtcttactttagcaattattaatctcggggatgaaattaaagtttttgattctctgtcaatggaatatgagcgagacgagaaaattaattacattgatgttttatctatattttaa

SEQ ID NO: 145883 - DNA, 396 bp, Enterobacter cloacae
atgatgatgaattatgaactttctcgtttgtgtgatggtgagatgtatgtcaaaaataagtatccttcatggtctgacgtgctcgactttttaaatattttgaaaaagagcagtggcagtgtgaatatcagaattatcaatgctccagatattggacctgaaagacttagtgttgaggctgagaacgggttttatctggtcactatacttgaatatgatgaatccggaggagatgtaagatccatatgggataaaacgtcgtcatctggagggcatgtcattatccgtggtaattattggcctgaacgccaacttacaaaagactttgaccttgtggtaaagatctttaaagagtttttccatactggcaacgtatcaattgaccttcttaattga

SEQ ID NO: 145884 - DNA, 363 bp, Enterobacter cloacae
atgaaatttttatttgatttaccttatataaaatcagacccttacgtggttataaaaacttactttgacctcatgtataatgatggtgttttcttgatgtctattgaaagtattattaaaaagcattcatttatgagagatggggtttactgcttctttcctgatatggaaagttatgacgaaagtgaacattttgaaggtgttgaatttgctgttggttatcctccctctgaagcagatactactatcgttagtgaagaaatctgctatcactacgtacgacttgcaagtgaaaagtatttgcggcttcacccgggtgatacggaaaaggtaaatagcttacttgctcggctacctgtgtga

SEQ ID NO: 145885 - DNA, 261 bp, Enterobacter cloacae
atgagtgtcttcaataaggttggtatcttttggctccttttcttagttgtgtactgtacagttctagtcactattgttcttttcgtatgccagttcggagtgtcaacaattttttattttaacgatggtgaataccttttttcatggaaaaaggcattacatatcgcattaataaaaggaagtattacaggattaatattaggtgtaggggtgtggttgaaaaataaactacatgagtatcgccggaaaaataatcgctga

SEQ ID NO: 145886 - DNA, 1233 bp, Enterobacter cloacae
atgaaaatactggtaattagtgacctacatgttggtactacagcaagagcaagagatttctgtactgaagtaagtggcgcatcagcaattacagaaaattttattgaagagtttcacgatttagttaaatgtgaaaacattactgcgactcatctattaattgctggtgacatcaccaatcgtgctgagtcatatgagtttgagattgctgcagaaaggattaatgatattaaaaatatattgaaaatagacgaaagaaatatattctttgttcctggtaatcacgatggaaactgggatcaagagaaagcagcaagtctaagatgttctagtaaagataaaatcatattagaaaaatataataatattagaaacaatgactttttttcttctttattaaaaaatacaaaattctcttcatattattctgacccgtattctacaatttgggaacatgaagatttaattgtagtaggagtgaactcttcagcgttggatagttatgataaagcagtaaagtttggggaggttgatttaaaatgcttagcatccttacaatcaaaattagatgaattaaaagttacaggtaagcgtaaatttaaaattcttcttacgcatcatcatcccaaaaactatacagatactactttccccgcccctgacctcagccaaatgaaaaatgcggaagattttatgcgttttgccggaaaaaatgagttcgatttcatagttcatggtcataagcatattccaaggtataattttcaaatggattcagatggtttttttgtcaacatactaagtgctggaagttttgctgctcaattaaaagactggcacaatggggtagcgaatttctttcatctaatagaacatcatgatttttgcccggataataacttttctagaggaaaggttatttcgtggtcttattttacaaatcataaatggacacgatcactttatgatagagatcgtataagtcatgaagaatattacggttacatggtttcaagaaatcagttaaaaagtaagctgagaaatattattaaccagtgcaaagagcacaagaattatgcaaaatggcaagatttaattaaaatagagcctaagttaaagtattgtaataaacaattattatctcatgcagtagatgatctttcatatgaattaaagtatgaagtgatgcctagtaaagatgacagcttcgttttattatgggcggaggattaa

SEQ ID NO: 145887 - DNA, 1773 bp, Enterobacter cloacae
atgaatctaagtgaattaagttctttatttgaaaattcaaatgcaagaggtttaaatactaatcaacttgccaaagaatttatttggacagaatcatttgaagcactatttaccagccaaaatcaagttattctcggatcgagaggatcaggaaaaactgctttagttaaaatgcttgcgcatgaaaatttgagtaagttaggtgagttttatccaaaggcaaaagacctaattgattctagaaattttattgctacctatgtcccactaagagtggaatgggtcaattcattaaataactatgaatcaaaaaaagaagaatacttcatttggagtttaaacctatctctatgtgcaaatcttcttgatacaattagaagttgtatcgactgctacattgaagatgagattgagcaactttttgttgaaagaaaaatttgtttagatatttcagatgtttggttttcaaatgataatttaaaattaaataatttaaatgatataagaaatgagttggagcgcgttgagttcaaaaagaatttggcctttaataaagaagcaatgggagtcaccctatctgatgaagaaagtagaataggtgaggcatttcatactacattattcaaaccttttgaatttgcatctagaataataaagaggaaattgtctcttcaagaaagtaatagatggattgtttgtattgatgaggcagagtttcttacaaggaatcatcatcaaactcttaatacattcatgcgttctgctagtgatctagtctttaagattaccactatgccttatagacatcatactcttgatactgatgtagctgcaaatattaatatcgggcatgatctagagtatgtatatatagacaagttaggtacatcacaccttaatcagcaaaactcagacaaaattatacaagagtttgctgaaaagctatttgttaataggttaaagtatcatcataaaaacgatataacgcttgaacagttggttgggaaatcagtgttaacacaatcaacacctgacatagcggaaaatacttacgtcatgaaattaattgataaacactgtaacgcggatactataaatcgagcgaatacattatttcttaatgatgttaataaatttgatgatgctattattcgtaagttgcgaggacttcttcttctacgtgaagaatataataataagttggggaattcatcctcaactttatattctggtgttgctatcgtttcacgttgttcagatgggaatccgcgacgtctctttagattattcaatcatttgttgggtaacctgaaggatcagtcaaaaaaaattcctgatgctagtcaaagcgagagaataaaaagttattcctatagagagttagaagttattaagttcgagaaagatggcattaaagcttttgattttattaataagataggtggttactttaaggaaaaaagtttagttgagaaactagggagcaatacacctcaatcgttcagtattgataatactattcatgaagatcaatggagttgtattaaaactgctgttgatttagggttgctttatccttatgtaaagaaagatagaaatacaaaatcacttttcccctcgaaagagggaagatttgtcttagctaactgccttgcacctaattttaatttgttcccacgtgtaggacgctctatccaattacataatatttttaattctaacgctccattgagcgcagaagatcaaatggagttattcaatgacgaagattag

SEQ ID NO: 145888 - DNA, 951 bp, Enterobacter cloacae
atgacgaagattagacttcaagatttatcaagagctgaaatgcttgatacgcgttacgacattgctttcttaggtttaggttatgaaccaagatgtgtttatgtttcaaaattacttgatacaacaaatatagatgatgtagttgtgctttcatttaacgaaagtgctcagaataaaagcaggttgcaaagttttgataacctacaaaaaaaatggggagcaaagctatcgcttgtgaatcttgagcattcgcatatccatgaagtttattcagttttaaacgataaactattaaaaattgataaaaaagaaattttgatattggttgactatagttccatgtctagaaactggtatgcggctatattaaactattgcttaaaagtctactctaaaaaaataataattgatttggtctactcttcggcagaatatcctaaaaacgatgacttcttaaattttgaattgggtgatgttaaagtattacctggttgcgaaggttcatcaatcactaaaaagaaaaaatgcgctatatttatgctggggtttgataaaattggcccgcaaagtttttttaatctacttgaaccagatttaagttttggcgtaattgcatcaccggggtctttaccagattatcaatctcaagctgaatcgatcaataaggattttattgaacaccaactatctgaaggtcgtaatttacttagacttccaatttctagtttatcaattacttttgagaatttatgtcaggtaattcagcctttaaaaaatgaatataatatttccataatccaatttggtcctaagccccatatagtatcatcaactttggccggtttgtttttcgataatgtgacctgtatctatagtgaatatagcagatcaaagccttttgacattcaacctaatggtgaactggtgataacgagaattatggtgaaataa

SEQ ID NO: 145889 - DNA, 1440 bp, Enterobacter cloacae
atgagcttattccaagtagaccgaacacaatttcctattggccaaggtggcttccatgcaactgtcatacacatgcctcgcgggaagaacctgagcatggttatcgactgcggaggtgcagacaaaagtcatcgcaaccgactgatcaagatattttctgaaggtaaacgccagcacgacattttggcaattagccatttcgatgcagaccacattaacggcgtcgatgatttgcgcgaagcaggcatcaagttcaacaccgtgttcctgccacatgtggaggtccaaagctacctactgtggatgaccttgaagctcagtatcagcgaggaaacccccgaaaaattggctcatattgtgcagactagcggtcgcctatatggtggtgattacgggtccgtggtgctcgtcggccctccaagtttgctaccgatagatgagcaccaagacgatctacttgaagatagcaacctagccaacgtattgagtgatgatgcttacaaggcagtacaaaaagctcgcggattaagcggacaggtcttttcatgttctcagtcactaaacataagggagatggattggcttttccgcttttattcacgcgaatggactttccctaaagaagcgaaatccatttgggatctagagtttttagacagtttgaaagctgtagtgaacataactaagcagcaaatgaatactagcacatggaccaatttctccacccagttaataactgagttgaaggcgaagatcgctcccaacgatgcagaaaaagtaatgtcactaataagcgtgacgccagcaaagaatgatccccgatatgagcgattggtaaaactgaagaatgaaataaagaaagcgaaaaatggtgggctcagttgtaagtacgtgctaggccaactgtacgagctcagcgagacacttaaggattacaacgatgcctcgatgtgtgtttactctggaccggcacagcgtggcaccagtgttccgcgcgaacaattttcccgttcggtccacctagggcgcagggcactgcgcacagaaccccaggacggtgtatattcccgtgaggtaggctggatctctacgggtgattccgacttttccactcaagaaaagctacgagacttcatgtggcactacagcactgaaatagctctaacatcaattttcgtgcttccgcaccacggttcgcgtatgagctacgacccgaacttggatctcttacgagaactgtccgccaacctttgcgaaaggccgttattcatcgcaccggcaaatccggaaaacaagacatatcaccatccccattggccggtagaatccacttgccggaaggccggtgacttctatatcgtcgatcagagcctcgcttcattctatgcagaatccgtaaaaacagtatgtagcctaccaatgattttcatttttgattag

SEQ ID NO: 145890 - DNA, 1866 bp, Enterobacter cloacae
atgatccgcgtaagaagagacgactgggtacctcagggggtcggtggtctggaaggcagagcgtgggaggctttacgtgaaaccgatagtagcatcctcgtgacagctggtgccggtgcgggaaaaactgagtttctggcacagaaggcgacctatcttctgcagacaagcatttgtccggcccccaaacgaattctggccatcagctttaaaaaagatgctgcccgaaacctcgctgaaagggtggcaaagcgttgcccgagagatcaggcgctgcgctttgattcaatgacttttgatgccttcaccaagggacttctggaccggttccgtcctgctttacctgagccgttcaatgcgcctggcacgtatcagatcgttacgccatttcgtcgggattatgaggattttcttgaacgtcacggctatcacggtgtaagtgttcaacagcttgagggaagactgcttctgacagacctgccaattgacttgtcaaatggatctgaagtacatcgtgcgttagcagattactggcatgaacaattcatcggaggtgacgagatctctctgtccttcccgatgataaataggcttgtaaaactgctgctgcaggaaaatgcatatatccgtcgggccttgcaggcaacgtatcccattgtctttcttgatgaataccaggataccacctatgcccagtacgacttgttgcaaacggcattcgatggtagcgatgctgtctttacggcagtcggcgatgataagcagcgtatcatgggatgggcgggagccatgactgacgccttcgaccagtttgagaacgactttggtgcgaggcgtatcacattgctttcaaactggcggtcacatgcggatctggttctaattcagcacgagattgctcgccggatagacaacaatgtggaagctgtgcaggcacaagggacccgtgaaattgaaggtgaggtttctgctatttggcaatttcggaacgcaaatgacgagaacaattatctggctgaatgggtgaggcgtgaggttcagtcagggcgtgttgcgccacatgatgtaggaattctgatcagaatgcgggcagatcaggtggagggtgagatagcccctgcttttgcggcacgaggtctcaggatcagaaatgcggcccggtcagtcggtgaaattcaaatacaggatctacttggtgaagaactgaccagcatattcgtccctttgctccgcctgggagcgacgaaccgaagcccggaaagctgggagctggcccagcagaactatctgtttctgaaggctgctgatccggataacgatctcacgcaggaacggttacaggttaagcttgaagcattcgtccgccaattaagaggagagttggcgcgtcgccagcctgatccggatgcagcggaagagattgcagagatgcttcttgaatttgtcgggacccctgcacttcggcaatcttttcccgcttatcagcgggaaagggactttgagagggtatggagtggatttgtcacactcctgaaagagtgcgcagaacatagcagcagctggatggaggcgctggatgagtttgaaggtattggccaagtggctctgatgaccgtccataagagcaaaggtcttgagttccacacgatgatattttatgggctcgacaatcagacctggtggagccttacgccacaacgcggtgaagagctaaacactttctttgttgcctttaccagagcaaagcaacgtgcgtttttctcccagtgcgttgaccgagggcatgctattggctggatacagcaattattggctccggcgggggtcgatactatagatggtgcgaccatattgggtgaaaactga

SEQ ID NO: 145891 - DNA, 1962 bp, Enterobacter cloacae
atgaaaatagagaagataaaactacagaatttccgttgtttcgggcatgaggtggtcgagataaatttcgaggaagaactgacgatacttgtcggcggaaacggttccggaaagacggcagtgctgcaagctgtgtcccggttgtttggtacatcaccaacgcagcggtcggtacagcgtcgggattttcacatacctattgaccggcaggaactgcagtctggcgacagtctgtttgtcgaagcgttacttgccttccctgaactggaagagcaagacatggctcctcttgatgctgttccggagttcttcaatcagatggctgcttccggtgagggagagccccttaaggcccggatacgactacaagcaacatggacggatgacggtacgccggaaggggcaattgaagaggatatacgctggataagagccctggatgataattttgaatgggatgattgctccagggttcaggctgtagagcgctcttcgatccagtttatttacttaccggcaaatcgtgatgcaacgactcaggtgacctttcttctaaaagggcggttatggcaggctgccaaatggtcgacggcatttagggatgcaagctctgatagtgccggtcagatccagagcagtttcgaggaagaggagccgtcgaagtttctgctgcagcgtctttcgaagcgttggcaacaggtctatgaagctgatacagacagtgagccacgcttaaggctcatcgaaaaccgttttgaggagcttgttcgaaaagccgaatttacctttacgcctgatgaagaaggtcaggagcgccgtttgtccgagttgagtgatggtcagcgttctctgtttcatatagcccttacagcggcaacgctagaaagtgagcgtgaagctttttctttgcctgctgatgacagctcatttgaacaggataagttacgccgtattcacctgacgattcttgccatcgaagagccagaaaacaacctgtcaccgttctttttgtctcgcatcatcaaacaggcgagagagatcggtgcactgccttctgcgcaggttctgctatccagccattccccggctatcctgagccggatagagccggaggaagtgagatattttcgtatggaccggagagcccggtgctcatcgatccgagaactgaccttgcctgaagatgatgttgaggccagcgtgtatgtcaggctgggcgtaaaggcataccccgaactttatttcgcgcgatttgtaatcctgggggaaggggattcagagcgcgtcgtcattccgaaaatagcggaagatatgggggtgccacttgacccgtcatttgttcctgtcgtcccactaggaggacggttcgtagcacatttctggcggctacttagtgatcttgagattccatatgccacactgctcgatctagatttggggcgtagacatggtggggcgaacaccatgaggagctgccttcagaatctggcccatattgggaataattttggggagcgcaatcttgttagtgctgctcaggttactgaccaacagctttatggtgaaggccagcaaggtcaatggcttcaagctttcagggaggaaggtgttttcttttcctatcctattgatctcgattttgccatgttgcttgcgtttccagacgcttatcaggttgccaatccaggtggccgtgggcctcagagtgatgctaacgctattcaagccaaaaaggtcagcacacttaaaacaggtggtaccccagccttgtataccgagctctatgatgatgcttttaaatggtatccgtatttgttcttgagccgcagtaagccagagacccatctggctgcgttttcccgtatccctgatggcgatgtttctgcgtcagttcctgctgagcttagggcccttattgagtacgtaatgcataaactaaatctgccaggagtcggggaatga

SEQ ID NO: 145892 - DNA, 291 bp, Enterobacter cloacae
atgattgccttgaagaccttctctggtggctctagctatattctgccatcccgttacgactcagatttgcccatgaacagcgccaccctgaatcgggtgatgactatgaactacatattggcccagaaggaaagcaagccgctcgccaagtttgggccccacgacttgagacgcacggctagcactctgctacatgaagctggctacaacactgactggattgagaaatgccttgttcatgagcagaggtgcgtgatagcggtaaataacaaagtggagtatcgtgattag

SEQ ID NO: 145893 - DNA, 210 bp, Enterobacter cloacae
atgaagccaagcggatggtggccgacgattaaggagaaggcccgtaaaaaggctcgggtaaaagatgctgtaacatctggtgcttgggcggaaaagtggctgcgaggttaccagatggcggactccacccgtgatatgcgtcgctcagtctatgttcgggagctggaaacgaaatttggcaaccagaagttgaccaagatctcccattaa

SEQ ID NO: 145894 - DNA, 240 bp, Enterobacter cloacae
gtgcttaccgataccaaactgaaaaacctgaagccgcaggagaaactgtacaaggtttccgaccgtgacgggctgtatgtcgccgtgctcacgtcaggctctgtctcgttccgttacaactactcgatcaatggcaggcaagagacgatcagctttggccgctacggtgttggtggtatcagtttggctgaagcccgcgagcgactgaatgaagccaagcggatggtggccgacgattaa

SEQ ID NO: 145895 - DNA, 1341 bp, Enterobacter cloacae
atgagcacgctccagaaccggctgatttcccatggctggacgacctcacgcgtgctggctcccgctcaggatataaaaagcggccatttaaaactggctgtgataccaggaaaaattcgtcacgtcaccttaaccggtgagagcagtccctggatttggctatacagcgccttcccggcgcacgacggcgatctgctcgatttgcgagacatcgaacaagggcttgagaacctccagcgtttgcccaccgtgcaggtgggaatggagatagtccctgctgagcagcccggtgaaagcgatattgtcatttcccgccagcagagcaaattctggcggcttggcctgtcgcttgacgacgccggctcgtcatcaaccggccgctatcagggagggctgactctctcgctggataacccgctggcgatgagcgatctcttctggttttccattaaccatgacctgcaaaccgggccggagaggggcaaccagaacctcagtgcccactggtccgttccggtaggctggtggggattttccataacgggtagcgactaccactatcatcagacggtcgccgggttaagcgatgattaccgctacagtgggaagagccaaagcgtggttgcccagctcagccgggtactacaccgcagcagcgcgcaaaagacctcattcacgtgggacgttgagagtcgcacaacgcgaaattacatcagtgacaccgaaattgaggtccagcgtcggcacgtttcctcctggaaagcggggctttcgcaccgtcactatatcggcccggccacgctggacgcaggaataagctatcagcgtggcacccgttggtttggcgcacagcctgcgccagaagaagttttcgatgaagccacggcgctgagccgcattcttcgcacggatgctcgcctgagcctgccatttgagctgctcgaccagcatttccgctacgactttgcctggcagcggcagaccagtaacaccccgcttacctcgcaggatcaattctccattggtgggcgctggaccgtgcgcggctttgatggtgaacgcaccctgaatgccgatcgcggctggctggtacgtaacgatctctcctggcagacccctctcccgggcaccgaattttatctggcagccgactacggcgaagtggcgggcaacggcacggaatacctgacgggaaatcacctggccggcggcgcagccgggcttcgcggcacgctctggaaagtgggcttcgacgtgtttgccggggtgcctttctcccgacctgagggtttcaaaaccagcccggccacgttcggcttcaacctgaatatggatctctga

SEQ ID NO: 145896 - DNA, 513 bp, Enterobacter cloacae
atgcgttatggcgaatacacggtccattgcccgtccgtgctcggcaacacgcttaacgaagcggaggcgctgggcgcatcggtctggctctggatgcactccttaaaccaccgggatgcgccgttgcacgtgctgcccgttgttcttctgcccgcgatcaaacgccagcagtacgtgctggtggaaaaggaaggtcgcccgatcttttttctgagctgggcgtggatgaatgaagaggctgaacaccgctacctcaacgaggccgcaattttcctgccagaggaagactggtgctgtggcgatcgtctgtggtttcgcgattttatcgccccctttggtcacgcgcgggacatgttccgcctgttacgcgatgagattttcccgcatcacatggcccgttctctctggcatcgcggtgaagaaaaaggacgacgtatcaaaacgttttacggccaacgagtcacgcgcgacgcgttgcagcactggaaaaagacgcacccgctgaacggataa

SEQ ID NO: 145897 - DNA, 2202 bp, Enterobacter cloacae
atgaacaaacgtctttaccgcatcgtctttaacaaagcgcgcggcatgctgatggtggtatcggagctggctcggggctgttctggtcgcgcgccctcttccggtatccgacataaccactctcagattatttgccgcctcggggcgataagcctcagcctgtggctggcaagtggagcgttaacggtacaggccgcaggaatcgtagcggataaatcagcacccaataagcagcagccaaccattatcagtaccgccaacggtacgccgcaggtgaatatccagacaccatcagcgggcggcgtttcccgcaatacttacagccagttcgatgtcgggcagaacggagtcattcttaataactctcataaaaacacggccacccagcttggtggaatggtggcagccaacccatggctggcaaaaggtgaagcgaaaataatcctcaacgaggttaacgcccgcgatccgagccgccttaacggctttatcgaagtggcgggacaaaaagcggacgtcgttattgccggtccctcaggcattacctgcgacggctgcggatttatcaacgccggacgagccacgctcaccacgggtacggcgcaaatgcagaacggccagataacgggctaccaggtcgaacagggtgaaatccacattaacggcaacggtctggattcaaccggccagaatcacaccgatgttattggccgcgcggtgaaggtaaatgcggccattcatgcacaggatttacacgtcacaaccgggcgcaacagcgtggatgccgctcacgagcaggtaaccgcgctcgcggataacggcacgccaaaacccagtctggcgctggatgtcgcgcaggttggcggcatgtatgctggcaaaattcgccttcgcgggacggaaaaaggcgtcggagtgcggaatgcgggcaacattggcgcagaagccggaatgatcaccctctcagccgatggtcatattgaaaacagcggtgcaatctggtcctcggctgacgttgccctctcgggcactgctgccgtacagaacagcggttccatcgcggcccagcgtaacgtcagcctgacgggcaacacgattgccagtatcggcacgctggccgcaggcgtgcagccagacggcacgttaggcagcgacggcgatatgacgctcaacgccagcggaaaacttgagctgcatggactgagtgcggcgggcggtaacgtaaacgcctccggacagggcctcgatgctaccggcagcctgacgcaggcaaaaaacattacgctcaatgccggaccaggcgatatcagtaccgccagagcgcaggtcatcgcgaatgaccaactccgcatcacgacatccggcacccatgataacagcagcggcctgcttgcagccgacaccgtcacgctcgccgcgaaaaagctgcaaaaccaaaaaggccagataagccagagcggaacgaagacgcttgaactcagccatcgggacggtatagataaccgcgacggtaccattgccgccaacgccgctataaccgttaaggccgccactctggataaccgtaagggccagatcctggcagcagacgcgggtagcctgtcggttcagaccacagctgtggcagataaccgtggaggtatactggctgctgcagaaaacgttgacgtaactgcagaccagttgctcaacgacggtggacttatcagcgcggataaaggccatgtctcgctcgccagcataaagccaataaccaacgtcagcggacaaatcgtggcccgtaccacgctgtccctcgaaagcgatacgttgaataacgatagcggccttatccagtccggttcgacaatgcgcatcaatacaaatggcaatacgatttcaaacaaggacaccctcactaccggtggaatcgtcagctttggcgagctggatgtcctcgccagcgccatagataaccagcacggtatgctggcctctgaagccaccctgcatctgaatgcgctctccgttgacaaccggttcggtactgtgagcgcaggcgaaagcatgacgctggacttaactgacgtgctgaataaccgcaacggtacggtcagcgcggcggggtcgctcactgcccttgccggggcgcttgagaatacgcagggaacactggtctcgggtgacgacgcgcgtatagaaagcgcgcaaatcattaactag

SEQ ID NO: 145898 - DNA, 6282 bp, Enterobacter cloacae
gtgcagagcggcggcaatcttaccctgaatgtcgaccgcatcagcaaccgcgaaagcggcgacgctggcgggatcgttagccaggggaacataacgatcctggcggccgatgtgcaaaacgatgcgggtgtcgtgctggcgacaaaacaagcgacattagacaccatccgcttcagcaatatcgctggcacgctggtggcgctggatgtgctaacgctcgcaacgcgcagcgataccgataaccatcagggagtgatgcagggcaaaggcattttcctggatacacacggatatcagctggataaccagcaaggaacgctctacagcctggcgtcaatgcagctggcgaccgccagcctgaataaccagaatggcacgatcggagcaaagagtgatatcacgctgcacgcctcgtcgctggataaccgcgcaggcgggcgcgtagtcagcgagcaggcgatggcgttaaatctcgaacgtcttgataaccacgagggagaaatacaatctctcggcaacctggtggttaacgccgtttcgggggtcatcgacaatacgcttgggttaatgcgcagcggcgcaacggtaacgctcaacgctgccagcttgatcaaccagaacactcaggccgccgggaaagggattgaggggctggatgtggccatcgccagccagcagcttgataacgcgcagggaacggtgatttcaggcgatacgctgcagatcgctcgcgtcgaaacccttaataacgctcagggcgaactgtccgccgcgggcacgctgtcgctaagcggcgcggctctgcgcctcatcaacactgacggtgtcgtgattggcggcgaaagcgtcacgctggaaaccaactccctgaccggcgatggccaaatcctgtcgctcggcgacatgatggttcgcacccagcagaattttgataactcgggagatgtcatcgctaacggcaatatgacctttaccacgccgggtagcgtgacaaacagcggtaacctgctggcaggggcaaaacttgacctcagcgctgccagcctgctcaataccgcgtccggtgagattgccgccggagcgacctgggtgactgtctcctcatccctcagtaattacggtcttatcgacggcagccagacgtggctcaaagcggacacgctgaccaacgtcggaacggggcggctttatggcgaccatctctcacttcaggcgacaacgctcaataacctcgcacaggacggtacggcggcaactctcgccggacgcctgcgcgtggacatcggagcgaagacgatcaacaaccgtgaccacgcgctgatttacagcgacggcgtgctcgccatcggtggacgagtggatgaaaacggctttgcgaccggacaggcgcaaacgctgaacaaccacagtgcgaccattgagtccgcaggtgacatggcgctctccgtcagccagcttaataacatcaacgaccatttcagcaccgaggtggcgttgatctccaccgagcagatccacgagtaccagcacaagggttcgcccactcgctggagcgctgatgaggaaggcgtgtttgtcgacaacaactcggccgacgacctgttgaacctcaacacgccggaagacacaggcgccaacaacgacaacttttacgagtacaactacacccgcaccatcgaagaggaggtcatcgcagagagcgagccgggcaagatcctctccggcgggcaaatggtcatcagcgcgaaccatgttctgaacgataaaagccagattgtcgcggggggtacgctaggtattttcgccgatacggtggataacgtcatgccggagggcagccggtggataacggatgcaggttccgtcacccattacagccgtaaaaccaaaaaaggcggcgactctcagggaaaaagtacctcggactatttgccccccgtggtgattcagtcgatcaccctgtcgccggggaaaatggaaggatacagccagtccgagggcagcggcatgaccctttcgcctaccaccgcacacgggacagatgccacgctcaatgggacgggcagcctgacagtcgacgtgaacgcggcgtcaccggaacaggaaaaactcgccccggtgttaccagccagtaatacggcaggaaaatggatcgaaacccctgccagtggcgcagcgggcgacgtgatccgcgcaatcgccccggacatccgcctgccggacaacagcctgtttaacacgctgccagcccccgatgctcattacctgatcgagaccgacccacgcttcacgaacaataaagagtggttgggcagcgactacatgcaggacgcgttcgcgctggaccatggcaatatgcacaagcgtcttggcgacggctattacgagcagcggctggtgcgcgagcaggtcatcgcgcttactggcggccgttacctgggcgatcaccgtgacgacgaaacgcagttcaaagcgctgatggatgccggtattgccttcggtaaggcgcatcagcttgttccgggggtggcgctcactgccgagcagatgagtctgctgacggaagatatggtttggctggtcaacacccgcgtccagcttgcggacggaagctggcagacggtgatggtgccgcaggtttatgttcgcgtacagccgggtgacgttgacggcgctggcgcgctgatgggtgggcagaacctggtgatgaacctgaaccgcgatctggtcaatagcggtacgctccacggtaaggagagggttcagcttagcgcagactccctcaccaaccgcgcgggaaccattcagggtgcggatgtcagcctgctggcccgcacggacattaacaacatcggtggcactatctcaggtaaccattccgtcctggcaacggccgggcgggatatcaacctcaccacaacgacccgcagcgttgagcgcaccgtcgggaaaaacagctttgaacgtaccacccttgagcgtgttgcgggcatctacgttcagggtgacgacgggaagcttgtgctgagcgccgggcgcgatctcaacctgaccggagcgcaggtcgttaacagtggtagcgaaagccagacggtacttaacgcaggacgtgacctgaacctcaccactgtgaccacctccgccagcgataacctgacctgggataaaaataactggctgaagcagtccaccacgcagcaggtgggtagcgaggtggctggcgggggcgatgtcctgatgatggccgggcgcgacgttaacgctcaggccgcgaccgtcgaagcggatagcagtcttgccgtcaccgcaggtcgcgacatgtccatcaccgccgccatcgacagcagcgaatttgaatcacaccatcaatccaccggcagcagcggcgcgttctcgaaaaaaaccgtgaccacgcacgatgtggtaaatagcgagacggcgcagggttccctgttcagcggcaacagcgtcaccctgcaggcgggacatgatttacgggttcagggtagcgatattgtcggagataacgatgtccggctcgccgccggaaacaacctgaccgtcacctctgcagaagagcacggccaggagagccatcagcgacaggagaaaaaatccggcctctccggcacgggcggcatcggtatcagctacggcagccagagcctgaaggtaacggataatgcgcaggaggtaacccatcgcggcagcaccatcggttccataaacggcaatgtctcgctcagcgcaggccatgatctgacggtacacggctctgacctgatagccggacagaacatgacgcttgccggaaaaaatgtcagcatcaccgcggctatggacaacagcacacagacccaaaccgtggagcagaagtcctccggcctgacgctcgccctgtccggtaccgcgggcagcgcgcttaacaccagcgtgagcaccctaaagcaggccagggagaccgataacgatcgtctggccgcactgcaggcggtaaaaggtgcgctgaccgcgggacagggggcgcaggcggtctttgccgaccaggccaccggcaaccaggcgggcaatgacaacacggtcggtatcagcctctcttacggcagccagtcctcaacatcgacgcagaccatgaaggagacgacggcgaaaggcagcagcctcttcgccggaaataatctctcgctggtagcgacggacggggatgtgctggtgcagggcagccagcttgaggccggaaacgacctgctgcttcaggccagccgcgacgtgaacctcatatcagctcaaaacacctcaacgcttgaaggcaaaaatgaaagccacggcagcagcgcgggcatcgggattggctttggctccggtggcgcgggcatcaacgtttccgccagcgtgaatgccgggaaaggtaaggagaacggcaccaccctcacccacaccgaaaccacggttaacgcgggggatacgctcacgatcgtcagcggccgcgatacgaatctcaccggggcgcaggtcagcggggagagcgtgctggccgatatcgggcgtcacctgaccattaccagcgaacaggacaccgaccactacgacagcagccagaagaacatcagcgcaggcggcagcttcagcttcggcaccatgaccggctcgggcggcatcagctacagccgcgacaaaatggacagcgattttgcctccgtgcgggagcagagcgggatagtcgcaggctccggcgggtttgacgtcacggtgggcggccacacgcagctggacggcggggtgatggcctccaccgccacggcggataaaaaccgcctcgacaccggcacgctcggctggcgggatattcataacacagccgaatacaacgtggagcaccagagcgcgggcatcagcaccggcggcagtatcgcaggacagttcgccgggaatatggcaaacggcatgctgagcggggcaggcagcagcggcagcgcggagggcaccacgcgtgctgcggttgaaaatggcacggtgattgtccgtgataaagcgaatcagacgcaggacactgccgccctctcccgcgacacggcgaatgcaaacggcagcatcgacgctatcttcgataaggagaaagagcagcgcaggctcgacgaagcgcagcttatcagcgacatcgggagccaggtgtctgatatcgcccggacgcagggcgaactgaatggggacgcgcagtccggcaccggaagcgacatccagcgggccatccaggccgccaccgctgctgcacaggggattgccgggggcaatatcagcgccgcgctggccggagcggccgcaccgtacgtggcggagattatcggtcaccggtccggactggacgacggtatggaaaaagccgctgcccacgcggtggccaatgctgtactggcagcagtgcaggggaaagacgcgcttgcgggtgccgcgggtgccgccgccggagagctggcgggcacgctcgcgctggagatgtacgggaaggatgttgttgcgctgagtgaaagtgaaaagcagaccatcagcgctctggcgaccctcgccgcaggcatcgcgggcgggctgatgggtgacagcacggcatctgcggtggcaggggcgcagaccgggaagacgacggtggagaataacacgctggcacatgtgcttgctgcggcagaggcgaataaagcaggtacaatagaacagtggcaaaaagagaagcaggctgaaatcgaaaaagcctgtagtggtggaacaccagtgtcatgtgaaagcgcgatggctgcaatgggaagcgctatggtgtggccgttgttacctgaagctatggcgataaccagtcttgttggtgcaggtgcgaatgcggggattggattgcttatgaacggagaagtaaatccaaatgatcttattctggcttactggactggtgcatttactgcaggaactggactctggggtacgatggccgtaaatgctggcagcggtgctacatcaaattatcttaaaggcgacgacccattgaaaggtggtgtaatcagcggggtggcttcgggtattggatatggaattggcagtaaattagttgagttgcctttagataaagttttaaatccaatgaaaccttggaaagactggatatggactgatatagaaatggggatatcgaagcctttaccagttaatccagcacctggtattgctggaaacataaccagctctgtaacaaccgaatttggaaatgatcaggcaggaaaagaactgggcggtgggaaatga

SEQ ID NO: 145899 - DNA, 258 bp, Enterobacter cloacae
atgaaaatcttagtctcaaaatggtttttaatcttcatttacctgctaatagcctttccggttggtatatttattgctgctgtaactatgcagattttaatcagagttttttactttttccttgatggattatctttgaatttgtcctctattgattacgtgaaaatttttaaaggaagtatcgcgggaggagttattggagcaataggctattggtggatctactaccagcactaccgaaaaaaccgaagcagataa

SEQ ID NO: 145900 - DNA, 645 bp, Enterobacter cloacae
gtgctgaccgcgcatgccgggaagaatgcggttgagaataacctgatgggtagtgcccggaaaggtaaggagaacggcaccaccctcacccatagcgaaacctcggttagcgcgggggatgcgctcatgattatcagcggccgcgatacgaatctcaccggagcggaggtcagcggggagagcgtgctggccgacatcgggcgtaacctgaccattaccagcgaacaggacaccgaccgctacgacagcagccagaagaacgtcagcgcaggcggcagcttcagctttggcaccatgaccggctcgggcggcatcagctacagccgcgacaaaatggacagcgattttgcctccgtgcgggagcagagcgggatagtcgcaggctccggcgggtttgacgtcacggtgggcggccacacgcagctggatggcggggtgatggcctccaccgtcacggcggataaaaaccgcctcgacaccggcacgctcggctggcgggatattcataacacagccgaatacaacgtggagcaccagagcgcgggcatcagcaccggcggcagtatcgcaggacagttcgccgggaatatggcaaacggcatgctgagcggggcagacagcagcggcagcgtgtggagggattag

SEQ ID NO: 145901 - DNA, 264 bp, Enterobacter cloacae
atgcttggtataaatggcccaacagctccaagtaagacattgtggatgggaaaaggaaaagagagaattgatgttgagaaccctgcaccaggaaagagagcggggaaaatacattaccaggataatattaataataagtactattatgatcctataacgcaaactttccctgacactcctaaaagagtgaatgataagttgaaagattcggccttcaaaaatgctatagataaaggcatgagtaaatatccaagggagaagtaa

SEQ ID NO: 145902 - DNA, 471 bp, Enterobacter cloacae
atgttggctaactatttaatgattcctcagctagaatccatttattggaaggatatagagagcatcactctccctcatgaactgaacgaagttgttggacagggttttgttgagttatttgattgttttttatcaaaaaagcttctcggttattgcggagcaattaagcctgacttttttgaagatggaatcgccttggagtgttttgtaaattctatccatgtagaagattacgtaagtgaaaaatactttgagtactctattgttttttgtaattcaataattaagaaatggaatgaaagtcattctggatttttaaacgtcattatttcgctagatgatgaaacactactaccaactataaagtttcacttaaaaagaaagggagtctcgtggttgaatgaagataatcttgactcaagtattcaggctgtcttagtaactacagatgagattaatacgagtaaataa

SEQ ID NO: 145903 - DNA, 372 bp, Enterobacter cloacae
gtgtatcggttccgaacgggcggcattagctacagccgcgacaaaatggacagcaattttgcctccgtgcgggagcagagcgggatattcgcaggctccggcgggtttgacgtcacggtgggcggccacacgcagctggacggcggcgcgatggcctctgcggcgacggcggataaaaaccgcctcgacaccggtacgctcggctggcgggatattcataacacagccgaatacagcgtggagcaccatagcgcgggcatcagcaccggcggcagtgcaggggaaagacgcgcttgcgggtgccgcgggtgccgccgccggagagctggcgggcacgctcgcgctggagatgtacgcatgggggcagtgtga

SEQ ID NO: 145904 - DNA, 927 bp, Enterobacter cloacae
atgagtgctgacaagaacgaaacggttaacgacggagaagagaacgtcacctataccctgcggaacattcccgctgacatcgatcgggtgatctccgacctggcaaatcacgcccgtaagccaaaggcgacgtttctgcgtgagttcctggaagacagcttccgcgacgttatcgacagtttcgccctgaagaacccgctcatcacctctctcgatgacgagctggccagttatctgggcgccgaagtcatggagaaacgctaccagagccattacatcacccgctggaaccaggaataccagaagctgctcgggatctcgacggaagaggagcttcgccgggtggtgctgaacaacacgcccttcctgcacgcccgtgccgaccaggtgctgaagggctggaaaaaaatcccgcgcgggatctccctgaccttttccctgtttgccgagatcgccggccgggacaaagaaaccatcgacctggcctggaacaggattttctactcgcagctgacggaaaaaagacaccgcttttaccaggatatcgaggccatccgcgccctgaaaaaacttccggcactttcccgctacagctggacgcagaatggcatcacggtgcgtatctaccgcccggaagactacgacgtcggcgtatggcgcgtggcgctgagcctcccggaaaactacgccacccagatgtggaacatcccgttcccggcgcttgaaaaccgcctatttaccgccgacccgggctacagcgccctgctcagcgccgaacccgacaggtgggaccaggccttccgtttcgtggacgggatgtgtgagctgcacctttacaccaacggcgtggatgaacttgagaatcccacctcgcttgaggacgtcgcccgggcgctgatcaacgtggtggaagtcagcctgctgtaa

SEQ ID NO: 145905 - DNA, 255 bp, Enterobacter cloacae
atgaaaggacgacagagccgctacgttaccggcggagagagtttcgcggagatcgcccgtcgcccgggagggacggtggtgatgctctgcctgaacaccgggcttgaagaggcgctgcgggaggcatccaaatccctcaagtcggccttcagccggagcggccgtaaatgccggctgtcagccggaacggcggaaggaccgttttccggtcgcaggcggggcaccgccacccatctgttcgtggcggtactctga

SEQ ID NO: 145906 - DNA, 345 bp, Enterobacter cloacae
atggatttactgaaagacaccgagggaacggttttattcccattccagactgaaatcgattttttctggagaattttcaccaccggcaaagacctttccgtcagtgcctgggggcacatcggacagaagcaatactggagcgcgagtctctgtattttgcttcttgtggcttacgtgggactttctgctgctgtggtctgggttgtaatgccctggctaaaggccttttttgtgtcgaaattcgcactttcggcactatgggtctcgccagcaaaaggggctcttatctggggtatcggtaagatggctgccaccatccgccgaaaaataacgccaggcaactaa

SEQ ID NO: 145907 - DNA, 756 bp, Enterobacter cloacae
atgaacccctctttgttaaccttcttcacaaaacaccagtgcccggcctggagctgcccctcctgtcattcggcttcgctggccatcatgccggatacctttcattcagatgcagttccggaaacggtggcgcgatttcaggaacctgatggctgccttgaagacatccgtctggtgttctcctgtctgctgaaatgtgaacgtgcccgctgtggggcggtggtggctgtcagcggtacgggggaagttcagccggcgcatgatgaggatgaggaggaggacggaaatccgtatttcagcctctttcaggccagaaactttatacctgcgcttcctgtttttgatattccggagcagtgtccgcgtaatgtcgctgagcctctgaaggagtcatttgcactgttcccgggtgcccccggggcggcggcgaatacaatacgaattgcgctggagcagatgatggatgccctcggcgtgcaggcaatgcgctcccttcatcatcgcattgaggcgctgccggcagcgtacgcagagcacagggaggcccttatggcgataaagtttctgggtaatgccggcagtcatgagcttgatcgcgtgacgacgctggacatagaacatgcctttttcatcaccgagtttgtgcttcgaaaaatttatgcaggatcgactcagtcggtacgccagctggttaaccggctgacagcccagtttggtccggaacctggaccgaatattgagccaggtaacggttga

SEQ ID NO: 145908 - DNA, 1218 bp, Enterobacter cloacae
atgactcaggcgcgccgaccatcgccgctgcagcggcgggtgctgattgtactggccgccctcgaggcgcgccatcccggaacacccgtgcctacccgcctcattgaacgtctgctgaccgacggggggcatggtccggtatacgggccgaacctccgtgcctcctgccggcgcatggaagccgcgggctggctgcgtaccctgcgtgcgcaaaacctgcagctggctgtagaactgacggatgccggccggaagctggccactcccatccttgccgaagaacaggccagccagctggccgaacagcgtgccacggaagtccgggttctgcccctggtcccgcccggccaggccggggaggctgacgaccggccggtggcgctggacgatcgctggcatctggcgtgccggggtgattacgttatccgccttgacggcaccacctgcctgcagctgtggagcgcggccgggcaggtgacgcgcctgccgggcgatcccctgcagatcgccacctggctgcaggcctgccatgaggcggggattgcggtccggatgcagatcaatgagagcgacgcgccgggggaaggctcgctgaacggtaccgcgccggcggaccggaccgacacctggtactcccagctggacgccgcgctgcaggcgaaggggatcaccggcctgaatgaggagatcaggcaagccgttatcacgcccgacgaggcgctccgcgacctgccagcgccagagcgcctgctgcacgttctgtgcgacagcccggaggcgttcccgctcaaggcagccggctatgaggatgacacgcaggccgcgctggccgaccttctggcgcgcgcggggttcacgggcgaccaggcgcaggagctgcagtggcaccgcatccgctggccgctgatgggtcaggaagaagctgaccggcgcgaactgaacagcctgctggacgaactggaacggcgacaactgtactgcaaccgtgaacagctgacggagattgtgttttcgccggtccgcaaacccggcgagcactggactgatcgtctgcagtggctcctgatgacggacggattcgggttctggagtccgctgtcccgtgaagcgggctcccgggcgctggagatcctggccggttatacggggcgggaggtggcggggcatctggccagggtgattgtctggaacgacgacagagcggggacgccgtcatga

SEQ ID NO: 145909 - DNA, 390 bp, Enterobacter cloacae
atgagcacaggcaacgtccatctcatcgtcacctgcacgcggcgcaaaactgtgtccgccggtgaaaccgtctttccggatgagcacgatgccggaagggcttacgggatctggatggaaaggctggcgcaggcccgtcgcggatcgccccccatgaccgccggggagctgtatacgggccagcactggagcagagctgttgcagctgcggcgcgtaacggtgctgagatgtgggtgatttctgccgggctggggctactgcacgtatcagacactgttgtcccgtacgaggccacattcacctcgatgccgttctgtcacagcagactgtggggtcgtctcagaaaacggaatctatggtcactcccgtttttgcaacaccgattttga

SEQ ID NO: 145910 - DNA, 294 bp, Enterobacter cloacae
atgtttagcattatcgcagaactactatctaagggaatggacttctttctaaagagacagactatagctaaagatgtacatactactaatgccgaagggcagattgaagtaaacaaggaagagattgaaaaagtatcgtttcactggcgtaatgcccttggattcgtgatcaccctaatcatcctctacaactggattatcgtaccagtactagatgcgtttggtatcgtcgtgatccaagtgccactaggtcaacttatgcaagtcttgcttatcatggttggtggttcgtaa

SEQ ID NO: 145911 - DNA, 321 bp, Enterobacter cloacae
atgaactacttagaacaattcccatgttatgactataaagtactagatagctttgctttccaaagcattcaaccagtgagtgttaccctaccatatgataaagcactatcaggtaagatgattaagaaacaagttgataaggccaaaggtgatttgattgcattcagttttgaattaactaaaacaccaaatgttaatgatggtgatgtactaactgtagatctaattgatggtcaaagtaccgttacagtactggcatcattccagcaggtatataaaggacaccgcgtaatgtcgtacatatgccaaaaggaactataa

SEQ ID NO: 145912 - DNA, 597 bp, Enterobacter cloacae
atgggatggaagaggggcaatagccctagtgatatgaagaaattcataaatgacaattcaccaaagattggtgatcagtttaagaaagaacttagtgaacgtatgcgtacagtaactaaacaaattcaacaacagattaatgtagaatctaagggtggtgtagtagcttatacaaaccgtgcaatgaagtttaacttctataagccaaatggttttactagtattaatcagattatagttatgccagatcaggcagactacctaaagaacgttattgatcctaactatgcacgcaaacaagagtacaaagttatcccatatcaaaatgctagattaactaagcagggaaacatatcacaacttaagaacaaggataaatacaaacgagtgaaaagtaagaacggtaaagagtttcttattgacacttccaaaaactctagcaaacgcgatccagcaatggcacgtaagaaaagggtagttgggtactatggaagcgtaggaagaaaaccattgtttgatttctatgatgaagcagaaaaaaaagtaataaaacaactacgaacattacgcggtacgttcaactaccgctggagataa

SEQ ID NO: 145913 - DNA, 894 bp, Enterobacter cloacae
atgtcgaagaagctaacaaaagaagaagtaataaaaagaattaatgaagtacatccaaatagatttacgtatgataatttcgtctatagcggaagtgatgttagtagcataattacatgcgtgaaacatggtgatattgaagtaattccacgaaatttattcaacgggcaaaactgctcatgttgtagtactgaacttactagagaaagattatcacgtactaaatcagactttatagctatggctaaaaaagtgcatggtgatagatataactatgataatggtgtgtatattaataatgtaacttctatgcacaatatcacctgcaatcgttgtggtaagtctgatattaagataacgccaaacaaccacttgaaaggtcatcatcatcagggatgcaaagctaaaaagaatgaaaaggcaaaaatactaagagattttaaaaaggaagcacgtaaaatgtcaaaggaatggcaatatactccagattggagtgaagaagaaatgatgaatggtagctattgtggatatgtttacctatttcagtttgaagatggtacatcatatgtaggaagtaaacagatttataaaagagttaaggattacaaaaagattaaacccgattcagtagaaaacgggtggcgtgattactctagtagctcaaagatagttaatcaaaagattgcagatggtgaagagtacaccaaaactattttatggtgctttccaactatgaaagatacattgttagtggagactgcactaatagtaaatgaaggattaaagccaggaaacttaaatctttcaatcatgcataaagcaagacttccaacaggtgacgataagaaacgtctatttggagtactaaaagaattattatcatatttaaattga

SEQ ID NO: 145914 - DNA, 456 bp, Enterobacter cloacae
atggcagacattaaagagcgtttaagactgtatgaaggtacagcagattatcaacgtactaaggggtattaccgacaaggccgcttctatatgtataaagatacggaaggttactggactatcggttacggtcataaagtactacccaatgaaatggaaaagtacaaagatggtattagtgcaatagatgcagatctactattagcatgggatattgaccgtactaaaaaggatttagcaacactaggattagtactaccaaaggattgggaagatttcatgatcatcatgactttccaacttggtttaggtggcgtgaagaaattccgtaaaatgattgcagcacttaaagtacagaattggaaagaagcaatagtacaggctaaagatagtctatggtatcgtcaaacaccgaaccgacttaatgcaatgatacaagaattaaaaaacaagtaa

SEQ ID NO: 145915 - DNA, 282 bp, Enterobacter cloacae
atgggttttgatgtagtatttgcattactcttttctgctggtgcactcctatggacaatataccgtgataagtctggtgacacagatgatttaattgatagagtaacatctcttgaatcaactgtatctggtcatacttctgatattgcccgtttaaatgtggatcatgaagacctagaagcgactacgagagtaatccagaaccagatacaccaactggacttgaagattgaacgtattatcacaattctagaacaacaggaaaaagaaaaggggcgataa

SEQ ID NO: 145916 - DNA, 645 bp, Enterobacter cloacae
atggctattccaaacaatgtattaaacaatgccgtactggttaactactggaatttagtacgcggtgataacaaaacagtactcacagagaaagaactctatcagtgtggtgtaatggttaaaatggttgatttaattccacctactggttctgcattgtatctcgtagatgggctatcagaaaaaacagtaggtggtattacctatcaaccagtaccggactttattgattcaagttttgcaaactatgtcgaaaagaatgcagtaaacaataacggtactacttttaaagtcagtaacgtaaaccaagaatatctatctatggcattacgtggactttggaaagatgcaaaagtgaatatctggatgggtatcgttagtcctgctgatggttctatcttatatcgctatcgtatctttagtggttacattgattacttttcatcagactttaataatgaggatggaaatgcagaaagtactacaaccgtaaacttaaacagtctatggaagaaattagaccaaacacaacgcctactatccagtactagtattcaccaatccacacataagggtgataagttctttgacctaatcggcatcataaatagttcagaacaattctggaaagcgagtaagaaataa

SEQ ID NO: 145917 - DNA, 555 bp, Enterobacter cloacae
atgttagataacgcaacaataagtgaatttgtacttagtgataatgtaccaatattccaacaaaaaacatggacgggtgaacagattacacgcgtagtaggtactgaatactttagtatctcgttcaaagtcacgatgaataaacaatatagagcacaattagcaaacttctacgcacagtacgcacaaggtaaaccatttgatatgtctcttggttggtggggtaagtacaccggtaatcagaacgcaggtgtacaggcaaccgcagcacgtacagcaggagctacatctattgccgtaaactcaaatagtcttgaagtaggttcactaattcaattcaacggacataaaaagctataccgtgttattgcaaatagcggtactactatgactattttcccaggattaattaagaatatccaattgggtgaagtaatcaaatacgataacctttctggttctttcgtactgactacgcagaattcacagttttcattcccaagtactaacctaattgaagtaacaattcaggcaaccgaaaatatcaggggttaa

SEQ ID NO: 145918 - DNA, 2460 bp, Enterobacter cloacae
atggcaaataaaaaacaatcaatgatttttgaaatcacaggtgatgaatctggcttgaaacaatcattgaaaaacgcgggtaatagtttatccgatttcaataataaagcaggtggtgcatttggtaacgtagatggtttacttactactagtggtgcagctttcagtacttttgcaggtggtgtaggtattgcggcagccgctgcaatggtagctattagtaagatgcaagtacaagcagagaaagcttttgaagtattccaatctgcgagtcttgcacaaactggtgtggagaacttacagaagcaagctaatatgtttgccgaagtaggtttaactatggataccgtagcagaccaaataaaggatagtaaggataagttgggcgatgccttaactaaccaagctggttctatgtacactgatgtaattaaaccacttaaattaagcattcttgatcttcagaaagccgcagatagtggtgaagatattattgctaagatttactaccaagctaaacaaatgggctttagtaattctcaaatcattaacatgatggaaactattgcaaacgatgcggataaacgtattaccatttatcaaaagtataatagtgaacaagagtatcaaaacaaactagcagatgagagcgtacaactaactggtgaacagtctaaccagttccaacagtaccgccaagctacgctagaactaagtaaggcttgggaagcatggaataactctgctttagcaccagttgcggctaaccttgcagatattctaaacctaatgaccaagatccttaatagtaagcccgtagcagccgcagccgcagctacaagccgtgaaggtatcgcagcagtacaggaataccagaagggctatcagcaagatatgcttaagaactcttctatatatggtgctcaattagttgaagaacagcagaaggacgcagaacgcaaccagaaaacttttgataatatgttagcaaatctagataaggctaataacgttattcagaaacaacgtgaagagtacaataaaggattcgagaaaagtactatcgatgctgcaatgaagcccttccaaactgctaaatcacagactcaatctaaaattgatgatttagataaacagtacaaagatacacgtgctgcaattcaagaatcattactaaaaggctataagggtaatcaggatgctttgaataaagaccttgctactcttgatgctggttataaagaaacacgtgcagacctcgttaagaaactaacagagagtgatgataaagcacgtgatgcagcaagtaagaaagcagcagccgcagctactaaagccgcagcagaagaaaagcaacgtcttgccaaacaagtacaggctcagaaagtactagatcagactatggcagcaatgggtgctaatgccgcacaggtgaagttacaacaattcaatcttcaacaggatgaaattgaaaagcgtattcgtgattctgcaaaactcactaagaagagtgaagcagaaactaatgcaatgttgagtactcactatgccgatagagcacgtaattacaaagaaatggttgatcagatgttggcagagaatgaccgtttgaaacaagctcagaacatcgccgctatatcaaatgatccaaatgctacaccagaacaaaaggcagcagccgcagccgctggtaacaaatgggctagtaatactgctacacagggattaggttatcaagacccattcaatacacaggcagatccaactaagcttgcagctattggtacagaacagcagaacaaccaggacggggcaaaggctctttatgatgcaaaagtaattggattccaagaataccaagatcagcttacagctattcagactaatgcagatattaaacgtgctcgtgctactgctgatgcattgaatagtactattggcctttggggtaatgccgctggtgatattggtactactttagctggtgcttttggtcagggcaatgacgccgcaaaagcgttttttgcagtacagaaaggtattgccattgctcagtcaattatcaatatccaacagggtattagtgaggcaaccaaattaggctggcctgctggtattgccgctggattaaaagtagcagcagagggtgcaaacattatccgtactattaagggaacaactattcaaggtcaagcccatgatggttgggattcactaccaagtactggtacatataatcttgaaaagggtgaacgtgtagtaggtaaatcactaaaccaagatcttactaactatctaaaagatggtggtaataattcttctggtgatatcaagattgaagcaccactagtaattcaatctaacggtgatattactgataaggacttcactgaaatgtgtaaaaaacatgctgatgttctagtacaggcagtacgccaatcacaacaacgcaacgtgtaa

SEQ ID NO: 145919 - DNA, 291 bp, Enterobacter cloacae
atgaacctaaatgatttaatgagcgtgattggagtaaaaacccacgaattcgaactagcaccaaatgtagttgtgaaaattcgtatgccgtcactctctcaatattccgaatgtactacaccattcaaaattatctatcattgtgtagttgatgacgaaggtaaaccactattcgaatcaccagaacagattgaagaaaacgtagaattatcagtacagatgaaactaagccaagagattgatcgtatcttcactgaatcaatgaatattgataatattgaaaaaaagtaa

SEQ ID NO: 145920 - DNA, 168 bp, Enterobacter cloacae
atgagaaccttactggtgctgatggtgcttcttacttccaagttgttaatggttatatctctactaacactactgctggtgatttcgattcacaagcacaacgtgaatatacctttgttgttactggtgctccagttgcaagtggtgaaactgctggcgactaaataa

SEQ ID NO: 145921 - DNA, 300 bp, Enterobacter cloacae
atgaaaatcacagtactaaacaataacccaactaatacccgtctggatgtggacggggttaaaatccatatcacaccagaaggtattacaacttctgacacaatcccacagctagaagcaatcaaggcatatcatgcagatggtgtaaacccagttgcatctaagcatattgaaatcctaactaccttactcagtccaccagcaccattccagaaaagtgaaacctttgaagaagtcactaagaaacatgctgataaagtgaaagctaaaatcaaaaagggtaaaaatgaaagtaattga

SEQ ID NO: 145922 - DNA, 177 bp, Enterobacter cloacae
atgaaaccacaattctttgatggtcattatcaaatttataaaatgtgtaatgaacctccagcctatggaactaacagaccgatcacccacgaatacaatgataaatttgtagttatgggctatgacgaatacatagaactaatcaaaaataaagccaagaaaggaaaattgaaatga

SEQ ID NO: 145923 - DNA, 225 bp, Enterobacter cloacae
atgaaatttatcgaagaaatgattcaagtaatgctaacccaacatgatgtaaaaggtacgtacacatttagctgtacagttactgaaagagatgatgattatcttgtactatgtagtacagaaatcgaaggaaagaaagcaggtgtaagcttaccaatcacaaaagaactacagaaagcattatcactacctactgaagattttgaactaacggtaactgtataa

SEQ ID NO: 145924 - DNA, 447 bp, Enterobacter cloacae
atgaaatacaaaacaagaattacaatgattgatgcacaagattacaacactatcatggtggaagcccatgtgaacgaatgggactatatcagaaacgtaggtgattacatttatgaattcaatgggaagaaattcaccgccgaggatattggactaaatgaactacgcctatttttcgattatgaatatgatatctggactactcaatggctatgtcttgaaggtacgtcatcacgaaccgtaaaacatacagatattccatacatcagtggactaacagaggaagaacaatttcaattgtctaccatatggggctatgaagtgaaaatggaacacgtgcaattctttcaagactacgctctagccaggtttgaccaacttcaaggaactgacgcactagtgaattatgaagaactagatttcaacgtactagatagctggatgtaa

SEQ ID NO: 145925 - DNA, 381 bp, Enterobacter cloacae
atgaatgaacaattcatatacatgacactagccactaacattcacactggcgtgacactaatcaaacttggattcacaaccgatccagaaagaagactacatgaactaagaagccgtaataaacacttccagtactcggaaatgatgttattcaaacataacaagaaactactacgttatgaaatggatgaaaaactactgcattctaagaacaagtattaccgtactactctagatcgctacactctaccagaaggtaacagtgaacactatgaatcagtaatgactgatgaactatatgcacaactactatctatgggttacaactggatcaatgaaccagtagaagaaaaagaaccagcaatgtttgaatggaactaa

SEQ ID NO: 145926 - DNA, 2103 bp, Enterobacter cloacae
atgaatacaatcacggatgaagaactattattaccaaaagtagtagatagaaatgcactacgtgcagaagccgaaaaactaaaacaagcagtattgagaggggaggtaaaagacaaagcattagtaaacgcactacgtaaagagctaactggtagtacatcagcatacaatggtgaatggacactaccacaaaacaaatggattgatagtatcattagtaagatggatttattctccggtgtgaaccttataaactcatcagtcggtactggtaaaactacacaattcatttatacaccaactgatgaagaacgtgcagcaggtgcagtaccaagagctaaagaaggttatatcgttctagtaccactaacttctattcgtctatcgttcgaaggtgataatgatttattcaaaactggtatttgtacttggaaccagattgatgcaattctacgccataacaacaaagagtattttgcagataaaaccctagtgattgatgaggttcacggattctttctagactacggttataaagcaaacgtgatcaaccgccttattgctgcattccctcttttcaagagtgtaatcatgatgagcggcacggcatcaccagatgatttctcagggattgatttcaacaaggtatataaagtttacaaaccaagtcaggcacgtaaggttattagtaccgtcatcgcttccaagactcaggatcttgtactcaaccatctaaacaatggtaagcgtaaaactatcgttctactcaatgacaaggcacagtgtgaagcattgaatcagatttgtacccgtactggcctagtagtgaatgcagacaagaaagataatcaggacgtaattgatttatacactactggtaatatgaaaactgacattctctatggtacgtatagtatagttgaaggtctatcaatcacgaatgaacttgatgaagttgatatcatcattgtaggacatgaacatccagcacgtattgaacagttcacaaaccgttttcgtaatgtgaataagttgaaaagtgttacgtactatctcaacaagtcagaaccattagaagttggtgtatttgatcgtaatgaggcagtagcaaacgcaaaagtaacgaaagaactactacaggtaacttatgaaatgatgggtgatgatgaagcgtctaagtattcattcactagtcagttccgtaaagatattgctggtagtatgttgtatttccatgatggtgaatttcatgtttcatttactggtattgattatgcctacagtgaacacaaaacacgtgaatacgctaatgattggaatctacttactactgaactaaagaagtatgatttcgttattcagccactacgttttgaagatggtgatgcagagaatgcaaaggttataactgatactgcacagaagctaaaagaagaggctgtagaggccgagaacgccatgatacgcgagtacctagaagatgctatgtctggtaacgtgaagcccgtagaagaggctacagagctttatacaagcattgatgaaagtgcttgcaagctaatgtcacgcggtctacgtaaatcagagtttcaagatcttatcaatggatttattgaagatcgtagtttctttgcaagagcacacgccgatgcagactactacccaacaggtaatactattcgtgaaatgatcattagtaaggtagcaggtaagactaaactagatagttttgatgtaagtagtattgctgattcaattatacagaaggtacataaagagtactttgcaggtaatacagaattgatgttgaaacacccactatggaagaaatcagtagtggttagtggtggtgtactaattagttcttcatctaaaggtgctaaagcgattctagagcgatacatcacactaggtaagagtgaacagcaaagggtgaacgggcagaaggtgagattctttgaagtgattcatctttcactaactggtctacatttcgatccaccagctttccaaccaaaaccagtacagcaaccagtggaacacgtagaggtacgccaatccctagagggaatcaaggcgaaattcctacagttccgtaagtaa

SEQ ID NO: 145927 - DNA, 171 bp, Enterobacter cloacae
atgttagattgggttatcacttctctagtactaatcatcggctttatcatcctcgtcactgggtttatcgaatacgttctactggcgtggttaggaatactcctaattctggtggtattgggcgttttaggccgtatttgggcatgttttcaaattcaaaatactaaatag

SEQ ID NO: 145928 - DNA, 1584 bp, Enterobacter cloacae
atgaaggttcccgtatggagttacgcccgtgtatcaaccctttcacagattgatggttttggtatacagcgacaggtacagactattaaccagtttatacaatatctggtactagatcaccgcctaccctacacactggacgtggacaacattacacagatggtagcggaggggagatcagcctttaaggggaaaaactggaatcccaagactaagcttggacagtaccgaaagatggtaatggatggggtagtacctgattctgttttgattgtagaaaacatagaccgcttaacccgtctagatccattccaggcagtagagattatttctggaatgattaacaggggtactactatcctagagattgaaacgggtatgacctatagccgctacatccccgaaagcattacagtacttactatgcaaatcaaccgtgcgaacggggagagtaagcgtaaaagtattatgatgcaaaagagccaccagaaccgctacggtaatgtgtctaaagttcgtcctcgctggttcgatgtagtagaactggatggtgtgaaacaataccgtactaatgatacggcaaaagctattcagcgtatgtatagtgattatgctaatggtattggggcagcacagatagtacggacatatggaaagacagataatggtaaatcttggacactagttactgtactacgtgctcttagtgataaaagggtagccgatgatccacgctatccaccgatcattgataaacctctatatgaaaaggtacaggcaatgaaattagctacggggaaaaaggggaatactcaccagcgtaatatgctcaatatcttttctggtatgagtcgatgccccgtatgtaaacaatcaattatagtgaagcgtaacagtcatggtggcctttatacagtctgcctaggtaaacgtactaataaggattgtgaagctaaaggaatggcgtacaacgccttagaacggcctttactaactgctattaagggattggatttttcagaagtatataaccgtgaagaatctaacgtgattactctccgtgatcagtggattcagaacgaaagggatattgcggcattccgtgagagattagctaaggctagccgacatgagaaattcgctatcctggatgaactggaaactatcagtaaggaacaggaagatctaaccattcgtcttaagtcagtagatgcccccaaagacgtacagttagactttaatgacgataagttagatctgaatgtagattaccgtattgaactaaacaaccgcatgaagaagcttatacagcgtattgatgtagtacgggtagatacttctaaatctacatatacaatctattgctctatcaagtactggactgatgctatcacacaccttgtaatcattgatgcggagagtattagaactggtaagggtggtactaaccaattaactactactctacgttccgttagttctatcaatgaagacggtactatttctggtaatcctgatttagaagctctggagtactgggagaatgtgtttaataaagccgttgaaatggttactaacgcttga

SEQ ID NO: 145929 - DNA, 672 bp, Enterobacter cloacae
atggggccgcagtggcatcaccgtcgcgatcgtgaaaacagcctgctcgggcacagcggctgccgcgtgggcggtaacgatctggatatcgccctggccttcaagagcctgatgccgctgctcggcatgggggggcaaaccgaaaaaggcatcgccctgccgatcctgccgtggtggaacgcgatagccatcaacgacgtgccggcgcagagtgatttttacagcaccgccaacggccgcttccttaacgatctggtgcgcgatgcccaggacggcgaaaaggtcgccctgctctataaagtgtggcgtcagcgtctgagctaccgcgtggtgcgtacggcggaagagagcaaaatcgccctgtccgaccgcgctgaacatgcggtctccctgccgtttatcagtgacgaactggccactgccatttcgcaggacgggctggagacggcgctcgcgcagccgctgcagcgcattctggaacaggtgcagctcgcgctggagaacggcaaagagaagccggacgtgatttacctgaccggcggtagcgctcgttcaccgctgatcaagaaagcgctggccgaacagctgccgggaatacctatcgcgggtggcgatgactttggatccgttaccgcagggctggcgcgctgggcgcaggtgatgtttagctag

SEQ ID NO: 145930 - DNA, 921 bp, Enterobacter cloacae
ttgattcaagcatacgaagacggctatttttacagagataccccgcaccacgatcaccgcccgctttcagcattttccagaccatcccagcaactcaccgttattgataatgttctgtacgttgtcgaagtggaaagtggtgaaattcttcactacgactcgacagagtatttgcttgatggtggcatcgttcaggatctgcatttgagctattcgacagcagacaccgccaaatcaaaacaggcacaccgtgaatacgctaataagttgggcgaccttccagggaatgcaacctataacgggattaaggaatacgcagacgtattaaccaagccaaatttcacgaaagtatttgcattatgtaacgaagttgacaggcgaaacttagcatttataacacgtgcggatctgtgcgcaatactgaacaccacgccggatcatctcaaccgtgttttatcgggtcttgagcgtaaaaagtacatcaaggttgataaagctgaacaccagaaaggcgtattaaaggtatgggttaatccttcgtttgtctggaaaggtgatttagctaaccgctacttatctggacatttgcagggcttcccaatcctggaacgtaaacgcccagtaaaacgctctgaggtgctcgacactctcacggcgactgcaatggctgcttatgatgtctggcatgttgaacacggtcacaaggctaatcagccctactctaatgaatggtatgcagagatcacgctctacgataacgcctacggtgaaggggtgagacttgccaacgaacaccaggtgctgaataagattcttaacccagcagtgtctgaaactgattttatgcgtgagttcttcactccggctcaatatcgaacacacttgaactcattagcaagactatcaaggagaacatattga

SEQ ID NO: 145931 - DNA, 1101 bp, Enterobacter cloacae
atgaaacgccttgtcagaaatcctggtaagttcgaagcactcgaagcatacacagcattcagtcgtgaacatggctataaacttgaatcaccagaagacactgaaagattccttgctcagtttggtgaatcgctcaaggcctcacaggataaccagacactacttcatggtaaacgcatggaggcttgctttggtcaggttgcagcgggtttgggtggctgtaggatggttaaaactgaagatactggtgatgtcatttctgatgacactgatatgttactgcccgattacagactggtattgaaggatggcagacaattattcgttgaagtcaagaacagcagtctgcccaaggcatcatcaaaatacatgttgagaaaggattacgttgggaaactgcaacgttacagcgagataaacggcgtccctttgtattttgcaatctattaccgctgcttgagaatatggacactgttacctataggttcatttattgaacgggagcgaaaatacgaaacaacacccgttcactctctggcaaacagtgaaatggcgatccttggtgacttgatggttggaactaaacccccactcatattcgagctggtagctgatagaactaaagatgcttccgtgcaaaataatcaggcaagattcatctgtggcgatgtgaaaatctactgtggtgatgcagagattgaagaccgtgatgagaaggatattgcattctacttactgaggttcggcagatgggattgcgatgaaccagagggggttatggatgaaaacggggaactacatagtgttcgctatacgttcacccctgaatatcaggatgaggatgtcaaaagaaatggctttgcaatattcggcaacttgagttcgatgataaccgaagcatacaacgaacacacggtgtacgagcagcaggtaacagctatcacacccaaagctgaccctgctgtgttctcagtccagattccaagagattacaggggtaaagtacttgtattgcatcgttttagtatgcaagcgaaccctgacttcaatgaagaatatgctgatgggactatgtacaaactgacggcagataaatcatga

SEQ ID NO: 145932 - DNA, 948 bp, Enterobacter cloacae
atgacctttactgattggctaatactgaaccagcatacaggcgaaattgcccgggctattgagtcactaagaccaaccactgattacgtaaaagattacgtatttcctgttacaatggcctttgcctctgcttttcttggtggtctttcggcggtctacatcaacaagaaacttgagttgcaaaagattgccagagataaccttattacatccattcaggccgtagctcttgctcaagactgcctaagcaatctggtatcaatcaaaacaaactatctcaccatagatagtgatgaacctctcatcagggcttcacagtttacaacgattatcaccaagtttgacgatgtaacattcaacaccaatagcttatattttattcggcagataccgacagcaaataaaaagttttttgaatctctttcatggaaaataaaacatcgcattttccgtataaaaataaaaacaccctcaactgaagagttgcgcaggacatggagaaatagtgtcagagtcggtgctatgtttgggaactacaatcaagttatgggattgctacgatacagaaacgaattgaatgaacaagttaaagacaagattgcgattttcggtgacgctctaccacttgagcatgttcagtcaacgcttggtaaaaaactatgtggcgggtttgtcgatattaccgaatcctccatctccctggtagaccatgtgatggtagagcttcgtcattttctggaagagtttcctgccatcgcagagagtaatattgagttaagcagagtaagggaatggggaggcgtaccaacctatgttaatacgcaagaggcatttttgaagtgtatggaaccgattatgaaaccagactttaaaaagttccttgcttacacagggatgtctgagcaggaagcgcgggataaatatacgttcaaatcatggtttgactga

SEQ ID NO: 145933 - DNA, 2391 bp, Enterobacter cloacae
atgagaatgatactgatgcctgattttgaacttaaagtatttcaagccgatgctgcaaagacaatcgtagaccgctacgcatttttcgctgggcatccatatcgccctagcaaagggccaaaaccgcgaccattttttcaggcattatctgcacttacaggagcaggcaagacaccagtattagcacaagccgttaccctactaagatctcatttttcttcagaacccataatattctggatgtctaaagcgaagtcagtagttgctcagacctattctaactttagtgcaggtggaaaatattcagaaatcgtagatggttttcgtatcataaatatagctcagctaactcctatgcatatcgaagatgggagcacacctttgatgatcatggccactactggtctttttaataacagagatcaatctgagggggctttaaatatatataagaaagatgctgatctattcggcgattcatctccatgggagcgacttattgcacgaaaaacaggtgctaaacggcgcccattattaattgtgtatgatgagggacataatctttctgagcagcaaacagaaattttatctgaattggaacctgatgcatatttgcttgcaagtgcgactttaaagttgccagctaattttcataaggctgttatccaaccgataaagctttgggctgaagaagcctctaatgattatgagcgctttgcggaacttagtgcactcggggctgatggtagccctgatgcacagttattcgttacgacagccattagcagtgaaaaagttgttagcgccgagttggttaaaaaagctattcaatttgacggcactaccggggcaatggaaaaatcacttgatgatcttcataaaagattagaattgataaaagctgagatttccgagcgaggtcttggattcagtccaaaagccatatacgtgtgcaaaacaaacattgctgatgacggcgaaaaagatgatcactccaagccattcatgcatcggaaagcacctcctattcgtatttggcgttatttggtcgaagagaaaggtatccccccaaatgaaattgcgatttatgcaaacttgtctttcttggatgggaacaagccagcggaggtcaatcttttctcaaagggagagaatgattttgaggattttcaggctggtaatttcaaacatataatcttcaacctctctcttcaggagggatgggatgaccctgcttgttaccttgcttatatagataaaagcatggggtcgtcaatccaagtagagcagatcatcggccgtgttcttaggcaatatggcgcacgtcattatgataatcagttaattaattctgcacacttctttctccgtgttgacaatcaaagtgtattttcctcggcaataaatgccgtaaaggataagctaaaagctgagggtgcacctattgaaatagtggataattttagcggtactgcaggcactgctgaagatcttaatttaaaagatggcatggatgttaaactccatcacgtacatgttgatgctagcgatgcgtgtattcgaatagccgaaattctaagcgattttcctacgttcgtcgaagggagtgcagatactcagggacaagctcatattgcaacacagctcgtcgagcttgacgcattggggcgagatagtaaagcaactgagtggacgcctgaaggcaatacaaaccccgttcggttaaggtggttgattaatacagctatacggacacggtcaaatagagcacttgctataactgatcttaaacatcctaaatttgatgttagagttcagatacatagttctgccgcaaggtatgcagataagttagctgctgaaatagtttcagcatattatgataactctgagctggcatatgaaagcgattctccgtttcaatttggtgttattcgagttcctcgtaacgctactcactttgagcattcattatatgaaaagtactcaggacttaataagttcgaggctccttttgctgaggctttagataggtctggttacccttggcacagaaacctgagcagtggcggttttcatatcccactattgacagagggtgatacaagctcattttatccagactttttagtatggaagtcagaccttgtctattgccttgataccaaggggggccatctattgactgatgccgtagcgcgcaagctttttaatattcatgaagatggtcggagtaagattctagtgagatttatcacagaaggaaagcagacagagctgcgcggcaaagcaacaaagggaggatatactgtatggaaaatgaaatctgggcatcctaccccaatttatgtggcggatttagacaaagctgttagggaatgtctaaaatag

SEQ ID NO: 145934 - DNA, 1944 bp, Enterobacter cloacae
atggattacgaacaactgcctagggcggcactggtccgaatgcttcaagagcatgatgcggcactagtcgacgccggtaaaaatggcatcgttatgaattacaccggccgaacagctccgtggcaaataatcagacaggtgaagcctaagctcttcagtattataaaaaaatattcttgtggtgaagagcttgctcaggctgaaaatgagatttgggatggagaaaatctttccgcaatggtcactctctataaatatagagggcagattgatctcgtactgacagaccctccctacaataccggagaggatttccgttataacgacaaatgggataaagatcccaacgaccctgatttgggcgatgtagttcctaaagacgacggttcgaagcatagcaaatggttgcgcttcatgacccccagaatttggatgatgagggagatgctgaaaccaggtggcgtgatggcgatttgtatcgatcatcgggaacttttccgcctaggaatgctcatggatgagatatttggcgaggataatcgtttagcaattattaactggcaaaagtccgcggctgcgagacctgataataaacatgtctcgacggcaaccgagtacgtactggtatacgggaaagatataacccgtgtacggacggcatcgctcgctcgtggagaggctgacaacaagagatactccaatccagacaacgacccgggaaacgactggcgtgagggaaatcttactgcaaaaagttattcagctaaggacgactatggtatccagtctccattcacaggagttgtgcattacccagctggtaatggtgcgtggaggcatcctaagaagaatgtaaaaatatggctgaacgcttggggacctgagtacgaagaacgcgatataggagatggtcgtggaaaagctttggttgttaaaggccaacaaccaggagctatcgcgagctcagtatctaagaaagcatatgcccggcttgcaaaaaataactggccatttctttggtttggccgggacggtctgggtagaccccgcgtcaaaacttatcttgaacaaataaagaaagggaaagtgcccgtaacatactggtcagataccgatcttgcctccgaaatcctgactgacattgatttaggctctacatcttgggattactcggagtcgggtcgatctgcagatggtgtggccgaactaacagctgttgttggtcaagggcatggtttttctaccgtaaaacctctcaaattgatgaccaaaatcatccaactctggtgtcgtccggacggcattgttttagatccatttgcaggttctggaactacggggcatgcagtgcttgaattaaataaagaagccgatacaaatagacgattcattttaattgaacaaggcaatactgagaaaggtgaccactatgcaaaaaccctcacagctgagcgtgtaaagcgtgtgatttcaggtgattggtctaaaactaaaaaagaaccattagtggggggatttcgatttattgagctaaagcgcgaaaaaatagacgctgatgcggtgaatacgcttgctcgtgaggaaatgatagatctattactcacaagttattgggataaagcagaaaaagcaaagtcgtatctcagaaggctacctactcagccgaatcggcatctatttgcggttaactcgaaacaagaagggttcttcttaatttggggggctccagataaaccatcagccctgactaaagcagcattcagggaaatagctgaagagtctaggcaggcaggtttagccccacattatcatgtgtatgctgcccttgctccatacaccggtagtagtgtcgaattttataaaatcccagatagggttcttgagcacataggtttcagccagcgtcaggactccttcaataatgagaatgatactgatgcctga

SEQ ID NO: 145935 - DNA, 498 bp, Enterobacter cloacae
atgaatcattcacaagaatgggaacgattgccaattgaaaagaaggaagtgataattaagtatcactctcagtatccagttaaattgggtgcacttgcaaaggagcttggtctggttgttaagttagccactttgcctgctaatatttctggagaaattaaggactgtgatggagtagtcaccattcgagtgaatcagcatgatatgcaggcaagacggcgttatactttggcccatgaaatagcgcattttctgctgcataggcatctcctccgtgatggtattacagatgatgtattgtaccgctcatcgcagtcaagtcagattgaggcagaggccaatcgtcttgccgcagatataatcatgcctatgcatcaggtggatgaatgctacgcacgtcatttcaagggtaagaaagatgcagtattatatgaagcaattgctaaagatctcgacgtatcaacaatagcgctgaaatatagactgggtgtgaattga

SEQ ID NO: 145936 - DNA, 279 bp, Enterobacter cloacae
atgatgaaatttgctagtatgttcaatcgcacttccacacaacgtatttctgcacattcattccgtggtgaacctattaccgttctccacttgggttacgcaaccgtgtatgaattcacagaaatgaagatgattgttactaactcaaatttagttaccattgttgatagtaacgctcagactcaactgattgcgaaagatagttacttcttccagtgtgcattagcaagactccagcaaagcgatctactcatggaaagcgtactgggggtagtttga

SEQ ID NO: 145937 - DNA, 165 bp, Enterobacter cloacae
atgcaattaggattgaagagtaaagagcaggtaataacagagatgggctttgatgctcgcattatgcaagagcagataaaaaaggaaagtaacaataaggaagaaccactaaatggaaattcaaccaacgcaacagatcagggcggtaactcaagttcagattaa

SEQ ID NO: 145938 - DNA, 321 bp, Enterobacter cloacae
atggaaatggttatggaactcaaagaagtaaaacaaaagaaaggttgggtagaacaccgctatgaagataacgcagtaatcaaccacttcaaatatgatgttatctactgcaatttcaaactaagagttacttacgatatcagtactaaacaatgggcgtggggtgatgcatatactatgcagtcatgccctaacttaacgcagtacagcgaagaagaactctttcaggcaagtacattaatcgatgtagaatcaatactcacagtacagaaagagataataaaaatactaaagggagattatgaacacagaatcatttga

SEQ ID NO: 145939 - DNA, 243 bp, Enterobacter cloacae
atgaatcgttttacacgtgttagaaaaccagatggtggtgaatacctaaccgcagatatgcgtaacatttctgattatggttctaatactgtaactaaattcgaatatcaatcaggtattgtaggtaagtactatgataacgtaatttcaagtactatggacggtgacgggggtatggtaattggtagccaggatacggaagaccacgccaaccggaatataactgtgcatatggatctgtaa

SEQ ID NO: 145940 - DNA, 303 bp, Enterobacter cloacae
atgagagagtttaagggtacgccgggcgaatggaagtacacgattagaaacgtgaacgaaatgatgactactttccatggcgtgacaattggcgacacgtacatcgaagcagcaacgagaaatgaaatagaggacgcgcagcttatagcagccgcgcctgatttgctggatgcactgcaatgcctgttcgaaaactataagcagctcgctgattcaggcgatgccggtaactggcgactcgaagatgaacccgccggaaagaaggcactgcatgccatcaacaaagccctaggtaaggagtaa

SEQ ID NO: 145941 - DNA, 222 bp, Enterobacter cloacae
atgggaaaggtaatgaccaaccgcgaactggtagacgccgcgatagagcttgccggggagttttacgcgatgcagggctattcgcaccggcctggatttgagtattggaactcccctcacccgcatgagcgcctgtgtttcgaaatggcttgtcgggcgttcgagatgattcgcggatccgatgttatggatgccgtggcagacctggaggatgaagagtga

SEQ ID NO: 145942 - DNA, 222 bp, Enterobacter cloacae
atggataacaggaaggcccgtcggctggttggcgcccacatcaacaacacctaccggatcagcaatagacgctggcaggtgtggggtagcaattggccttttgtttgggggcatgcaaaaccatcacctcggcagaagagaaaggctaaagaggttactgcataccgcgaggagttaaaacgcagtcaggagctagccaatgttcaggataatccagcctaa

SEQ ID NO: 145943 - DNA, 420 bp, Enterobacter cloacae
atggaattctaccgaccagcagagctacgcgaaattatttcgctcccgcttttcagtgacttagtgcagtgcggtttccccagcccggcagctgattacgttgaacagcgcatcgatctcaatgagttgcttgtcgctcaccccagctcgacctatttcgtcaaagccgcgggagattcaatgatcgagggaggcattagtgacggggatctactggtggtggatagctcacgcaccgctgaacacggagacattgtcatagcggccgtggaaggagaatttacggttaaacgcctgcagctacgcccgacagtccagctcctaccgatgaacggtgcttattcgccgattattgtcggcagcgaagacacactggacgttttcggtgttgtaactttcatcgtcaaatctgcgagctga

SEQ ID NO: 145944 - DNA, 1146 bp, Enterobacter cloacae
atgccatgcaatgaagcggagaaattcactctgggtcagattcaggaaatgattacgatagctcgagcactaagcaactcaaggcagcccgctattgcatatagcgaggctgctcagttagcattatgctactttaataaaatggaagctctggagaaaactagagatatggaacattcttcaaggatcagcaatataaaattaagcgttattgtaccttgttataattctcgcgattacattgctgattgcattcagtcaattttaccgtacatgtctaatgcgatcgaactcgtcatcgtaaatgatggttctacagacgatagcgcatatgtcattgagaacttggtcagtaatgttcaagataaaaacattactattattcagcaagataatgcaggtctatccgctgccagaaatgcagggataaagcttgcaaatggagagtatatcgcatttttagattcagatgatttctttcaccctgatttctggaaagagatattgcctgtcatcaatgattcctccgttgacatcgtagaatttaatgccgagcaatttgaaggtgagacttcaaacattgttgaacatattgactgctcagtattccgtggaagagtagagataacatcaattacaaaactttccccagcattcaaaagaagcaaatggtacccttgggcaagagtttataaaaaaacacttttccaaagccaaggtataagtttcccatcgggtcgactttatgaggatatgagtacgatccccgcaatttatttacaaagtaaagttatctatggaatcaataaatccttaatttggtaccgttatcataaaaaaagcataacacaaacattcaggcaaaaagatttatctgatttagtttatgctgcacaatcgctttcgctgttggctaatgatagcactgaaataaaaaaggctattttcccaacagttcaacgaatcttcaacctcataaagtatatgctggtcagaaataaaggcgcaaaactttcattacaggaacagaaagtactgcgccgtgctatgttaactttcatttggagtttcaaaacatcgcgaaaacttcaaattttaactttgccgttatatatgaatacagtcgtccgttttagaaagaaatag

SEQ ID NO: 145945 - DNA, 603 bp, Enterobacter cloacae
atgacaatgcaatcaggtgtatttaaaaaatacaatcctttagaaaaatggggtggatgtactgcaaaggaaatagctgggcttaagccagaggaactagatttatattacattgcaatggcaccgggtgtgaatattgtttttctgaatgatgaaaatggcaatgactggtaccagtggcttaaaacactttctaaagaaacgcttaaaatatcgtttaacccagattcaaatgaaatcatccatttttcatatgatgcaagcacaatttttccgattaatcagattgtcacggaaatcgcgccggagaatgtaccggatgaatttacagcagctggagaaaaagcattgggtggggcatttctttttgttgatgggcaaataattgccgtccccgtggattacgtagcagaagcccaacgccaaaagatggagttgttgaaccatgcgaatgatgtgattgccatgcttcaggacgctgtggaactaggcatggctacagaggaagaaaattcaagtctggcagattggaaaaggtaccgagtgcttttaaacagggttaatccaaacgaacctgactggccgccaaagccagcccagtga

SEQ ID NO: 145946 - DNA, 1719 bp, Enterobacter cloacae
atggctgataaatattacagtattctgaccaacagaggtaaagagctggaggcgcagtcttctgcgaccgggaaacccgtcattattaaagattttgtggtgggtgacggtaatggtcagcccgttacgcctgatccggcaaaaacaaccctgaaccacgaagtgtatcgggcgggaatttcagcgttgcaggtctcaccggaccaggcgaatcagtttattgcgcagctggtactgcctaccgatgttgggggctttgttgttcgtgaggtcgggctgttaaccgatgccggcgaactgtatgccgtggcgaactgtgcagcaattgagaagccggtaagtggcatcagtgtaacgctccagtttcgcctcgccgtgtcagaaacggcggatattgagcttaaggtggctaccggggacggcctgttccttcgccaggatgcgaacctgggcgatgtgaaggacgccgctgaatcacggaaaaatattgggctgaaaggggccgctgtactggatgttggtaaagcagcgaacacagtcgccgccggggatgacagccgtatcgttaatgcgttgcagaaaggaaataatctttcagatgttgtcgataaagggcaggcacgcgtaaatctggaactgaagtccgcagctaccgccgacgttcagatatccagagatgacgtaaccgcggggcgtctggtcgcaaatggcggcgcattggcgcttaggacagttgctgcacaagcaggcaccgccattgctgatgccagcgccctcccggctaactctgtgagcttctgttatgccgatgcagcatattcaccgggttatgaggcgacgattcttgatgtgggtgggctcggtggcgatggctatcgtgtgcagtatgccgcgtcctatagcgacggcggtaagcggctgaaattccgcactttgaatgcagataacggctattggggaagctggacgaacgttatcacaaactacggcggaagcgttgattatctcgatggcgcaaggtattacgccaccaagccggaatattggcagggaggcggggcattttcacatcaatatgctgatggttccgcaccattttttgttggcggttactcaaccgctaaagataactctgtatacctgccgatagtgaaaggaacatctgtaacgaaagatctcggttggggttcttcagttagctttggaatactccgatccggtaatggcgattttggctcagccgttatccatatcatcggagattctggcgctggagctatatttagctttgacgcaaacggcacatttaatacccctgcaaaaataaatagcggaggcgctctttacgcagccggacaaattgatagcgggggtaatattgtcgctggtcagggtctgtatgagtcaggcggtttagtcagggtatattcaagtaataacccgccgccccagcaggatttgagcccttatgcaactaccgcatgggttaacggaaacttttcaacacaagcctggacagtagctaattttttgcaagggggaatcaggctggcctctttaggaactgcaaacaacggtaataacgacaatgaattcgcatatgcgccgaatggtgcggtcgttactgctgtacagcaaaggacaaactacacagcggtgcaatatcgctatgtacagtacaatattggtgggaactggtatacagcatgggtggcgtaa

SEQ ID NO: 145947 - DNA, 273 bp, Enterobacter cloacae
atgccaaatctgtcagcattggattcatggttaaaagttagcacatgggatacgcatcatccgttagaccaagggcgattttttaaagcagtttatcaattaatactattgaatgataagctcgtcgaaccgcaatacgttcatgattacattgtcgattatcacggcggtaataagaatgcagagcatgtagataatatcgcaactatatacgctgcaaagtacgacgatatttatagttttatttatgagaaccaaatagaactaacctaa

SEQ ID NO: 145948 - DNA, 219 bp, Enterobacter cloacae
atgctagatggatacttcaatcacgatggtgacagcggagaagcttttattaacaagcgtaaacggctattggctgtgcaagcagccttagagatcgcaaaacacagtgtcggaaaccatcatcaatccacggtttccagagtcaacgaggatttatcgaagactgctgccgggattgagggattagctgatgctattcaggccgctttagataaataa

SEQ ID NO: 145949 - DNA, 294 bp, Enterobacter cloacae
atgcttgagtggatttacggatatgtgaacggaatattagagcactacaaagcgatgacgacgatcgtatttgtgatcgcgattttgaaacttttagtcccgcctttcttttggattcttgaaaaaatatctgacagatcacacagaaaaaagcttctgaaaatatggactgacgccggttacagcgatgaagaggcaaggctctttgttgaggcatcggggtcccatcgaaaaaaaccaaaacccagcatctccacctacctaaaaaaaatatcccgtcgaaaggtccgctaa

SEQ ID NO: 145950 - DNA, 291 bp, Enterobacter cloacae
atgattagtgagccaaacgagaaacaaggccctaatcttgagatatcaattagtcctatcatgtctggctatcgggataaagatactctgcgggtgttgttctcaaatgactacaatgacttggatgatgttgatacgagtataattttcccgctgagtgaggtttctcatgcgtcatggttcaatatagatatccatgaaaaagtggataacaaccgtgaagccaaaccgattagcgggcgaaaggccaagagaagatatggcaagggtgggaagtcggctcataagtaa

SEQ ID NO: 145951 - DNA, 249 bp, Enterobacter cloacae
atgtcagaactggtcatgaagatgtttggtttgagcggctttgtcagaggcggccaggccatggcggaacgcctgaataaatcaggtgtaaaaaacattaaagttgtagggcgtggggcgattattgttgatacagcgtccgatcccgaaaaactgcaccgcctgagaaaagctgcacgcaagtacgtagagcaggatgccgaagccgtagcggcagctaaaattaactctaaggatagtgacgattaa

SEQ ID NO: 145952 - DNA, 1488 bp, Enterobacter cloacae
atgaataagccagtcagttacggctcagtgtgcagcggcatcgaggccgccagcgtggcatggcattgcctgggctggcagccagcatggttcgctgagatagaaaaattcccctctgctgttctggcgtaccgctggccggacgtcagtaacctgggcgacatgaccaaaatcgctgcggcaatccgtgccggaaaaatcgacgcgcccgatgtgctggtggggggaaccccttgccaggcgttcagcgttgcgggcttacgtaatgggctggctgacgaacgcggccagttaactttggcttttgtggaactggttaatgctaccgatgaaaaacgcagagaacagggaaaatcacctgtcatcgtcgtctgggaaaacgtcccaggcgtattcagcagcaaagataacgctttcggatgttttcttgcagggcttgccggcgaaagctgcgcgctggaatcaccagggaagcgatggtcaaacgctggttatgtgctgggaccagaaagagctattgcctggcgagtgctcgacgctcaatttttcggagtggcccaacgacgcagacgtgtgtttgttgtcgcaacagctcgaggggatatcgatcccgcaaaaattctttttgagtccgaaggcctgcgccggaattctccgccgggcagagaaaaggcgaaggcagttgccgcgcttacttcaaacggcgttggagtatgtggtgcagacgacaaccaggcacaagccggacatctgatcccggagtgcgtgaccggggatatcagccacaccctgaaagcagaaggtttcgatggtagcgaggacggtacaggaagaggtacgccgattatcgcgatggcgcacgggcagggtggtgctgaaattaaaaccgataatacagcgcctacgctgacctgtaaccacgaagctccgatcgttttcagtagcaacgggcatgcatctttcgcacccggcgttggagcacttcgggctaagtcgggcgctgatcaagaaaagcttgcgatacacggaacgcaggaccctgacacattgaaagacctggctcatacgctggggcggaatcacgggcaggaaaatgctgtagtttatgccttcaaggctggacagggcgcaaaagctggtggcattgggtgggcagaggaacaatccccaacactgacggccgccagcagtggatcaaatttagtctcctcagtgatgaagaatatggccgttcgccgcctgactcctgtcgagtgcgagcgcctgcaggggttccctgataaccacaccctaatccctacggagaagcgtaagcagatcaccgctgatgaatacgcgtatctgcgccaccaccggccagaactgactgcagagcaggcgttccgcctggccgccgatggtccgcgctataaagcgatcggcaattcaatggctgtgccggttatgcgctggattggctcacgcatacaggaggcgctgcgtgcctaa

SEQ ID NO: 145953 - DNA, 522 bp, Enterobacter cloacae
atggctaacaattattcaactcaagctttcttcgatttcctgtacgaactgccttcattgggactcatcaatgaagcaactgcacgtaacctgaagaattcagcgttgctattgctctctgttaccaaaattcatagtgatgatgatgtacgagatctagacgttgaagacttgatcgagaagtatattgcgacccagtccacgaagcctggtgaatcttccattcaaagctatcaaagccgatttaaaagcgccgttaacaagttcgaggagtatgtgcgagtgggtactattgtaaaccagtcagatactgacggaagccaagacggatttgatactgcggatcagaatgcggagaagattaaactgggcaagagagagaaggtgcaagccttcaatttgccgattgtagttcgcccggagacaggaacgatgattactgtccaaggcttaccaactgatctcactgcggaagatgctgagcgtattctttcggtattaaaagcgtatgtgcgttcatga

SEQ ID NO: 145954 - DNA, 267 bp, Enterobacter cloacae
atgccacgaccaaaaactcatgaagagcgcacggtgatgattaaccggattatcgaactggtgaaagagcagggccgtatcacgacgaaggacgtcgtcgcgatgtttaacctgcaccgaaccacggcagagaagtacatccggattgccgtgcaacgtggagagcttatccgttacggtcgctgcggtattttccgtgaccaacgtgcaattatcgactttgaccttagccgcttttcacagcatagagtgggtatgcaaccttaa

SEQ ID NO: 145955 - DNA, 675 bp, Enterobacter cloacae
atggaaaccgtattggatgcactgaaagccatgaaaaaagcaacatatcgcgaggttgctgcccgtctggatatcgagcccattgaagcgctgaacatgctgcgcgagcagaaagaacaagggttatgtgatttttacgatggcgcatggtcaatcggtacagctaaagagcaggccaggcagccgatcaaacctcaggcagcggagccagcgaatcaggctccgcgcctgaaaggtgatgaaccagcaccggttgatgttgtggccatccgccagttgcttggaaagagcggctctatgaccaccgctgcgctggctgcagctgtaaatcgtaatgcccgcggcatggtctctgtaatgctgtcttttgagcggcagggcgtggttatcaaaaacggcgaggggaagggcgtgacatggtctctgcctggagctggtgaggccgcaggcgttacagccgaagctgcacagccagaaaaaacaactgcagaaattattgagaccatcccggcattcgcctctcgccctgatgacctgattattccgtcatcccgttatatctccggtgaaatccgccggacaaaagcgaagctgtcaaacctgcagcgtcttcagggcgccgttcgggagctacgccgccataagcatctgctggaggggctggggaatgactaa

SEQ ID NO: 145956 - DNA, 7221 bp, Enterobacter cloacae
atgaatcctaaactcagtaaactgtctgcgacggtttgcctgttttcgcaattattcagcatcgccttaccgaccttcgtgccggttattgcgctcgcgcagaataagccgcaaacgctcgcagaaataaccaccacaccttatattctgaaaaaaggcgaaacggtctccgttgttgccgcgcgttattctctcagcgtcgatgcgctgaaaaaacttaacgtcttcagaacctttagtaagcctttcgagaaactcggagaaggtgatgaaatcgatgttccggtaaataacaccaccaaaaaagatactgccggatatacccctgagggtgctgacgccttctgggcaaaccgggcctcctcgctcggcaacactctctcttcagaccatcctgccgatcaggcagcctcgatggccaaaagcatggccaccggtgcgacggtctccaccgttgagcagtggctcggtcagttcggcaccgcgaaagcgaagctgaacctggacgatgatttcaccctcgacggctcatcgctcgacgtcctgctgccgctctatgatcagcaggataacctgctgttcacgcagcttggttaccggaacaaggattcccgtaataccctcaatgccggcctcggtttccgtaccttccacggcaactggatgtacggcatcaacagcttctatgatgacgacgtgacgggtaataaccgccgcctgggcgtgggtctggaagcctggaccgattacctgaaactcggcgccaacagctacaccggcctgacggactggcaccagtcccgtgacttcgccgattacgatgaacgcccggctgacggtttcgacatccgcgccgaaggctggctgccggcttatccgcagctcggcggcaaactggtgtacgagcagtatcgcggtgatgaggtcgccctgttcagcaaggacgaccgttccagcgatccgaaagcggtcaccctgggcctgaactatacgccggtgccgctggtgacggtgggtgttgaccaccgccaggggcagagcgggcagaatgacaccagctttaatctcgaatttaactacgagctcggtctgccgtggaaccagcagatcgacgattcgctggtggccgcacgccgcacgctggcaggcagccgtcttgatctggtcgatcgtaacaacgaaatcgtccttgagtataaaaaacaggatctgatccacctgaccctgccggcgcttctcgaaggcaaagccagtgacaaaggtaacatcagcgccaccgtcaaggccaaatacggtgtcgatcatattgaatgggactacagcgaaatccttgcggcgaagggcagtgccgtcgccgtcaacaagcagacgctggagatcaccttcccgccgtatcagaccaccggcagcaatgtgtaccacatcagcgcggtggcctacgatccgcagcacaacaagtcaaaccgtgaaaccacggaaattcgcgtcagcgagccggatgcgaccatcagtgacggggacctgattgtcaccgtggacggagcggccgccaacggcgaggccaccgacacggtgcaggcgaaagtcaccgacagcgcgcaccacgcggtcgccggggtgaaagttgagtttaccgcagacaacgagacgcgggtgatgacggcctcggcggtcaccgacgcaaacggtctggcgacaaccaacctgactaacatccacgcgggcaaatcaaacgtgaccgccacggtgaacggttcagcccgcagcgtccctgtcagctttgtcgccgacagcggcagcgcggtgattgccgacggcaacctcaccgttacccgcgacaacggtaaagcgaacaacagcgacaccaaccacgttcaggcgaaagtcacggacaaaaacggcaacaccgtttcgggcaccacggtgagcttctccagcaccgtcagcggggccactatggtgacggcgtctgcggtcacggatgaaaacggtatcgcaggcaccgacctgaccagcaccatgtcgggcgtggttccggtgaaagccgcggtgaacggtaccgacaaatcggtcgacacccacttcgcccaggatgacagcagcgccaccattggtgcgggcgattttgtcctcaccacggataacgcgaaagccaacggcagcgccaccaacgcggtgaaggcgaccgtaaaagacgcgaacggcctgccgcttgctggcgtggtggtcagcttcagcgccaccaacggggcgaacgttgccagcgcgaaggccaccaccgaccagagcggggtcgccactaccacgctgaccagcacgaaagccggaatctctgcggtaaccgccagcgtcagcaatgccacgggcggcagcagccagtcgctggacgcgcattttgtcgcggacgacagcacggcgacgatttctgccggtaacctgactgtgaccaccgacaacgcaaaagcggacggcagcgccaccaacgcggtgaaagcgattgtcacggatgcgaacggcaacgttctcgccggacagagcgtgagcttctctgcctccaacggcgcaacggtgattaccgcctcagccaccacggacgctgacggtgtggcaacgacgacgctgaccaacagcaaatccgggattaccagcgtgaccgccacggtcaacggcaacagccagtcggtagacaccaccttcctggccgacagcagcacggcgggtatcagttccggtaacctgacggtgaccaccgataacgcgaaagcggacggctcggccaccaacgcggtgaaagcgattgtcaccgacgcgaaaggcaacctggtgaaagacgcgaccgtgacctttaccgccactaacggggctactatcaccacggcctctgccaccacggacgttaacggtatcgccaccaccacgctgagcaacaccaaagccggtgtggcgaaagtgacggcaagcgtcaacggtgccagccagaccgtggacaccacctttgtggcggacagcggcacggcaaccatcagtgatggcaacctgacggtgaccaccgataacgcgaaagccaacggcacggccaccaacgcggtgaaagcgattgtcaccgatgttaacggcaacctggtttccggtgtggcagtgacctttaccgccaccaacggtgcgacggtgaccaccgcgtccgccaccacggatgcggacggtatcgccaccaccaccctgacgaacaccaaatccggtgtggcgaaagtcaccgccagcatcaacggcaacagccagtctgtagacaccacctttgtggccgacagcagcacggcgaccatcagcgacggtaacctgacggtgaccaccgacaatgcgaaagcggacggctcggacaccgacgcggtgaaagcgattgtgacggatgccaacggcaacctggtttccggtgtggcagtgacctttaccgccaccaacggcgcgacggtaaccaccgcttccgcgaccacggatacggacggtatcgccaccaccacgctgaccaacagcaaatccggtattgccaaagtgacggctaccgtcaacggtgccagccagaccgtggacaccacctttgtggccgacagcagcacggcaaccatcagttccggtaacctgacggtgaccaccgacggcgcgaaagcggacggggcggacaccaacgcggtgaaagcgattgtcactgacgcgaaaggtaacctggtgaaagacgtgacggtgacctttaccgccaccaacggcgccacggtgattaccgcctccgccaccacggacgttgacggtatcgccaccaccacgctcagcaacaccacggccggcacggcgaaagtgaccgccacggtgaacggcaacagccagactgtcgacaccacctttgtggccgacggcggaacggcaaccatcagcgccggtaacctgacggtgaccaccgataatgcgaaagccaacggcagcgccaccaacgcggtgaaagcgattgtcaccgatgctaacggcaacccggtgaaagacgcggtagtgaccttcacggccaccaacggcgcagtgattaccacggagtctgcgaccaccgacgccgacggtatcgccaccaccacgctgtccaacaccaaagccggtgtttctgcggtgaccgcgaaagtgaacggtaacagccagtctgtggacaccacttttgtggcggacagcagtacggcgaccatcagttccggtaacctgacggtgaccaccgataacgcgaaagcggacggcacggccaccgatgcggtgaaagctatcgtaacggatgccaacggcaacctggtttccggtgtggcagtgacctttaccgccaccaatggcgccacgatcaccaccgcttccgcgaccactgacgccgacggtatcgccaccaccaagctgaccaacaccaaatccggtgtgagcaaagtgacggctaccgtcaacggtgccagccagactgtggacaccacctttgtggccgacagcagcacggcgaccatcagcgacggtaacctgacggtgaccaccgataacgcgaaagccaacggtacggccaccgatgcggtgaaagccatcgtaacggatgccaacggtaacccggtgaaagacgcgacggtgacctttaccgccaccaacggcgctacgatcaccaccgcttctgccaccaccgatgcggacggtattgccaccaccacgctgaccaacaccaaatccggtgtaagcaaagtgacggctaccgtcaacggcaacagccagactgtggataccacctttgtggcggacagcagtacggcgaccatcaccgatggtaacctgacggtgaccaccgataacgcgaaagcggacggcacggccaccaacgcagtgaaagcgattgtcaccgatgccaacggcaacccggtgcagaatgcgacagttgcctttacctcaaccaacggcgccactatcaccacggcctccgcgaccacggacgccagcggtgtggcaacgaccacgctgaccaacaccaaatccggtgtgagcaaagtgacggccaccgtcaacggtgccagccagaccgtggacaccacctttgtggcggacagcagcacggcgaccatcagttccggtaacctgacggtgaccactgataacgcgaaagccaacggcagcgccaccgacgtggtgaaagcgattgtcaccgatgctaaaggcaacccggtgaaagacatgacggtgacctttaccgccactaacggagcgaccatcgtgacggaatcggtcaccaccgatgcggacggtatctccaccaccacgctgaccaacaccaaatccggcgtgagcaaagtgacggccaccgtcaacggtgccagccagacggttgacaccacctttgtggcggacagcagtaccgcgaccatcagcgacggcaacctgacggtgactaccgacaatgcgaaagccaacggcacggccaccgatgcggtgaaagccatcgtgacggatgccaacggtaacctggtgaaagatgccactgtagcctttaccgccaccaacggcgccaccatcaccaccgcctccgccaccacggatgcgaacggtgtggcaacgacgacgctgaccaataccaaagccgggaccaccagcgtgacggctaccgtcaacggtaacagcaagtctgtggacaccacctttgtggcggacagcagtacggcgaccatcagcgacggtaacctgacggtgaccaccgacaatgcggtggccaacgatagcgacaccaacgcggtgaaagccatcgtgaccgacgccaacggtaacaaggtgaaagacgcgacggtgacgtttaccgccaccaacagcgcgaaaatcaccaccgcctccgccaccacggacgcgaacggtgtggccaccaccacgctgaccaataccaaatccggtattgccgcggtgacggccaccgttaacggcaccagcaagtctgtcgacaccacctttgtggccgacagcagtacggcgaccattgcgacgggtaacctgacggtcaccaccgacaacgcgaaagcggacggtacggcgacggatgcggtacaggcgaaagtcaccgatgccaacggcaacctggtgccgggtgtggtggttgcgttcagcgtcaccaccggggcgacggtcgtcaccgcttctgccaccacagacgcgtacggcctggcgaaaaccaacctgaccagcgagaagtccggcgcctatacggtaaccgccacgcttggtacggcaagccagaccgccacggtgaacttcaaggcggacgcaacgacggcggtgaccacgctggtctccgatgtcaccacgcagctcgctgacggcgaatccgtcatcgcgctgaccgccaccgtgaaggatgcgaagggtaacctggtgccgaatgaggatgtggtgtttaccaccaccggcgcggcgacgttaggcgatgccaccgtgaccaagaccgttgccaccgacgcgaatggtcaggcgaagctcaacgtgacaaacaccaccgttgaaacggtgaccgtggcggcgaagtcctcgtccaacgccggcgataccggcggcagtctggacctgacatttaccgcgccaccgccagcaccgatgccgtcgactacaaaaattgcggtcaacggcgctaactttgcggtcgacgcgggcttcccgaaaacgggctatgacggggctaagttccagattgctatcaaaggcgctgcggcgaataacgccaattatacctggtcggataacagtgactgggtctcggtggacagtaccggtacggtgacctttaatggtgaggggacttcggatgaagtgaccattaccgccacacctaaagcgggtggcgtaacactggaatattcgttccagttagttacatggtttaaaaatatgaatgttagcgttaagtcaggcaacgcagaaggtgtatgtactaatttaggagagggatatcatctgccttcagtgcttgaaataacagatagcatggttactggcaaacacactgatcgtattcccgggagcaatcacctgtggtctgaatgggcagtagcatggggaaatttatggacttcggatctgagcgggacgtggcactattatgtggctacagataatactgacgttgatgtatgggtacaaaactttgatggtgagattgatgccgcctgctcaaaagcactataa

SEQ ID NO: 145957 - DNA, 807 bp, Enterobacter cloacae
atgttaattaacaagaaaagcgatttgccggagtatttcgatatagggaaatataaaacttttgaatcattagatgatagagagttttttaatcagttattaatgcgtcattatatggttgcagattatgataaatggatagatgaagatgatttgaaaataataatgtctaatccaatagctgacagaaaatatagtgaggatgcctttgcaggtgttgattacgtgcaatccgatatgcaggaaaataactcaaatgcaggtaagcggcttggttcgtcaatgctgattgagcctttacagcgtcacgatatattcaaaataatgcactctaaaaaagtagttgatgaatatgatgatgctgatactttggggctgtttgactgcattaatctgattgataatttcggggatgatttttttgttaaattggacttacgttatcctgatgaatttttaattgaagatttatcatctttgctttcattatggcgaaattccttaaatattccagacccaaataatgaactatcaataaattcttgggaagtagccagaaggaagataataagttatggaatcttcccctatgctgacctgttctgctggcaaaaaattacaggaaacaggataagcagtagtgttattgccggttcgattttccctgatctatcagtcggagaaaagaaactctgtgaaactattcggccttttttcgaaaaaaatcttgcaaatttttcgttggaaaagtttgagagagaaattcgggagaggttgattgagcaaaaaaataggcgtaggaaatga

SEQ ID NO: 145958 - DNA, 234 bp, Enterobacter cloacae
atggctaagattacccgtaatcaagcaattgaaattattaaaaattatttccttccacttgaagtgatagacgatggaaatactaatgagggtgatccgatttccttttgtgtttacctttccgaaaacagtgatgaacgtattgggcctttttccataaatcgcacagattttataattcaggaaaggctgataaaaggcattgaatttattaagaaagatcgcatcaaataa

SEQ ID NO: 145959 - DNA, 186 bp, Enterobacter cloacae
atggcaacgggttcaataaacaacaaatcaaaacaagtaaatgttcgagttccgcatgaagtgttagaggatatcgagtcagtgaaagataacggtgagagtaccgccggttttcttatcgtcgccgccatgggcgagatcaaacgccgccagcgcaagctgtcaaaaaaatctacaacggagtaa

SEQ ID NO: 145960 - DNA, 369 bp, Enterobacter cloacae
atgatcagcaatgtgaagtttatcgaactggaaaaccgtgtcgatttgctggttaaccgcgtcctggagttagaacagcaggtgcgcacactcaccgaaagccaggggggagatattcctcccggtatggccccggtcgccacgctggcggctgagttcggcatatcgacgaaaaaagccgaagagctggcaaaaaacacgggcgtgatgctggtcaggatgaaagctggtggctttattgcgccggatagcaaattcagagaggcggcgaggcaggttcttcgcagcgcgaagcgcaaatatggatcggcgtattggtatcacccattacttggcaaatttcagatgagcggaggtatcccacaatga

SEQ ID NO: 145961 - DNA, 513 bp, Enterobacter cloacae
atggacttcgattttgatgatatggcgtacccggatatttttttaatttccggcgaggagtttaaaggaagccggaacacaggaaaaaatcaggtagatatcccgtttactgacgaaccgcaaattgaattgggcgatattctgattcagaagattggaagccgtgagttaagtcttaaagttgtcgatctttcaatatcaaggaatggaacgctgaacgtgggtacaacgcatccccacttgcttacgctatccgtagagaatctttcttccgacgcacacaggacagcaaagagtatgaatacttttaacattggctccgtcagtggtgagcaagttcaaataggtgaaagtaatcatatgctggtgaatatcagtattactgaacttgtcgagaaagtggctaactctggcgatccacaggctaaatcaatactgaaacagttactggaaaatagcaccgttgccagtatcgttggcgctggcgcttccgcgctgttaggtctgctttaa

SEQ ID NO: 145962 - DNA, 153 bp, Enterobacter cloacae; identical to SEQ ID NO: 84401

SEQ ID NO: 145963 - DNA, 861 bp, Enterobacter cloacae
atgacgacgctggcgattgatattggcggaacaaagctcgccgccgccctgatagagggacacgttctgtcgatgcgtagggagtgccagactcccgccagtcagacgccgggcgcgctggaggaggcgttacgtgccctggttttacctctcgttacgcatgcccgtcgcgtggcggtggcgtcgacagggattattcaaaacggcgtactgacctccatcaatccttccaacctgggcgggctggcacattttccgctggtcgcctttttgaaagccatcacgcaattaccggtgacggcacttaacgacgcgcaggccgccgcatgggcagagttttgcgcgttgcaccagaaacaggatatggcatttctgacggtttcaaccggcgtgggcggcggtgttgtgctcaatggaaaactgcagtcgggcagcggtgggcttgcggggcattttggccacacgctggcggatccagatggacctctctgcggctgtgggcgaagagggtgcgttgaagccattgcctcagggcgaggtattgccgctcaggcgaaggaggagctggcagggctcgatgcgaaggcaatattcagtcgggatacaccgcaggcccgtaagctggtggcaaattctgcacaaacgctggctcgactgatcgctgacgtcaaagctgttaccgactgtcaggttatcgtggtcggcggcagcgtggggctggcggaaggatatttgcccctggtgaaagcctatttatcgcaggagccagaggtatatcaggtggcgcttcgggcagcgcattatcgccacgacgctgggctattgggtgcggcgctgttagcaacgggagacacgctatga

SEQ ID NO: 145964 - DNA, 468 bp, Enterobacter cloacae
atgatgatgggagagctgcagtcactggcatcgtcgggcctgcccgccgtactggtgaatgcgctggcgctggcggttgccgcccggccgcaggagaaagcgccgggccactacgaggtgcaaggcaaagatatctttatgaatgttatgcagttttgcactcagagtccggaacagaaaaaggcagagctgcacacacggtatattgacattcagctcctgttggccggtgaagagcggattctgtttggcgttgcggagtccgcgcgcgagtgcgaggaaatgcatagcgacgaggattatcagctttgccgtcgcatcgagggggaacaatcgctagcgttaaggccggggatgttcgtggtgtttatgccgggggaaccgcataaaccggggtgtatcaccgactcggcgggagagattaaaaaggccgtggtgaaggtccgcgccagcctgttaaccgcataa

SEQ ID NO: 145965 - DNA, 2169 bp, Enterobacter cloacae
atgataggtgtaagaataagtccgtattgtccacgcgttatatctgaaaacgatattcctgttcacaaaagtttgggcctggtagcccagacccgtaaagttggcgttccgcgcccgatgccatgcattgtgattctggtgcacggtgtgaacgatgttggggaagcttatcagaatcaggaaaaagggattatttccgggttaagcaagcggttgaaccgttcagacctgtatgcgcacgagtggaaagatttcatcatgtcccacaacgaagaggcgcaaaagaaaatctgtgagcctggacgttctcccattatccccttttactggggctataagccggttacgcatgaggagtggcgcgctgaccagaagcgttatcgggacgaagtcggaaagctgggcagcgacgcccacatcccttacgacgcctaccaggaagatgacgaaaccaagaaggccgcgctgggtaatgacagtaaaggggcgtttgcatttcagaacgactgctttaaaaatgcgctcgatatcaattttgccaaaggtggtggcacgtttgccaatgcaaccaccaatataccggacatgcttggcccgggggccggtggcgttgccgtcgctgccaccggttttatgacgttgcatgcaaatggcggcgatttcacccaccccatctttcccaacccacaccgcatctatcagttttttgccgctcagcggctgggggatttgattattcaaatccgaaaagagccagttacagagaacgatgtgattaacatcgtggcgcacagccagggcactatcattacaatgctggctaatatgctggtgaagcaggctggttatgatcccgttaactgcaccattctgacccactccccgtattcgctggaagagcgactattagaaaatgcccagtctggtcatcaccagaccagcgttgcccgtcagcagacattcagcaatttctgtgccctgatggcaacgcagtacaaaggtggcgaggtgactgaggcagacatgctggcgatggaggccgcttgcacattacgaaaaccgtcagataacccattacggcaggatgctcggttccgacgggataataacggcaaggtgtataattatttctgcccgaatgacggaacggtatccctgaaaaacattcagggcattggctggcgcggtatcccgcaaaacatcgcctgtcatattccaaacctgtatcagcgggtcttttaccagcatggtcatgtcggtttcccgccagacaaaacgtgcttcgaactgcccgcaatacagaaaggggatgcgaaatacagttcagttacgaacgcgatttactctgctcgtgatgttgtcatcaatggcgaagaattacctgagccatttgtatttgaattacagggtgagaaaaaccgaaaagacaacgacccgaaaacctgcgatataccctatgaagcttatatcgatccagaaagtcccgacgcctatatttcgtattccgcgaaagcccatgccctgagcagaacagcctcaggcatgtttcctatggataaatattattacccaacgatgaagccaggccattcgctgacccctgacgagctgcaagagatgacagttgagcggaagcacaaagtgattcagggagttgtgtcgggcgtcgatacgttcagaaacctgacgctggtttggctgaaaaaccgcgatgagctggaagatgaatggaagaaagctgatcccgttgggtacagccagcactcctccattgtgatgagcgagtatgcaccttcccaggccatggcctttgatttagccatcgggcaatgcaaatcttttgattataaggctggccgtttttgggaggatcttttgcatcgcgcggactggcgggatccgttgaataagaattttcaggctaaagaatattaccgaacaggaaaactggatgattctacgaccaaattttttatgaataaacctgacgcaatattaccgaaagatgaatttggggtagtgaataattatgctggtgtccgaccccataaacgcaacaggatggaaattgaatatggcattgttaagcctgttaagttcgaagaaaaaattattctgcaatgggaaatgccacgagcgttaaatataagccaaattaacgaaaagtag

SEQ ID NO: 145966 - DNA, 435 bp, Enterobacter cloacae
atgaaaacgatgcagttgtttttgattatgttagtgatatcgcgcgtggcttatgcaaatgactgtacttctgttgaagaaatggacagggcagataacgcagcctctgccattcaggactggcaaggcgtccattctttttacaaaaattacagacagtgtgatgagggatatatcgcagaagggatatcagcgactattgtcgggctgttagccaacaactggaagacctcccatcaactcatgcagctatctgtaagcgatcgcgcttttgagtcatggatgattaatcacatcgatacgaccacgaacgatcgtgctctcgagaaagtcgtgagaaatgccacggatagttgccaggaaggcgctaaagcgttctgcaaacagattgagaatgccgcacaaggcgcgttgaaggaactgcaaagccaatag

SEQ ID NO: 145967 - DNA, 1338 bp, Enterobacter cloacae
atgaaaatttaccgcccgctttgggaggatggggccgctctggccccgcaacagttccagcagcaggttcgctggaatgagcacgttgccgacatggtcgcccggatgggtatttcacatccctggggcgtggttgtggctgaatttgatgatgctgcgctggcgctctctcgcctgaatgccatccgtctggtggtacgctttcaggatggaactcttgtggataccgacctggcagatacgcttcctccggtctgtgacttgtctgttgcagccggcagtgaatctgttgatgtggttgtcgcactaccgctgctgagtgccagtggtggcaacctcgataacggccaggacagtgagcgtccgcgtcgctggaaagcggagcgtgtggtagtgcaggaactggccgggtatgaaagcggggagttggccattctgcgtcatgcgttgaccctgcgtttgtccagccaggaaaatacggcatacctgacctgtccggtagcccgtctggtgcgtaatgctcaggggcaatggagccgggaccctgcattcattccgacgatgctttccctttctgcaagcccgcttctgaccaccgaactgggtgacctgctgatccgtttacaggcccgccgccgtcgcctcatggccatgcgccgtgaaagcaatgagaggatggccgactttgcagtcgcggatgtctccctgttctggctactcaatgctctgaacagcgccgagccggtgctgacggaactgctgcagacaccggatcggcacccggagttgctgtaccgcgaactgacacgtctggctggcagcctgttgaccttctcgcttgagcacgacgccggggacattcctgcttatcagcatgatgcaccggaacgggtattcccaccactgctgacactgctcgataaactgctggaagcgagtctgccgtcgcgggtggtgagtatctacctagagcatcaggaccagatctggaaaggcgccctgcacgatgctcgcctgcgtgaaggggctgatttttacctttccgtacgtgcctccatgccgaaccatgaacttcagacgaaattcccgcagttgtgtaaggcgggcagctttgatgatgtttcggatgtggtgaatgtggctctcagcgggatggttatcaaacctctgacccatgttccggcggctatcccgttacgccttgagaaccagtacttctctctggatctgagtaccgatgcggcccgggcgatgctggaagcgggaagctgcaccttctacgccccgcgctcattgggagatgtgaaacttgaactctttgcggtgctgcgcacatga

SEQ ID NO: 145968 - DNA, 573 bp, Enterobacter cloacae
atgaccattcatgatgccgggaagaagaaaaagaaggacgacaagaagcaggacgatgattccgtcagaaaactgactaccggggaaatcgccttagccagaacggtattcggcaaccggatcgattacgagaaggtgaaaattcatcatggcagttatctgccgtttaatgcacaggatgccaatacggcaatgacgccaaatggtgaaatatatttcattaatcagtaccgggatgatttttcacagtcgacgtattcgcttcaacatatgtttattcacgaaatgagtcatgtctggcagcgtgaaaaaggaatgaatgttattggaagagggcttgtgagctggcttgtcagctatcgctatacgcttgatggccgcctggtgagtgactatccgatggagcagcaggcacagattattgccgataattttgttttacagacatttggctatgaaatctggtggcaccttgaaaataaaaaatatcccgatattacgcttgatggtgacacgtctgaggcagtaatacgcgaagggtataaaaattctctgagaggttttccatggtaa

SEQ ID NO: 145969 - DNA, 468 bp, Enterobacter cloacae
atggtaagcgtgagccattttcgaaaaattatctttatcgtttcattaggcatgtcttcggtagtcctgacagggtgcccggggcctggcgacagaatgagcctggatgaaactgcgcaggtgagcaggcagggtaatgacgtctgtatgagtattaatgatgcgcgagattatcagcctgcagacatggggatcaatcttcggggaacgctgcctaaagagaaaaaattcaacttctcgccaggacttaagattgttgatggtgcattgtgcattcctccgtcttaccactgtttcatggatggtaataaatatattgttgaattcgtgcttcattcagaaagtaacaaagatgaaccccggaattttgttgtcggaataggtgttaataaaacccaggtatataactttcctttgacctatcgcgaaatatcaaggccttatggttcaattgaaatttctgaatag

SEQ ID NO: 145970 - DNA, 210 bp, Enterobacter cloacae
atgaaggtttttatctttttaactttaatgattgtggaaattctgtttcttccggatacgtatttttacacatttgttaagcgctttatttccatcagcggtgacggtgaatacggcatgaacaattttgaaatgaccgtattgctggttaaaacccttgcctgcgcccttggggcaggagctgcaatcactctttttcgtactcgctga

SEQ ID NO: 145971 - DNA, 303 bp, Enterobacter cloacae
atgtaccacttcagtctgggtgtcgggctgcagagtgaagaagtagaaaatccctacttcggccagcagacgctcaatgaaggcgagatcattttccttatactggttaatctgttcacgcttcggatagtcggctttgagggtgaaatcatattcccagcctttcaggccatgctcctgcaatacttcagtgacgacttccggtaccgacttattgacgaaaaaacggtgggtacggaattgcttgcgcagcaaagacaggaacggctcaataataatctggtacgtcgcctggtcacgtga

SEQ ID NO: 145972 - DNA, 513 bp, Enterobacter cloacae
gtgctcttcgccgcgcttgtcctccatccgcagcttgttcaggcccgctgtgcggataacgttgcgcgtgctgtttgcttcagtgacgtggtcaacgtggcgggaatcatgcatcgcatgggcaatatacggacggtccgggtcgccctcatgaaacgcaatggcaacttcagtgccctggatcaacgggaagtgaaagccgtatttatcaccgccgtaaggtttggcgaagcgcaccggcatgctttccatgccctgttttttgtcatcacggtcggcatcaaacttcacccggtacatgccggatgcatcctgccaggcgtaaatgtcgttatctttggcactggtcacacgcgccatcagcgtaccgctgaccaccgggcgctttttggcggaaggacgccagcagcggttctcgtagtacggcatcccctcccacattacgatcaaggcatctttgcgactcgctatatagcccgtgcgggtaacgataatgccgttgtccgtttctga

SEQ ID NO: 145973 - DNA, 846 bp, Enterobacter cloacae
atgaataccaacgaagttagcgtcatcaaccttgaccagcttgtgtctatgagtagctacgatttcttgaccaaggtcatcaacccggctcgtgtggaggctggggagaagcctgtccgtaacaacgactttgtgtcccgtattgaagatgagctggacggtcaaaatgtagcctacgaaattttcgtaagcttcgggcaggacgttaaaagctataccctcaacactgaccagcttctactggtcgggatgcgtgagtctaaagctgtgcgtcgtaaggtcctagcctatattcgccagaaggagcaagaggtcctcgaacttcaggcccagcaacttcaggtcgcacagaccaaagctatctgctatgcgcccggtgctatcgtcctcgactccaagctggactccaagtcaggcgccacgcctaccgaggttattaaagctctggaccttaagttgaccagctctaagatgctgacagctagcgtcctgactggatatctgaagaccctgtgtcgtcctaacccattctacaccaagcgtgttactgagtttggcactacggatatagacctatcgaccggacgtccacgagccatcttcaataagaaaggtgagaccaacggctactatcgtctacagccacagcctaacgacaaagagcctaccatcaagattctacgcaagggttatgactggctgaaggataactggaaggatatcgctcatgacatgcgcacatccaatatcaaggttgtccgtcgtctggtggattctcacctgaatggtaaggctacaaagtcccagaaagcagcagcgggcaaggggtctgactatgggttctaa

SEQ ID NO: 145974 - DNA, 255 bp, Enterobacter cloacae
atgggttctaagcgactcactgatgaactgattatggagtcaatagcgacaaccatatgtttcattgagagacacggccctgagcatcctgcggaccctatcttactgacttctctgcttcggcatatacacgaagagatggcactgagagtcgacgagcgactgcctctagagataccagagggtctacctaacttccaagctcctatcaccagtgaatttgacgtggatgattggtctaacgaggacttctaa

SEQ ID NO: 145975 - DNA, 756 bp, Enterobacter cloacae
atgataacttttataatcaatcttaaacactcgtgcgaacgccgtgccaaaatggagtctcaactgttaaagttgaatattgcacacgagtttgttgaagcagttgatggtcgggaaatgacggaagctgaacgtaaaaatgttacacgtgaggtaaattatgctttccttccgggtgaagtgggttgcgcgctaagtcatcaaaaaatatataaaaaaataataaacgaaaatatagaagcagcgctgattcttgaagatgatgttgtacttagtagcgatcttcgcgaaatattaaataatattacacttagcaagactaagcccgagattatactccttagtcgggtcaataaatattacaaaaagtcaattaaaaatatatgcggctcatataatctacacaagacgcaccaggccacaacagcacatgcctatattattaatcaaaaagctgccgacaggctccttacaaacctttatcctgtgtggatggtttctgataaatggagcttattcgaagatctctctttggctaaaattcattcgttagtgccttatccagttcgtctttctgaagatgctaatgcgtcaaccattaatgaatctaaaggagatgccgtgctggatgccaaaaagaaacaaatatgggatgcactgatgcaggaaagacctttagcagcaaaacttcgtcaccgttatcgacgtgccattactccgttattcaatacaattatcaatcagggtaaaggataa

SEQ ID NO: 145976 - DNA, 2055 bp, Enterobacter cloacae
atgtcttcatttaatggttgggttactgctaaagagataactgagttacccggtttttcttctgccgttagcaccattttgcgcaaagcaaaaaatgaacagtggacatgcaggaaaagagaaggcgttaaaggtatcgcctatgaatttctcatcgaaagccttcctcatgatatgcagtcagccatccgcgaaaaagtgtatcagacagtgctggcctctaagccaggcgagcatgcactccgtgcggttgttgcacgtaaggccaccgcagaccgtcaggatatagccctgctgcgccagtgcccggtcattcttgagcagaaggtcggcgaactgaccattaaacaaaaacagatcgccgatgcccgcgcggcgctggcgatggaggttgaacgtctgcggaatgcgggttcatcacgcaccgctgccgtcaaatttatcgtgaaggctgcacgcaccgattcactgccagagcaccttaaagatgctgcggttatcgccaacgcccgcaagggttcaacccgtaaaggttttggtgagcgcagccttcaagagtgggtgtctatttacgaggcgtcccggccaggtattgagcgtctgacgctgcttgctcctggacaactgaaagctaggacgcctgaaaagatccagtggcttcctgactttctggcccactggcgatcaagaaaggggccgacgctaagggatgcttacagtgattttaaagctgaatgggaaaacacgtatgccgaccagccggcaattgcagccgcctgcccgtcatatgatgccgttcgccgcgccatggcaaaactgccaaagcgcgagcgtgtgcgcggtcgcgtcagcggttccgctgcgctggcttatgaatgcttccagaaacgtgactggtcccttatgccggttaatggctgctggattgcggatggtaaatccctggagatgaaggtggcacaccctgaccatggccgcccgttcactcctgaactgacgttaattattgatggccggacacgctttattacgggctggagcctggcactttcagaaagcgttattgctgtggctgatgcctaccgttacgccatgcgtcatttcggcaaaccgttatttgtgtattccgataacggcggcggtgaaacaaacaaaacgcttgatgccgatgtgacgggtattttcagccgcctcggtattgagcacccgaccagtattccggggcgtcctcagtctcgcggcatcatcgaacggcttaacaagggtgttccccgccgtgttgcgatgcagttcgatacgttcagcggcgacagtgctgaccgggagcatgcccgcatcacgtcgcgtgctatccagtcagccatcaaagcgcaggagaacggacgggagctgacgcctgtgcaacgtaatgctctgggtaaattgccctcctggcagcagctgcttgacgcaatcgccagcgaagttgatgcatacaacaacacgcatgaacatcgtgagcttccaaaacgtaacgggcgtcatatgacaccgtcggcctatcgtcgggccgttctcgaagctgaaggcgacgacattgaatatctgactgatgttgagctgcgcgaagcctttatgccggagatggtgcgtaccgcgcagcgtggctggttgcgtctttttaacaacgactacttctctgaagaattgatccaggtggatagcgaagaggttcgcgtggctttcgatattcacgatccctcttccgttatcgttcgccggatggatggtacctacgtctgtactgcgatctggaacggtaataaacgtgccgcaataccggtgagtgcaatggatgtggcagttgagaaacgccgccagcgccgcctcaaccgtattgaagacaaacgccaggaaattgaggcagagggccgctctgtattaccgggccagcgcttcgacgatctggggagctttatcccggctgaattcagccggattacggaagaagaacattatttcttcctcgaaaccgaccgtgaagaatatctgaaaaaaaccggtaatacccggtaa

SEQ ID NO: 145977 - DNA, 213 bp, Enterobacter cloacae; identical to SEQ ID NO: 81532

SEQ ID NO: 145978 - DNA, 657 bp, Enterobacter cloacae
atgaaagacgacaaagttgtacatcttggtagaaagaaaaatgcatttgaggacgagttgttagaaattgctcagcttctttcgcaggataatgaggatgcagctgatattgatgggggtaatcagacaatcccatcaatcaacgtcaatggttcagccaatgtgattggcaacggaaacaccgtaaataatgtaataacctttacaagatccatacagaaaaaaattcaggtcaaaacggcagatggagttattgatgcgacacaaaaattccagataaaaagccttgtagatgaatgggttgaaaattttaacgctataaagaagtcaaaactcacacaccaaaaagcatggtcacttcttaatcgccacatgaaagtgaatagttatcatgaaatcaaagacataaaccatgctaaagcaataaaattccttcgttcaagactgggcgaattgcgcaacatgccatccgctccgaaaaaagttcaagactggagagcacaaacaattaagtcaatccaagccaggtgctctgaaaaagggtggcaggcatggcgtaaactctatatgcaacagaaatttgaaaaaaattcgatgactgaacttaccgatgtagaactaaaacaactgtaccaaactgtatggaataagaggtga

SEQ ID NO: 145979 - DNA, 267 bp, Enterobacter cloacae
atgtacaatggcatcgtattgatcggtgacaaaacttctcatggcggaaaagtgatctccgcctcttccaatattactgtcgacgggaaaaaagccgcgttagtgggtgatatggtcaactgcccggtagatgggcatggaacgaatcctatcgtggaaggatcaccgcaccggacatttaacggttgcgctgttgtcgtcgatggctgtaaatgtcagtgcggttgcactgtaatttcaagtgctcagaacagcacggtaggataa

SEQ ID NO: 145980 - DNA, 768 bp, Enterobacter cloacae
atgtataagagattaaattcattcgtcttgatccagtttgttttattgctgaatggatgcgctcaggcgactgacagaacattatcaccaccatcgaattctgattgggttaatattgagataaaaaatccatctacgtatacaaagccttttcctctagaagtgctgtacacatcaacggcgtgtaaacgcgagttgatgagtatgcgggatggcaaatattatgagaaggtggggtataactcagtgaaaatcccacttcagaatcaacatgattcagatatttggatcgcaaaaatagcaaaagatggtggtggaaaatgtaactggaaactgagtgaattcaatctaggtattgaatacgttgacgctactcaccttggtaaggggctagtgccaggaaccgaggttggcgcgacaattgcgtttgatgacaatgcaacaaaaagtggtcggtttgatatatttaaaggttcggaacttattttgtctcctgcgtattaccctttaatagatagtaataaagatatcagtacggatgacatcttaaatttatttgggagagttaattttgtacaaaagaagatagtatcttctgccaaaaatcttcatataaagtttgagccaactcttgatgagtctaaagtagtcaggatgattgctccaatagaacaaaaaattggggtgtactataaaattatctaccctgatggcacgattgtgtctgatggaacaactcacccttatgtaaacagattaaaggattaa

SEQ ID NO: 145981 - DNA, 420 bp, Enterobacter cloacae
atgcaacaggccgggaagaaacagaaagattttaaagcgtcattgacgcaatcggatttaaatgatttcttccctaaaggcagcaacccagacaggggggttaatataaatatttttgaacactttatgacgtcctatatgccttatatgtataacaaggtgttagagttgattgataacgccggtatagtagaaaagtgcacgtttactgagcatatgtataatgttgattcatttagggagcagatggcagaaaataaaaatgatataccgactgatgaattatccagaaatgaaatgtttcttaatgtcgaaggtttgctgggagtgtcgctgactccaacattatctatgccgtctggcaatgatacgcttttgcggtttgctcaatatggagaagaggtaatggaaaatgtataa

SEQ ID NO: 145982 - DNA, 690 bp, Enterobacter cloacae
atgttacctgcataccactttcctgcaaatacagcatttaaaggatttaaattccgaacggatgagcttgaaaagcgtcatgtaatagaaatatgccctttcagagcatgggagcttgttctgcatcatcaaaaggactattccattgcgaatggaattaaccttggggcagcagcaatgcttgcctatgcagatgacagtactctggatacggtgtcaattacgcgcttttttattaaccagtgccaggatctatcccgcttacctcagctttataaagacggttcagcatggaatatgttagtacaggatgttccctatagtaagcggtattatcccccggtttttatagatacctcgcgcgatacttctcctaaggtagatgagaagggcacacttggaacagtaaagacacaggatgatactgctacaacaaaagcagacggtgatacacagctttattatgtttataacgaggataagttgattgttgccgggcgtggaacggccagcttgtttgatgtaggaacggatcttgcgtttaggccggtaaaatcaaaattatgcgatatagataaaacgcaatgcactccgttactacctgctgggaaagtgcatactgggttctggagtggatataacagagttgaaaaaaaatttagtaaagaagtttcaaaatttgaacaatga

SEQ ID NO: 145983 - DNA, 195 bp, Enterobacter cloacae
atgccgcacggtctggagctgaggctgacgtttgatggcaatcagctggctacggaaatggaaaaacgtgctttacgcgttagtcgcgatgcggaaaatgattctattgttcgccctgaagctgaagagaaaggtatatttggcattatactgttatcggtgaactttgtcagagtgcaccagacctggaattaa

SEQ ID NO: 145984 - DNA, 615 bp, Enterobacter cloacae
atggcacaactttatttctactattcggcaatgaatgccgggaaatccaccgcgttgctgcaatcctcgtacaattaccaggagcgcgggatgcgtaccgttgtctatacggctgaaattgacgatcgctttggcgcagggaaggtgagttccagaatagggctctcgtcgcctgccagactgtttaacccgaaaagcgatctgtttgaggacattcgtacagaacatgctttgcagcccattcactgtgttctggtagatgaaagccagtttctgacgcgtgaacaggttcatgccctttcagaggtggtcgatgagcttgatattcccgtgctgtgttatggcctgcgtacggatttccgcggtgagctctttgctggtagccaatatttgcttgcctggtcggataagcttgtcgaattgaaaacaatctgcttctgcggtcgcaaagccagcatggtgcttcgtctcgaccaggccgggaaaccttatgcagatggcgagcaggtggtgataggcggtaatgaacgctatgtttcagtctgtcgtaagcattataaagaagcgttgtctgtaggctcgctgacggcgattcagcacgacaacaggaaataa

SEQ ID NO: 145985 - DNA, 2346 bp, Enterobacter cloacae
atggagcagcatgggaacgagtttgcggtagtcgttgaagacattcgcctgctcacgcaggatgaaggtgattcgctgacgatactgtgggttctggaagggcaagccgaactgcaaaccgccgcaggacgcgagacggtgtcaaataacggtcttgcggtgataaaccgctatcagcgctggcggttcagtagccagagcgcgaacgtgacgcttcgtgtcgttctctccgggcggtgggtaatcaagctgtacaatgacttttttgcccatgactacgcggttccgacagagtccggtggaaactggccgcagtgtgacgaacttcggcacctgctgcgtcagcttctggtggtgacgctggtgaacgatccacaccgcttcaggctggaggcaaatcgctggctgagcgagatcctgctgctgctgattggccgctttcagcagcctgcccgccagaaaccccgggaccagcacgccgacgtcagcaagcgcattgcccgcgtgctggagcggatcaacgccagctatacccggcgcattacgctggccgaaattgcagcgagtgagttcgtctccgaagcgtggctctcccgcctctttcgaaaagagatgggtgtcagttttatgcagtacatcaccgccctgcggctggaaaaagcggctgatgccctgcgcctcaccagccgtcctttgcatcagattgcgctggaacacgggtttgccagcacgcgtatgatgaccgatcggttccggcgctatcacaatatgtctccgggcgagtttcgtaaggccaggcggcatcgctccgatgcgtctccgctgcgggcaggcacgggcgagcagcgctttcctatcgcggtggataggctgtttagcttgcttagaggcgctgagaaccgcggctgggaacccgctccgttaacccactctccgcgtcaggagcgaatagttgatctgcagcagctttatccgctctcgtccgcgctgcgccgcgcgaggctggtcgtcaccctgcgcgagctcgacgatttactgcgggaggatgttcgccagcatctggaggcgcttcacgaggcgatcccaattgaggggattgatatcgctgaaccttttctcagcagccgtctgttcgccacgggatgggacgatccccatatggcgggttacgcctgctggtacaatctgcagcagctgtttacctgggtagcaaaaaaaggctggacgatcctgctgcacacgggggtcaccacccgatgcgatcttctgaagcgctttttgcagctgtcggttaaccgatttttacccgatattaccgcaggctggcacgtcgtgatgcactggtctcctcaggcaagcgcggaaacccaggagcacgcctggcaggctcagcgggcgacggtcggggcctaccttccacaggcaaagtttggggtgtggcatcgcttctctcccgtgggtactgaactcggcgacgacgcgctgttccattctggcattctggaccaggccgatttcctcgcctgtcaggcggatgccaacgagctgctcgatctggcgcggctggatcctgcacatctctcctcgtctgaaaactatcccgtgctgaagatccgccaaatactctccgcccttcgccagcggcagcgcacgctgccggtatggttactctcgtggaatacccttaccgggaatacgcgggcaaccaacggctggttttttcgcggcgcgctgcttatgcaaaatttactcgggctttcagaacaggtctggctggcgggattctggctgaattccggtttgcagggggaagccaggacgaacaacaccctcgatacatcgagccttgcgcttcagtataatcacggccttccgcggcccatctactgggtgctctggctgtggcaacgcctgcggggagaagtgctcgtcaacgacaagagcgtgctgctgctccgccatcaggggggctatcagctgctgctgcgtaacgtggtggtgttcaatccgctgctctccagcgaggaggctttcatccaacgttttcaacagcaatatcatctgcagctacaggggatgcgcggcgagtggcgcatcaggcgccatcttttcgatcggcacaatggtgcgctctacccgctgctggaaggggtacgcagcgacagcgggcctgatgaagagatgtggcgctggattgcgcacaaagcgcgtccaacgctttccttacgcgatgaacggcttaatgacggctggcaaatgacagaatcactggaaagtaacgcgctcgtgctctatgagttcatgccgctaaacgggcgtgatgaagaggatcactccccgcgatag

SEQ ID NO: 145986 - DNA, 555 bp, Enterobacter cloacae
atggatagcgtcatgtatgaggagcgttttgaacgctggctgaaagtttccattggtttggcacgatttgatccttttttaccgagccttgtgcaaagtttggggaaaatggatgcaactctttgtgagacggatgtttctttagtagaaaagtataagcagggaggaactgcaaacgaagactacgagatgatacaagggcatcttactcactcatatttatggattttgggctcttatgaagtaattcgcactcttacgcagagcataaaggaaaacaaaagtgatgaccctgcggaagtgttagagcgttttcaaaatgcaaagaaacgttttgcacgcttaaggatacccttagctaaatttgaagccgccaaagcatacaataagactgactttaagattgcatatccaggatttgcctatcagattggcatagcatggcaagttagtgatgacgttgttatttcccgacaagaactttcagatttgtttttagagacgctagagtttactcgtgtcctaaagcttagaaggtcacttgcccaatcatga

SEQ ID NO: 145987 - DNA, 321 bp, Enterobacter cloacae
atgaataattcttggcaggatggctatttcactgttcgaggcttcgggacacttgctctgagatcattcgaacaacaggaccgtgaacgggccgtgctcacgttcagtaacggtgatgtgagagccaaaattcggacatgggtcaaggataacgccattcgcttctatctgtgggatcaaggcgactggaggtcttgcgactggcagcagcaacaacaagacgcgaattcagcttccattttgggagttgaattcacgtccgatataacttgctgtaattcatatagccaaatggcatggctattttttagcgtcacctga

SEQ ID NO: 145988 - DNA, 792 bp, Enterobacter cloacae
atgttccttgaaaactttaaaaataaggattttataatttactttatctatgtcgctgtatttatcgtgattgtgaatagagcatatggaatgtctaacttactaagatttgtctttcgctatctggcaattggttactcagatgcaagaatgaaaaaacttgatgacaaatggtttgatatccaactattcaaaataaccaatggaattaacaccaccaatttaaacgacgcaagactaatacaaagagggttaaatgaggggttactaaaaccatcatggtttttatttaccagttcatggggagacatcaccataaagatgtcgaaaaagaaattaatcttatcctatctaatgggactggttatatttatcatggggaattatgcatggattgagcaaacccaaattgttgatggattcgtcaagatcgaccacaaggaatttagttattatatttctaaagaaaaactgattataacatcatttaacagatctattgataatgccaccgtccatagtaaagaggattgcaagagtattacaggttcaattcctaaggactcaatgttctctatagcatgcacgaagctacttgatgatagactgtcgtataaatggtggcttgaaaaagaaatccagtccgtaaatagcaggaaaaatacgctaaggcttatttcttacatttattgtatcactagcgttttgtggggattttcattataccaattcaatcgcgccagcactcatgtcgtaaattataaattatcgatgcaaaatcaaagttcatag

SEQ ID NO: 145989 - DNA, 1164 bp, Enterobacter cloacae
atgtctatgaaaaatatgtttaaaggattttacactggtaacattaaagagaataacgaggtttacacagatgaaaacactatttttgttttcgatacaaatgttattttagatttgtatcgaaataactccgaaacaatatcagcaataaaaaaatctatagaacaagtaaaagatagagtattcctgccttattttactgcattagagtatcaaagaagaagacttggtgttattgatgatcaaaaacatttaatatctagtacaacgtcgccgatagttgaaataataacatattccagtaaaatgattgagaaatgcactaactctaaggctagacattacgaggggctaaataggcaggttttagacttgatctctcgttctaatgagctactcaacactggtttagaatctatgtatgaaacacttcaagagtccatagaagagctaaatacaaaagatatccacagagagtggatagattcaattttctctggaaaaataggcacaaaaaaagagcaagaatacattgataacttagatgttgaatgtaaaaaaagatttgattcaaaaacgcctcctggtttttgtgatatagacaaattaaataaaccagacaatattttcgtatacgacgggattaaataccaaagggcctttggcgacttctatatttggaaagagataatggagcatgccgcaaacatacaagcgaaaaatgttttccttataaccaatgacgccaaagatgattttatattcaaggtaggcagagataaagacaatagagaaaataaaggggtgcatgctatcttaagagaggaaatagtaaacactgctaacgttcaaaatttcgatgttttaaacacgaaagaactgattttaaatatcaacaacgcatttgatttaaagatagacactgggaaccttaatatttccacaggaaatagccacactgcaagagataaaattagcagtggggaataccgtattatacttgaaaataagataaaacgaactaaaatagaacttagtgagttatcccgcaaacttgaggcggcaaccgatccagaaataatagcaaggattagacttttaatgaaagggaagctaatatctaataagaaagcaaacgctctcctttcatcagttcaggaataa

SEQ ID NO: 145990 - DNA, 969 bp, Enterobacter cloacae
atgaatgaccactcttttttgatgaggaaaatatcattggaatcattgggatacatggaagattatttcgacgactcaatggaagaatcgctcctttctctagacgatgaaatcaggaacatgcgcttaagcgtgcaacatgccttcaccgacgatgatatggaactcgggaacttaagccgtactcttgacgatgaaatccggagcttgcagcttagtctgaagaactcattccctgacgatgatggacatctcggagagctaagccgaactcttgacgatgaaatccggagcttgcagcttagcctgaagcactcatttcctgacgatgatggacatctcggagagctaagccgctctttcgatgatgagcttcggagcttgcagcttagtctgaagcacaccttctttgatgaagatctgggggagatgagccgctctcttgacgatgaaatccggagcttgcagcttaatctgaagcattcattctctgacgatgatattagccgttctcttgacaatgaaatccggagcttgcagcttagcctgaagcactccttcattgatgatgatctacagcttactgagctgagccgctctcttgacgatgaaatccggagcttacagcttagtctgcagcactccttcattgatgatgtacagctcacggagctgagccgctctcttgatgatgaaatccggagcttgcacttcagtctgcagcaccctttcattgatgttgatttacaacttgcggagctgaagcgctctctcgatgatgaaatcagaggtttacacctcgtattcactgatgacgatgacgtacagagccgctaccttcatgatgattctaggattatgtataaggctcttaataatcgcttatttgatgatgatattcagttaaaggagataagccaatctttggataaagatttaagagtaatcagtcattacaaaaaaaaataa

SEQ ID NO: 145991 - DNA, 138 bp, Enterobacter cloacae
atgttcaccgcgaaagaaatcaaccgcctcaaaattcttcagggtatcactgaacgtaacctgagtcttggtcagcctgcggacatttttcatgaattaccgcttttagttcatcgcttgtgcatgagatcaatttaa

SEQ ID NO: 145992 - DNA, 555 bp, Enterobacter cloacae
atgaaaattaagcgaaagccctttgagcaattcttaatgcacgacatagaagagttaaatggggatttggaggaggcatatctagaagccgctttccctttgattggtcagattgtgatgtatttcaatacattggaaaaggacctggatagcataatctacgaaagtttcagtgaccgctctgatcaattaggtattattgttataggcagtatgaactactcagcgaagatagaccttttcaaaaggtactctgaccttttgcatctcgctttacaagaaacttatagtgagtatgactcgttgatcagagatctaagggaatgtggtcggttacggaatctgactgtacatgcagattggaataatacggaccttgaaggatatacttatctgggtgttaaaattaccaaggaaggaattaaccaagaatatattcagtttagcattgattccctgaacgatattcttactttgatacatcacacacgattcaaattaagtgactattgggaggctagaaacataatgcactccaaaagatcgcagaaataa

SEQ ID NO: 145993 - DNA, 294 bp, Enterobacter cloacae
atgaaaattgtaagggaggcgctggccggaacgcaggagtccagcgacctgatggtgaaaatcgctcccgctcacggcgagctggagatagtcatccacagtgaagtgattaagcagtttggcgagcaaattcgccaggtggtcaacgacacgttgcgcgccatgaacgtgcaccagggattaatcattattgaagacaaaggggcgctggactgtgtgatccgcgcccgcctgcaaagcgcgctgatgcgtgcagccgatgaacaggccatcaactggggggcgctgaaatga

SEQ ID NO: 145994 - DNA, 420 bp, Enterobacter cloacae
atgttacacgcacaagctaaaacgaagaaccagcgctcgattcagaccattcgtgataatacgagtgtaatcgcgagttttgagcctcgttcaatgtttcctgacactgttgaagtgcgtaggatgctgaaccgtacccagaaggattcgcagcacttcatcgttactctgaaaagcgacctcaagcgagcagtggacacgactgttgttaagccatttgcggagatcgccattcgtggtgagaacctacgctttaccgtgaagcctgaaaagcaatatccaaacctgtccttaaacgacgatgttattgtaatgattgaaacatccgttgcagatttcatggagaagcatttttctgctcacgttaaccgccgtgaagctaaaaatcaggattgcaaaaaggaatggcaccttctctaa

SEQ ID NO: 145995 - DNA, 735 bp, Enterobacter cloacae
atggcaccttctctaatcggcgacaattacgccaaagatctttcccaactcccgtctttccctggcgggagttttatttctcacacatcatgtttcattctgcctgacgacgtcgtcatcctgcgcttaacggaaacaacctacgatagcgccgattatgatcacatcgcggtagtagaagaagtttccttcaccgatgctgagttcattgccagccacatcgacgacttgcgtgacaacgacgggttggaggacagtgagatcgttgatcacatcctgtctctggagatggaggacgagggcaaatctgaagtgattgctcgatttgcttatgacaacttctctttcttagacccaaacgggaaaccagcagagggtaagcaaatccgaggtgcttatgttactcccgaacgagcaggtgctggtttggcgggtcagatttatcgtcatctgacggaagtccacaaacatctcatctgcgataacactcaaacagtctatggggcagccctgtgggcaaatacagttcgcaatgttgctggccgagttgatatctacaacgcagctaagcatgagtatgtcgaagagctaggggaaggcgccagaggagtaaatggcttcataccttgggacatcgggaaactacacccctcatcgttgggcaagtggcagcaatatcccttcaatccgaacattcagcaatgctattacttggtattaatcatttcagcttaa

SEQ ID NO: 145996 - DNA, 873 bp, Enterobacter cloacae
atgaaaaaacctaaatcatctacaagtaaaaaaatcttaacggcattggctgtcgcaatcgtagtagttggccttatgatgatatttttcccggataaatatcaaaattcacccttggctttcgggctgtgttacattttgggatcattttttgcttcggtttttcaaagagcatcaatcaagaagacggaaaatttgaaagaagaagttgatatgaatttcgatattctttacacctctcgaaaggtgaaaaagggtcataaaatcatattgatgagcaaggttgaacgtgagttaactaaaataattcatgatgaaaccttgggtaaggaaataaataaggagagaagggatgtgcttttatctctagtgcacaaatatggaaagcaaggtattgtcattgacaatgaagaaataaataaaatcctcagggctagtggtgattcattagactctatttctgaaaaagaagccaaagacaatgacaaactaaaaaaccagacagtaacacaattattcttagtttcaaaaaggcaagaactgtttatggctaaaaacatagctatattcagtactgctttctctgcaggttgcgcatatttttactttccagaccttaagctcattagtttagttccagccttcttatatttcgctctgttgattaaggaaaagatattaacctacagagttgaaatgggttattttggtaaaaataaatctgaagctattcagttattgatatttattgagaaaaataaagagaacctggacctaaacggctctggcggtagtaaaagaaagatatttaaagcaacagtcattgaggaacgccgtgttccggtgggaggaattgagggtgtttatcaatga

SEQ ID NO: 145997 - DNA, 405 bp, Enterobacter cloacae
atgaataatgatgatgcaactaaactagcaaatagagcattagacataatgttctttaattaccctataagaagtgctgtaggggtagttttaggattaattatctggttaggttttgatgcttatccggtattgtttgagcttctaagagcaacaaacggtaaaagtacgaagttctttttctctttaattggatacttactcgtccatagcaaaaccgtaatagagggctttacaggtaagatattgagtgaggacatgacacaaaccttgagctttattgaaaaaaccggactttctaaagctcagaaggatctgatgtatgttgaggcagttaccaaatacataaaagctctggacaaaaatgatctggaggagaaaaaaaaggaaatcgccgaagattaa

SEQ ID NO: 145998 - DNA, 363 bp, Enterobacter cloacae
atgacagccattgcatttattaactacagcttatattctttttataagctacagcttatcatggacgaaagtatgtggacgattctgttcggaaaggtattcgagcaatggctgcttgaacaggacgaaggattacaggataaggtactggcagacctgctaaatctgcaaaaatatggaccacgtcttccacggacctatgctgatacagttaaaggctcacggtataaccatatgaaagaattacgtattcaatatgctggacgtccgatacgtgctttcttcgcatttgatcctgtccgtcaggccattgtgctttgcgcgggcgataagagtaacgacaaagccttttatgaaaaatga

SEQ ID NO: 145999 - DNA, 1503 bp, Enterobacter cloacae
atggtttccagtcgccttgagatgcgcggtattagcctggccttttccggctttcaggcgctgtcgcgcgtggactttaccttaaccggcggatccgtacacgccctgaccggcgccaacggcgcggggaaatcgacgctgatggcggtgctgtgcggcacgcacgaccactatgagggcgagatcagcatcaacaaccagccggtgagcatccgcgaaccgcttgacgccaaacggctggggatccatctcgtgcagcaggaggtggacgtggcgctgatcccggggttaagtattgccgaaaacatcatgctcgaccagctggcgcagccggggcatcgcttcagctggcgcgcgatccgccagcaggcgagacaggcgctggcgcagctcgacgtgacgctggacgttcgccgttccatcgacggctgttcgctggccgaaaagcagcagattttgctggcgcgggcgctgtcccaccactgccgttttttgattcttgatgagcccaccgcgccgctggacgcgcatgagagcgagcgcctgtttggggtggtgagacgcttaaagcagcagggcatcggcgtggtgtttatctctcaccgcattcacgagctgaaggccatctgcgacaccctgacggtgttgcgcgacggcaagctgatcgagtccggcccgatggccgatcttagcggcgaagcgatcgtcgagaagatgctcggccacgtgctgagcgatatctatccgcccgcgaggccgccgcacggcgaagagacgctgctgcgggtggaaggtctgcatgacgacgcgctgctgaaagatatctccctgcacctgcgcaaaggcgaaatcctcgggattgccgggctggcgggcgcggggaaaaccgaactctgcaaggcgctgtttggcgccaccaaaagccgcgtggcgcgcggtgagctgaatcatcaatcctggcagccgtgcgacccggccgactccgtgctgcgcggtctggcgctggtgccggaggagcggcgcaaagagggcatttttatcgacgagccggtgagcatgaacctggcggtaacggcggataacagcttctcgcgctggagcctgtttggccatcgtcaggcgtggcgctgggcggaagaggtgatagcccgcgtcggcgtgcgcgcgcgtgggccggggcaggtgctgcgccgtctctccggcggcaaccagcagaaggttgccattggtaaatggctgcgcaatgacgccagcgtgctgatcttcgacgagccgaccaaaggcgtggacgtgaaggccaaaaccgatctgttccagctgattgacggcctggcgcgcgagggcaaaggggtaatttacgcctcgggcgaatttgccgaactggtcgggctgtgcgaccgcatctgcgtcctgtgggacgggcgcatcgtggcggaaatcgccggggccgaggcccgtgaagagacactactttattattcaaccggaggaacggcgtcgtga

SEQ ID NO: 146000 - DNA, 594 bp, Enterobacter cloacae
atggcgcgtttaaccacgattcgattgtacggtgtgctgggagcccggtttggccgtgttcacaggctggcggtgcagacatcagctgaggcggtaaaggcgctttgcatcaacctggacgggctggaaagctatcttctgaacgccaaaaagaatggcatgacgttcgcggtgtttcgcggcaggcgcaacattggcgcggatgattttaagaacctggccggaagcaccgatattcgcatagcaccagtgatggaagggtcaaaaaaagctggtttgttccagacgatattgggtgctgtcatggttgtggcgggcatcgtcgtcacgggcatgacgttcggttcagcaggtgtcattggcgcgggaatggtctccgctggtatcggaatgatggctggaggaatttaccagatgctttcgccccagcccaaaggactacaggggcgagacgatcctgacaataaaccatcatatgccttcggtggctcggtgaatacccttgcgatgggtaacccggtcgcgcttctttatggtgagcgcgagattggcggcgccatcatcagtgccggcatagtcgcagaagacatctaa

SEQ ID NO: 146001 - DNA, 471 bp, Enterobacter cloacae
atgattagcgcgctggttaagcgttactggatgcaattgctggtagtggtcctaattggtgtgttgacgttcttcgtcaaccgataccgagacaatgctatcacctacaaagaccagcgcgataaagccaccaaagctctcaacctggctaactccacgatcaaagatatgcaggtgcgccagcgagatttggctgcgctggatgccaaatacaccggagaactggctgatgccaaagctactatcgatcagcttgagcgcgatgttgcttctggcaagcgtcggctgcagctcaacgcaaactgtcccgcgaacggagaggccagcaccggcggcctgggcgatgctaccggcccccgacttactgactccgctgaacgggattatttcaacctcagagagcgaatcgtcacagtgacgaagcaggtcggctatctgcaggactacatccgcacgcagtgcctgaaatag

SEQ ID NO: 146002 - DNA, 228 bp, Enterobacter cloacae
atggcaaagaaacgcaacagcaaaactcgccaggggttatgtgggctgacgctggcacaagggcaccggctgacacgggagccagttcgcgaaaatgcgcaatgtgagcagtttgtatcgcagttcagtaccggggacggaaacgtactgatgccactgaatcgaagtatgcgccgttacgcaaaacacatcgggatcgaattgaaagaggggaaaaaacatggctaa

SEQ ID NO: 146003 - DNA, 864 bp, Enterobacter cloacae
atggctaaaaaaactgaattagtaccagtagcggctcgcgacttgcagatcatcgagtatcgcggtcaacgagttgtgaccactgagcagttggctgctggttatggcacggacgtgaacaatatcacggtcaactatcaccgcaaccaagaccgcttcgctgagggcaaacattactttgacgtccagggagaagagcttcgcgaaatgaagaactgggtatctttaagtaatgcagttggtaagcgagcccgcagcctgcgtctttggactgagcgtggcgcggccaaccacgcgaagatgctggaaaccgatcaggcgtggggatatcacgaagacctggtggaattttactttactcagcgtgatgccatcgtggcaccgtcaacacaggtggctctcagccgtaaacagctggcgatgatggttatcgaggccgaagaacgagccgaagccgctgcgctggaaaataaaacactgagcgtgacggttgagaatctggagaagcactttaccaaaggcatgacgatcccagcattcagcaaggcgctgaacggcgtcaacatcaacaaaatgatgtggtgggcgtccgagcgtggctgggtgtttaacgagcaacgcgacccagagaaagatccgcgctggcgcgtcgcctcatatgcccgcgacaaatatctgacggaagaccagacgcagatcaccccgcacggcaaggatgctttcacgaagtttacgccagtactgctggagaaaggctgtcaccgtctgtatcagctgtacatgaatggtgtgctgccaatgaaaaagacttggaatggcgagtacagccacgacaaagcgatttattcaccggaggccaaataa

SEQ ID NO: 146004 - DNA, 909 bp, Enterobacter cloacae
atgaaacagcaattattaagcttgactcctgttaaactccaggaggtagataacattagcatgggtgttttaccaaatggtgaaacattcctatcattacaaggcgtagcaaaattctgcgggctagccccaagctctataatacaattagctcaggattggtcttcaggtgatgctcaaatacgtagtagaggtcaacaacttactgagttaataaaggagtggactgaatcttcaattgtacccgatagcttatatgttgagttagatagtaaaaactccattacaggagtcattcacgccgtcccagagcaaattgtgatggcaataactgactattatgctcattatgctccaacgacaaaacaagaagctatcactaattatagaaaagcagcaaagcttggactaagaaattatatatacgaaagattaaattatagtgaaaaggatttaatagcgcagagctggagtttattccaagaaagagtacttaataatgaatgccccaaaggatattttaccatgtttgatgaagcaacgacagtaattgcttcattaattcgcaataatattgccgtagatgattcaattatgcctgatggaagcttaggtattcactgggcaaaatattggaaatctgagaacctctcaattcgatatggtgaaagaataaaaatacaccacaaatatccagaatcttataggcaattagatccagaggtaaatgcctatcccttaagtgcaatctctgattttaggttatggttccaaaatgtttaccttcctgaaaaatatcctagttatatcaaaaacaaagttaaggatgggaagatcacatcagaagcgatgccaatattactaaccgcagtgatgcctccagaggtttctactaaaagattaaattaa

SEQ ID NO: 146005 - DNA, 1311 bp, Enterobacter cloacae
atgcaacgtcttcatacctaccccgacatccgcgcgatgtttcgccgactgctgattgccaccgtaaccggcgggctggccgcgctggccgttgcggtattccgccacagcatgtacctgctggagtggctgcttctcagcaacgacagcggcagcctggtgaatgccgccgcgtcgctctcgccctggcggcgcgcattgacgccagcgctgggcgggctggccgccggactgctgctatggggatggcagcgtctgaccgcgcagcggcctcatgcccctaccgattacatggaggcgctggagaccggagacggccagtttgactacggcgccagccttgtgaaatcccttgcctcgctgctggtcgttgccagcggaagcgccatcgggcgtgaaggggcgatgatcctgcttgccgccctcgccgcctcccttttcgcccggcgctttacgccgaaatccgaatggaaattatggattgcctgcggtgccgccgccgggatggccagcgcctatcacgcccctcttgccggaagcctgttcatcgcggaaattctgtttggcacgctgatgctggcctcgctcggccccgtggtgattgcggcggtggtggcgctgcttacgacgcagctcctggctccgggcacgggtacgctctacgcggtccatctgagcggcatcctcaccgcggccgattatgctcttctcgtcgcgatgggcctgctggcgggcctctgcggaccgctgctgatgtggctgatggacttcagccacgggcttttcctgcgcctcaagctttcgccgccgtggcagctggcgctgggcggtgcgatcgtcgggctgctgtctctcctcacgccgaaggtgtgggggaatggctacagcgtggttcaggcttttctgctcgctccgccgctgctgacggtcattgccggggtgttcatctgtaagctgctggcagtgctggcgagcagcggatcgggcgcgcccggaggggtgtttacacctacgctgtttgtcgggatggcaacagggatgctgtttgcgcagctgttcgcgctgtggctaccgggttctgagacggcgattctgctggggctggcggggatggcaacgctacttgccgcgaccacgcatgcgcccattatgtcggcgctgatggtctgtgaaatgaccgggcaatatcttttactgcccggcctgctggtcgcctgcgtggtcgcgtccgtgctgtcgcggacgttacgccacgactcggtctacggtcaacacgccaccgagggcagagagatcgatgtactgcgctag

SEQ ID NO: 146006 - DNA, 276 bp, Enterobacter cloacae
atgcacgagagtttaaaaattatatcagtcgcgctgcccctcattgcgcttttcattctgttaagcttttttgtcagacgcattcgccaggcaaaacgcatcatttcagactgtaacgggatgaaaaagatatctgccaacccctcaatatttggcgggaatgcaggtaaaacctggttttatgatgacctgtttttatatgaagttaaaaaaacgccacccgtaagattgcgctggctaacatcattaaaatcgggccgggaaataccgaaataa

SEQ ID NO: 146007 - DNA, 1227 bp, Enterobacter cloacae
atgccttcgcagccgggttttattggatccagccgtcatttcataattttcacaatagaacgaaatcaccacttatcatataatgagataaacattcaaccgctaaaggaaaatatagtagctaaggtaatatctctttttaaccataaaggtggtgtaagcaaaacaacaactgttttccatctcggatggaagctagctgctcttggacaaagagtactgatcatcgatgcagatcctcaatgcaacttaactgggctgacgttaggtttggatgattatgaatccctggttcaattctatgacagcaagcaaaatacagatcttttcaatagtcttgcgccagagttttctttagaaagcacaccacacacgccagttggcaatactcctattacagggactaataatcctaacttattcattttagccggaaacataaggttttctgaacttgatacacaaatcgcgacagcgatgacaagtagcaatacactcccagtattgagaaaattcgtaggtgctttcaataagttagtcaggaaaatcgctgacgagcatagtatcgatattgttctagtcgacatgagccccagtgtgtcgtcaaccaatcagtgtattttgatgagttctgattactttatcatacctatttctcctgatttttattgctatcaggctatagattcgctaagtaatgtactacctaagtgggccaatgagatttcccccttcaaggttggaggggatcatccactgccaaaagccaatcccaaaatgcttggctttataactcaaaactacagaatctataccactagcagcagctcttctgacggagatgatgcggagcaacccaagcagatgtcaaaagcttatagcgactggctcgaacgcatcaaaactgttgctaataaaaaactaattcctgcattgagtgcgtcagaaatggttatttcggatgcaatttttacagaagcggttacgcacgacgccccattccatctagcaggtgtacagaactttagcggtttggtacccgtttctcaaagtttgtctaaaccgattttcgagctcactaaagaagatgggaactggactggtgcacgatggatgtgggaaaaaaatggtaaggaaaatggaataaaagtgaatattgaggaagctaatagggtttatcataacttggctcaatctgtacttaccatgatcaaattagaccaataa

SEQ ID NO: 146008 - DNA, 639 bp, Enterobacter cloacae
atgacaatgcaatcaggtgtattcgaaaaatataacccgttacacaaatggggagagtatagtgctgacaaagtggctaaactttcacaggaggaacttgagctatattacattgcgaaatctcctggggtgaatattgtttttctgaaagatgagtatggcaatgattggtatcgttggttaaagacgctttcaaaagaaacgcttaagatatcttttaatccagaatcaaaagagattattcacttttcttacgatgctagcgctatttttcctattaatcagattgtcgtggaagtcgaggcagacaatgtgcctgatgaattcacaaatgctggaaataatgcgctaggtggcgcgtttatttttgatggcgggaagataatccttgctccggtggattatcgggcagaagcacaacgaaaaaaactggaactgttaactcaggcaaataatgcgattaccatgcttcaggatgcgattgagctagatatggcgaccgaggaagacgctgcgaagctgcagacgtggaaaaaattccgtgtgttattaagccgtgttgacgtgagtaaacctgactggcctccattacctgatacagagataggagtcagcaagatcgtgccattgcctgactaa

SEQ ID NO: 146009 - DNA, 1758 bp, Enterobacter cloacae
atgacagtgaaatataaaacggttatcaccaaagccggtgccgaaaaactggctgccgcgaccgtcccgaacaagaagaaagtgaattttaccgcgatggccgtgggtgacggtgggggggcattaccggtgcccgatgccagtcagacaaaactcgtcaatgaggtttggcgtcatgagctaaacaaaatcagccaggacaacaagaatcaaaattatgtgatcgcggagttgctcattccaccagaaaccggcggtttctggatgcgagaaatggggctttacgatgatgccggcacgctgattgccgtcggtaacatggcggaaagctataagccgctgctggccgaagggtcaggccgagcacagaccgtacgtatggtggttatggtgagcaacatcgactcaatcgagctttcgatagatacctcactggtcatggcaacacaggattatgtcgacgataagctcgcagagcatgaggagtcacgcaggcatcctgatgccacgacaaaggataaagggtttacacagctcagtaacgcaaccgacagctcgtctgagacgctcgctgcgacgtcgaaagcggttaaggcggtatatgatcttgcaaccggaaaatacacggctcaggacgcgaccacggcgcaaaagggtatcgtccagctcagcagcgcaaccgacagcccgtttgaatctcttgcggccacaccaaaggccgtgaaggcggtcagcgatgatattaaaacgctgaaaaacagcctcggcgatgctgcttttagaaacatagctgagaatgctacaggggcattaattccggtaggatataaagggaattttaaatccgaatgtaatcatggggtgcttgattttgcgacatacccatttgttgtaggggaagcattgtttattgatgtacgtggatgcactaacaacccaccgtttctgaatcaagactattattatattaaggttatttgtgcgactagcccggcgcagggaggaagggttaataggcctttaattcaatttgtaagctatacaaattcgatacaggttctagccattcgcgaagatgatggtgttaacattggatggcgatattttagcactgtgcaatatgattccggcagtaaaacagttacgacgcccggttcaataagagcatttaatggcgcgactgaactttctcaaaatgcaatctttatccgtggcgaaaacaataagcatctttggttctttagagctgataatcaagaggcaggacttgtttacgctggtgatgataaagtgcttcgcttgcgcggtggaggtggcccttcacttaatatctctcctgacggaagtgtcgttgcaggtggttacttaggtgcgctcgctgatattcactcaaatcgcaatatcagtagtgatggatttattcaatctgctgcagggctgtatgacactcccggtgtgcgagtatattcgcctaacaacccgccgccaaaacaggacttgagcccttatgctacaaccgcatgggttcaggggagttttgcgtcgtctgcatggactatagcaaatttcctgcaaggagggctcaggcttgcatcgctgggagtcgcgacaaacggaaataatgataatgaatttgcatatgcgcctaacgggacagtagtcactgctgtgcagcaaaaaacgaattacacagcggtacaatatcgctcccttcaatataacatcggtggaaactggtacacagcgtgggtggcttaa

SEQ ID NO: 146010 - DNA, 492 bp, Enterobacter cloacae
atgcggaatatctttaagtttgcaagtgcttgtctttgtgttttatacctttcgggatgtgcatcgacaaagtctgttgatatcgtttcgactgaaaaaatagatgcaccgaaagtaattgccatatccggcgggaaaggattatgggtaaaagaaatacaaaaacgacttcgcagtaaaggttttacaattaaacgctctgtcagccagcaaacagttattgagaaagaaagtttagatagaacagctgtctacaaagacgcttcgacacgatacatccttgttcttgatggatacgctcccagcgattctttccaacgttgcgtaggtggcggcggttataagtttgactatataaacgctgaactagtagatcttgctaagaacgagactattttttcttactcaaactcgggttactcggaagggtgcccgatgggtggaacgatatttactgacattgaaaatctaatggtcaacgcttggaggtaa

SEQ ID NO: 146011 - DNA, 165 bp, Enterobacter cloacae
atgagcgacaaacagcagattttaaccgtcgaacagcaggatattgttttcagaaccaaagctgatttactggctgagctgattaaatttcagatacctgacaaacccgcggctgagcagttggcggaaatggttaacgccgcattcgaaaaattaactgtgtag

SEQ ID NO: 146012 - DNA, 261 bp, Enterobacter cloacae
atgcaggaatactcacacgttaacgagctgctggccgatgcctgttttgataactacgagctgcacagcgggcagcttattgaccagtatgtttgcgtagttcaggacaccggcgatgaatttatccagtgggaccttaccctgcgtaacagtcaggtagtccattttcgtgagctcaagcgtacgctgatgcagccgaaggttttggccgcttgcaagaaccacatcctgcgtactctgccaaaagcttatcccctatga

SEQ ID NO: 146013 - DNA, 339 bp, Enterobacter cloacae
atgaataccgattgcttcgactttaccaggtttgaaatgcgatacccaacgccagtctgggaagcggccatcgataatttcaatcggggatatcaatacttcctgtgctttatcatcaatgaacttagcgctgcgaccttcggtactaatgactacgtggtcgaattttgtgggtggttttgctttcacactgatgatgacgctttcgccttcagttgttgctttcccacaaaacagacgatgtccatcggtggcaacgatgaaaccctccgggtcaaagaaaataccgttcaggtaataacgtacgtcttttacgccagcgcatgtcagcgcagataa

SEQ ID NO: 146014 - DNA, 891 bp, Enterobacter cloacae
atgagcttagaaacaaatctggaacttaataaccagctggtaacccgtaataacgaattgctggaacgccttatcaccgcgctggcctctggcgtacctctccgcgcggacaccgtagcgcaggtgcaggaatatcgcgaaacggtaccggaaaacaaagcggaaaataccgttatccgcaaagttacgctggacgatctggagttcagcgacattatcgccctggctgcattctacccggccccgcaggagctcagcgaaacgatggtccagcgcgttgttgattatcgcgacgccgaaggcgataagcgcgttgtgcagatcgacgctctggacagcgccctgcagggtgttaaacgcgcaaaagaagttcataaagatgtgctgctccagctgtcgcgcgacatcatttcctactgggatgacctgacgactatcgccgagcgacgcacgtacgctgaaacatggctcgatgcgaagccgggtgagcgtgacacggtgaagccgaaaaagaccagcagtaagggcaaacaggagcgaaaaggcccgttctactggaaggacgtgaaagaggggcttcagggatgcgaagaaacagaggaagagctccagtgctatatcgataacggcgcagaagaaatcaacaaggtcgagtacctgcaactgaaggaagccgcagataaaggaggtactaagccggtcgacgaccagcctgattttgcggcactgcgtaaaaaggccgaagggttgatcctccagctggcgaaaggtggttaccgtgccgaagcggtggcgattctggaaaaacagggtgccaaaaaactcggcgaagtcgctgacgataaactcgcggacgtgatcgcccaggctgaaaaagcactggagggttaa

SEQ ID NO: 146015 - DNA, 549 bp, Enterobacter cloacae
atgaaaattaaactgcaaaatgttcgtctttccttccctgaattgttcgaagcaagccaggttaacggccagggggatttcaaattccgtgcatccttccttcttccacctgaccacccgggtaataaagccattgagcaggcaatcaagaaagtcgctacggacaaatggggagccaaagcggataccatcctttcccagattcgcggtaaccctatgcgcttcaactaccgtagtggcgatgagaaagccgattacgaagggtatgcgggcaatatggtaatcagcgccagcaacaaagcgcggccattggttattgatcgcgatctttccccgctcactgctcaggacggtcgcccttattctggctgctacgttaacgccaccattaccattttcgcatatgagaataacggtaaaggtatcagtgcctctctcggtggcgttcagttctacaaagatggcgatgcgttcagcggcggcggtgtggcaagcactgacgacttcgacgacatcagcgaaggtgcagacgcctccgatctggtttaa

SEQ ID NO: 146016 - DNA, 294 bp, Enterobacter cloacae
atggcctgtaactgcttttcagaagtgaaagaacgcatggaagcgcgcgtaaaagaggtgttgggtgactcggttcattcaatggacgagtgtgattttggtagtcgggtctggttgctcgaagaaggcgactactgcgcggtaatgctgccgttcaacgtacggtatcgcaagcgcaagaaaaacggcgatccggagcagcgcttaacaaacgctgacacgaaaatcgcaatcaattactgcccgttctgcggtaccaaattcaacggtaaaaaccagcctaacgaagggtaa

SEQ ID NO: 146017 - DNA, 189 bp, Enterobacter cloacae
gtgaaaacattaatccgcgttcttctctggattggcggaatttcgctgtttgccctgctggcttgttttgccggtgagcacgaccgcgaagattgtgaggttcggattgccaaagagctgaacaccaccgccgtatacatcaacggtcattgcatggtcaaaggctacggtcgtttcgacgggagatag

SEQ ID NO: 146018 - DNA, 255 bp, Enterobacter cloacae
atgaatatcacctatacggcgattaccattggcagcacgcaggcagtaaaaacctcagcaaatggggtaggcacggcgattatttataacaacgctgccgtatctccaaccagcaaagccacaattaacctgaaaagcggatcgaatacggtcgacctcggttttcaggctatccgtgattcagcggtggcggtgaaagatattcccaccggcgcgttcaccgccagcgcggtcatggtcatgacccaacagtaa

SEQ ID NO: 146019 - DNA, 1680 bp, Enterobacter cloacae
atgaaaatagtcatgttaaatataaactgtaattatcattcaccgcgccgcggtctactttttatcgctggcgtctggttatgcggtggtctgctctggctattaccgaatcaggggggctccggactggcgttaccccaaaatctgctggcctggtgcgcgatggcgctcatggtgctgtggggttcactcaccgaacgaaggatgaaatttatttatcctgctggcacccaactgattataacgggagccattctctggtcactgccgctgctatggtcgccgtcttccgcctggcagtggaacgccgcgacgaaagtgatggcgctgtgggggctgctcatcgtctggctggaactgcttaaaagccccataacgcccattatcagacgtcactggctgctgattatggtgatatcggcctttttacagaccattttctgtctgtatcaattgactgatatggcgacactgcccggcggacgcccgtacggcatcttccagcaggtaaacgttctggcttcttttttagccaccggcacggtttgtgccctttggcttaatacaacggcgcgccagaagtgggtaacgcgtttctgttccctgtcactggttatgctaccggccatgctggtgttgttgcaaagccgggcaggttatcttggcgctatcctgggctgcctgctcgtgctggtagcagcaaacaaaacgcgccgtcaccacggctatgtttctctgttgctgatgttagcgggtatcgttctgggtcttgtcgcgcttcatgttggtccacggttatttcctggttttgcgcctggcgtggttgataaaggtgattccgatagtcaacgctggtatatattgcaattgacctggcagctaatccagaaccatcctgtcatcggcaatggctacggcagttttgaagcattactcgcccaattggcgcaacaggcgactcgaggactggaaagcaaaacgattctctatccacacaatgaatttttctatacctggatggaaggggggctcgttgccgtcgcgggtgtgattctgatgatcggcggcatgctgaaaaggctgtggagtcggggagggcgtcgatggattggtctggcgatgttattacccattgcgctacacatgaatctggagtatccgctctatcaatcagtgacgcatggtctggctcttgtcatcctgctgggaattaacggcccaacagcgacgccggtgaaaaatgccgctcagggcaacatgatgacgttcaacagaattgtacgcgttttggccgcgggtgccgttttgatatttatggcaaccggtgtcgtaaccgaagtgcaaatgaccactattgagcaacatgggcttgcaccgcttgccagggatgaaagcacggctgttggaacattactcaatccctggagtcaacatgacaggctggattttgaccgccacgttgcgctgctgctgcggttcaatttgacaagagatcctgatttattaactcgcttccagtcctgggccgagcactataggaaggttcacaatagccctgatgtcaacttcagcctgatgatgatctacagggcgcaaaacagcgaaaacgctaaagagatatgtatgcaaagcaacgcactgtggccagaggatatccgctttacgtgcgtgaaattatag

SEQ ID NO: 146020 - DNA, 1218 bp, Enterobacter cloacae
atgaaagtgagcaatgtgaacagagtggtcgtggtcgtcgccgatgactttaccggcgcaaatgatgccggtgtcagcctggcgctgtgtggcaaaaaagtcagcgtggcgtttcatacaccgtttacccaggcgagcgatgtgctgatcgttaacaccgactcccgggcgctgaaggcatcggaggcggccgaaagggtggccgcactcggggctgaaatcgcggatgcccgctggctcattaaaaagatggattccacgctgcgcggcaacgcaggagccgaatctcaagttcttaaggcattaagcggcaggcggcaggtgatcgtggcgccggcatacccgtcagcagggcgaatcacgcggtacggcaggtgtctggtaaacggcgttccggtgaatgaaaccgaatttgccagcgatcccaaaacgcccgtcccgtctgccgctattgctgacctgtttaccggggtgagcgctaaaagcgtgaccgtgaaaatgctcactgccgaacttgcccgaggaacggaatggctcatcgtggatgcgcacaccgatgaggagatggacgccattatcgatgccgcgttggcctgctcacagacgccgctgctggtgggctctgctggactatgcgatgcgctggcccgtcatctggccccggtccggcgtaaacaactgctggccgtcgtcggctcgatgagtgagatcgcgcaacgacagattgcgctggcggtaagccaggcggacgtctcgtcggtactcattgatgtgaatgacgcgctgcgcggagacacgtccgggtatctcgaacagattgcgcaggtacttcagtctggccatcactgcattgtgcatacctgtgcgggccacgaggcccggcatcaggtcgagcaactctgccagcagcatcgtgtcactcgcgcaggcctgggcgaaaaaatctgtacgtttttaggcgaactgacccgacaggtgcttgcggcgcagacgcctgacgcgctgtacgtctccggtggcgacgtggcgatggctgtcgcgagggcactggacgctcgggggtttgagattaccgggtgcgtcgcacagtgcgtgccagtcggaaaatttctgggttgtggctggcagcagccggtaatgaccaaagcagggggcttcggaaacgaagagacgctgcttgaggtgttgcattttatcgaggagagactgagtgactaa

SEQ ID NO: 146021 - DNA, 471 bp, Enterobacter cloacae
atgattatcggtcatctcaacgccctgccgctggcagggcttccgtcgacgttgtacgccctgctatcccgtccggactgcacgctgcaggcgctcagcgaacgcgatgacgggtgctggcagccggaaaatgcaacctggttttgccagattggtccggcgcagacgcagccacgtgcagatcggcatacggagtaccatcgccagtgggccgatattcaggttgtactggcaggagaagaacatatttatgctggcgcacgccccactggcaagccggaggacgaagagcgtaaaccggatctctttattacttcacctgctgaacacagcgtgaggatccgtcttgccgcaggagactttgcggtcttttgtccgggagaaccccaccaggcgctgtgcgccgcagaggcgccgctgaccgttcgcaaagcggtatttaaaattccccgagcgatgctggaggtctga

SEQ ID NO: 146022 - DNA, 339 bp, Enterobacter cloacae
atgaaaaaactaatacttctgattgtagtgctgttggctggatgtacaactaaaccaaaggaatcattgggtgtatgtaccagtactgataatgtcactcaccagatcacaatggcacaagacggaacatacattatatgggaagggattaagatgcctagagtacatgtgaattcgatagaggatttctcattcgtatcatacgcagcaaaggataaaaacaatggaatggttacaatgaaagttaataatgactttacccatgtaacctaccatcactggcctaaagtatatgttggtggtgaaaatgattatgatgaatatggtggctgccactaa

SEQ ID NO: 146023 - DNA, 327 bp, Enterobacter cloacae
atgagaaagttttttattataataattacatttttgacacttaacacacatgtatttgccagtacattcacgtgttatgatcctaatgattatcaaagaatggaaatagtaaacagtactactggcactgctctgttcctacagataaatgacactatactttatcgccatggaactggagaaaacggagaaagtatttatgtcgatgagggtgcagaacgaaaagtatatataaaatggattgataacaatttaactttcatcaagttattttatcttaataaacttaaagtgattctaagctgtaaggaatataattctaaatga

SEQ ID NO: 146024 - DNA, 687 bp, Enterobacter cloacae
atggaaaaaaccgattcaacaagacatatcgccatcgtcgaaaattgcacgatgagtgctgttgggctaaagcatctttttgcgatgcccggcctgaatcattatcagctgcatctgtttagtgagtttgacagctttaagaaagcacttcagcacatcaattttttctcgctgatctattcatattccgatgcgcgagaagagcgtcgtagctgcctggcgcacctgcgggattttgcgtttacgcatggccatatccagcgcattatcctggtcgctgatgagatggaagcaagattaattagtcatctttccccgtcacgccttcacggtgtggtcagcaaatcgctgacgcttgagtgcctgcagaatgaactcatggtattgctgagtgaaaccctgcgcatcaatgacaatatgatgaatcactggtaccggagtcaaagcagaatgttaagcccaacggaacgggcaatattgcgttatatgtcttgcggctattccattcctcaaatcgcggcacagcttgaacgcaatattaagaccatccgggcgcataagtttaatgcgatggtgaagctgggggtaaactctgacgtagggctactcgatgcggcggatattattacccacctttctgcaagagaaccgcgaagttcggcactcagcaagccgacctttttataa

SEQ ID NO: 146025 - DNA, 2268 bp, Enterobacter cloacae
atgagtaccctgaatttctcccaaacagcagcctttatctggtctgtcgccgatctcctgcgcggtgattttaagcagtctcaatatggccgtattattctcccgtttaccctgttgcgccgcctggaatgcgtgcttgaagagacgaaagaggccgtcgttattgaggctcaaaaagtccgctcttcccccctacctgaagaagcgaaagaaaagttaatcctgcgcgccaccagcggactgacgttctttaacgcctcgcccctggacctgagcaaaatggggcaaaacgacatcagggccaacctggaaaactacattcaatatttttccagagacgcgcgcgagattttcgagcactttaaattcagcgaattcattgggttgctggatgaggctaatctcctctacaaagtggtgcagaaatttgccaccaccgatctcagcccgcaggccatctccaaccacgatatgggtctggtcttcgaggagctgatccgtcgttttgccgaaagctcgaatgaaaccgccggtgaacacttcacgccgcgcgatatcgtgcgtctcactacctcgctggtgtttatggaagacgacgaggctctcaccaaagagggcgtcattcgaaccctttacgatccgacggcgggcacgggcggatttctctctgccggaatggagtacgttcatgaactcaacccgaatgcagtgatgcgcgcgttcggacaagagctgaacccggagtcctacgctatctgcaaggctgatatgctgataaaaggtcaggacgtcagccgcatcaagctgggcaacaccctttctaacgatcagcttcccgccgatcgcttcgattacatgctgtcgaacccgccgtttggcgtggactggaagaagatcgaagccgacgttaacaacgagcatcgcaaaggatttgacgggcgtttcgggcccggcctgccgcgcgtttccgacggctcgctgctcttcctgctgcacctgatcagcaaaatgcgtgatgccgataccggcgggcgcatcgggatcattctcaacggttcaccgctgttcactggcggcgcgggcagcggcgaaagcgagatccgccgctacatccttgaagccgatctgctggaagggatcgtcgccctgcccaccgacatgttctacaacaccgggatcgccacctacgtgtggatcctgtcgaacaaaaaggcggcggagcgtaagggcaagatccagctgatcgacgccagcaagctatgcagcaaaatccgtaagtcattgggtgcgaagcgcaacatgatgagcgaggaagacatccggctcattacccgcacctttggcgacttcgacgtcgtggaagttaaaaacgccgatgaagaacgcaccctggcctgcaagatattcaacagcaccgactttggtttccgccgcctgaccattgagcgcccgctgcgtttaacggcccaggtcacggatgaatccattgccgcgctgcgctttgcgccaaaaccacttaacgcaccgatggcgtgcctgtacgacgcgttcggtgccttctggcaggacgagaactacggcaactttgccgagttcgaggtggaagcacgcgccgttatcaaggctgaattccctgagcttaaagagaagcagattaaggatctgctcgacgcaacgctgtggcgacaacagcgcgcgctgatggttaaagcgcaaaaaatccagacgtcgctcgacgggaaagcaggtggtctcgctcagccgagcgatgatttcaatcagttccagctgacgctcaaagaggcgtttaaaactgccgccgttaagctggatgccaaagagcataagcagtttatcgaggccattacccgcaaaaacccggacgcggagccggtcgtcaaaaaggtgctcagggaagatgcgcagccgctgtacggcgcgtttgcgtaccgcggacaggtggtggagtttgagcaggatgccgacctgcgcgacaacgagaacgtagcgctcgatccgtctgtttcgaccagcgatttgattgaaggctacgtgaaggcggaggtgctcccgcacgtaccggacgcgtggattaatgccgacaagcgcgatgcccgcgacggcgaggttggggtcgttggatatgagattccatttaaccggcatttttatgtctataagccaccgcgcccgctggaggagattgacgcggagctggatgcgctgagcgcggagattatgaagctgctgcaggaggtacactcctga

SEQ ID NO: 146026 - DNA, 135 bp, Enterobacter cloacae
atgcgctacgtcacaaaagctgctacactccgctccttcgcgacattgtggtttttgtcctcccctattcgttatatctccctgaaaactacacctgtgatggtcggggcggttcggagtttttatgtcttttga

SEQ ID NO: 146027 - DNA, 384 bp, Enterobacter cloacae
atgaataaatatctgtctggtctgtgtgttgtttcttttttttatttttcttcaataggttacgcgcactctgcgggtccaaataaagttcaggttagtatcgaacccagcaactttaatagaggatatatcccggtaatttctggcctcgatgaaatcgaggcttctgatttcagggagtcggatctacaggaaagcctgaggctgatgaagtccgacaaccgcaaagtcgatgagctaactcagaaggttttacagcttgagagaaagaattctgagcaggagagtaagatcgagcgattgcaaagaagccttgatgacatgaagcggagcaacgacaacctttcaaatcaggtcagcaatttatccggcaaaataaagtga

SEQ ID NO: 146028 - DNA, 855 bp, Enterobacter cloacae
atggattatatcttattagtattattattggccgtttgttttgctaatgctacatttatcagaatcaaatcaattgtggtggttattgcattacttatatttgctttctggtttatatcaaatatgtttaccggaaatggtgtaaatgatgcagtttattatcatcttagaagtaatgttcacgggacgtctattgatgatatattgcctaaagtttttgccgcaagcatatttattttgatttccatagcgataatatttgcgtcattccgatttcgaaaaaaattaccacggcacaatgtcacattttataatgttttgtttatcatatcccttttattattcgtttttcaatctaatgcaacccaaaatatatacaattcgcttctgaacttatcctatggaaatggggtaaaagtggccagggagtataacagcattgattacgaaatgaataataagtacaactatgtttttatttatgctgagagccttgaacgttcactgagaaacattgatggcatcaattatattccacaaataagcaaacttgcagatcaatatcttgaattcactgacatacgtcaaattccgggtatggggtggacaatggcaggaatggtcaatacccaatgtgctatcccattagtactccctcagggtaattcagcgaataatatgtctcatttcttgggtggggctgattgcattgcaacgcatttgaaaaaaagtggatacactacggaatttatacgtgggagtgataaagaatttgctggagggggtaagttcttttctcagcatggctggatttatcaacatgataaacaatatttgcttaatcatcacgggtaa

SEQ ID NO: 146029 - DNA, 204 bp, Enterobacter cloacae
atgagccagcatgatggcttttaccaccgacaagcccaagccacagccttccgggttcacatgtctggcgccattatcgcgctgaaagggctgaaacaggaaatcatgaaactctctggggatgcccggtcccccgtcctgaataaggatataattgcctttatcagaaacgccatttttcacgatgagcgtgcgcgaggttga

SEQ ID NO: 146030 - DNA, 342 bp, Enterobacter cloacae
atgaaaatgcataacgatccccactcctggacggagtttatcgaactactccacagctggtggcgtggcgaaacgccgatgggtgccgtcttgctatcggttgccatggccgcattacgaatcgcttacggcggtggcggctggaagaaaatgctccttgaaggggcaatctgtggagccctgacccttacagctgtgtcagctcttgattacttcaaccttccgcagtccctgtcgattgctatcggtggcgcgctcgggtttgttggcgtagagcaggttaaagttatggcttcccgggtgtttaattctcgctttggaggcggagatgcaaaccagtga

SEQ ID NO: 146031 - DNA, 225 bp, Enterobacter cloacae
atggactttgattcaagctccacggtaatggaatttaagcataccttccctattcctgaggggctttactgggatggaaagcgtttcgacactattagcggatatgttgagagtgaagcgactgctgatatgtataccaatctgctttctggctttattgcagggttagaagcgagcggaaggatgactgatttcaccgtcgaaccattcaacagaaacccataa

SEQ ID NO: 146032 - DNA, 249 bp, Enterobacter cloacae
atggaaagtagagttgcaagactggaatccgatattgagtacataaagcgcgatgtatctgatattaaatcggatattaagtctattgattccaggttagcaacaattgaaacagcaattggctcgcttaaaaccaccattaaagcctccgctgttgtcatcacagtggttttctctttttgcgcatatatttttggtaattatgtagccaaaatacttgatgcactaaatgggttggttctcaagtaa

SEQ ID NO: 146033 - DNA, 198 bp, Enterobacter cloacae
atggacttggatgaagaaaaagtgaacatgatggctcatgccgccgggcgcgcggtgatggagttatcgctggcggatctgcctgtgacgcaggaggctatcattgaaaaacttgaacagtaccggaaggaaactggcaacgtgatagggaagggcgtgaacagggatgctgctgagatagtgcggaaaggaaattaa

SEQ ID NO: 146034 - DNA, 435 bp, Enterobacter cloacae
gtgaatacatatttttatagcgccaaacacaacagcttttttccgctggaacttaaagatgattatatcaatggcatcggttggcccgaggatgctatcgaggtaacagaacaggtatatagcgaatttgcgggtgagccacctgaaggacaaaaaagagtagctggaaaaaatggattacccgaatgggaagacattcctcctccgacccatgaagaaattgtggcgcaagctgagatagaaaaacagaaccggactgatgctgcaaacgactacataaacagcaatcagtggccgggaaaagcggctatgggccgcttaaaagaaactgataaagcgagatataacacttggctggattacctggaaaatattgaatccgttgatacctcaacggccccggatatcacctggcctaatccgccggaagtgtag

SEQ ID NO: 146035 - DNA, 411 bp, Enterobacter cloacae
atgaaagagtttgcagtaattaaagatgggcttgtgattaatactattttgtgggatggcaaagataccagctttgcgaaagatattaatggcgagcttattgcaattcctgaggatagtcaggtaagtatcggatggagctatgatggcacgcagtttatctcccctccagaacctgaaaaaaccaaagatcagctaattcaggacgcgaaccttgagaaggaaggccgtataagcgctgccaatgattacatgaacagcaaacagtggcccggcaaagcggccataggtcggctaaagggtgacgagctggcgcagtacaatctatggctggattatcttgatgctctggaggtggttgacacctccggagcgcctaatatcaagtggcctacacttccggcggattag

SEQ ID NO: 146036 - DNA, 555 bp, Enterobacter cloacae
atgtttattgggtatgtaagggtgtcaacaaatgaccagaacactgcattgcagcgaaccgcgctggaatgcgcaggatgtgaactgatatttgaagacaagatcagcggtaaaacctcggagcgtccagggctaaaacgtgtgcttaagacgctgggaaagggggatacacttgtggtctggaaactagatcgccttgggcgcagcatgcgccatcttgtcctgctggtagaagagttgagggtccgagatatcaattttcgcagcctgaccgacagtatagatacgtctaccccaatgggacgtttcttctttcacgttatgggcgcattggctgagatggagcgtgaattaattgtggaacgtacaagagctggtctggcagcagcaagggctcaaggcagagtgggaggaagacgcccgaagtttacagctgaacagtgggatcagatggggagactaattgcagccggagaaacacggcagcgagttgcgcttattttcgatgccggtatatccactctttatcgtcggttcccggcttcatcattttaa

SEQ ID NO: 146037 - DNA, 237 bp, Enterobacter cloacae
atgggcacaccacgatttagacctgaatttaaggaagaagccgtccgtcaaatagcggagcgtggctattccgtgcctgaagtttccgaccggctgggcgcttctgcacaaagccactacaaatggatacgggctatcaaacctgacgacaataaaaagcacatccacgatcttctggaagccaaaagtgagatcatgaagctcagtgctaagctgaagcgtactgaagaagaatga

SEQ ID NO: 146038 - DNA, 1083 bp, Enterobacter cloacae
atgattaatgttacgaatgaaatgctcattgatgtagtcagtgatgcgcttacagggaagagggaaagccttctcatgcgactgagagttatggcaaaaaaactcaagaaagaatctccagagttagcgaacaaactggaaagcctgctgctgcataccagtggtgccgtcgctattgagcgcgcccagccacttatacctaaagccgctcccgttgatgctgacagtaggcaaaagttgttagttgaaacttatcctgtggttattgatgtagaacctgtctggcctagcaaaactgatgtgcaattaaatcggtttgtgatcgaatgggaaatgaaagaacgtctttataaagaggggcttcacccttccaggtctcttctcatgggagggcctccgggagttgggaagacgttagctgcaaaatggttggcttgtaagcttgatatgcctcttcttacacttgatcttgcgagcgtaatgagcagctatttaggcaaaacggggaataacataaaagcggttcttaattatgcttcgtcatttccatgtgtgctgctgcttgatgaatttgatgcaattgctaagaaaagagatgatgcaacagatgttggagaactcaagcgattagttactgtgctcttacaagctattgacgagtggcctaatacttctgtactaattgctgctacaaatcattcagaattactcgatccagcggcctggagacgatttgatagagtgattgattttgactatccaacaaaagacctaatcaaaagatatttaatgtctaaaaatattggtgatgatttggctgagtatatttcggctagattggataaggtttcttatgctgtaattgaaagagcaattaaccaggcgaagcgtaattctattatagaaaactctcctttaagttcatcattgatagatgagctattagaagatgagtctattgaaaatgttattagaacaatgttggctgaagatgtttcgcaaaggaagatttcacgtgacctaggtatacctagaactcaggtcagtaagtttgtgaaggctgagggtgaaggaaatgaatga

SEQ ID NO: 146039 - DNA, 2193 bp, Enterobacter cloacae
atgaatgataaaaatatgttgctagggtatggggaaactcttacgggttcaattaaattgaaccggggcggtggtaataaaaataaaccttatacctactctgaaaataaacctgttatatccgaacagttgagtgtgctgattgctgaaatcaataaaattccgatttcagcaatgccggaaggtaaggctgtggcaaaatttgtattacacccaacatttctggctaaaagctattttcctatagggttgttggaccgattttctcttggtagcatcggtagtaaagctattaaaattaagcctagaaaggatatcaagaagaaagggcgaaaagacgagtatactacggcctgtatttatgtttccggtaagcaggaagattttcagcaattccttgatgctatcaataaagatgcattaaccaaggggcagcaggatgattttattacgctggaaagcatttcgatgcttgaagtttctgataaagtaaaagcaatcaatggtcatgaagtgatgagcattgaggtggcactgcatacaccagaaaatacttcaagcgtaattgatacatttgaatcctttgctttgcaaaatggtgccgtcattgatacagcaagaagcataaaggttaaaggcttaacctttatgccaattaaagcaagtaaaggtgttgctttgaaacttgcggagttttctttccttagaacgttaagagaacttccagaattaagattgagtgaaccagttatcgcgcgctctgtggaacaaacatcccatcttagtttgccgacagaaggggctgtaaaccaaaatttgaaggtggctatatttgacggcggccttggggtagatgatttcagcccgtgggttactgaatacacctttaatggtaattctgccacaagtgctaagctactctcccatgggcaggatgtaacttctaccgttctatttggtgttctgggtacggaaacagaaaaattgacggtgccattttgtaatattgaccattatcgtgtattggactccaatgtaaataattcggatgttgatctttttgatgttttgatccgaattaaaagtgttttggaacagaatcattatgattatgtgaatttaagcttagggccaagattacccgtagatgatgatgatgtccatgtgtggacttctacgcttgaggaaattctggcaactggtgaaacgctttgcactatcgctgtaggaaatgatggtcatctccctgctcaattgaacagaatccagcctccagcagacttagttaatggtttgtctgtcggtgcggcgacatctttatctgatcactgggagcgttgttcttacagttgcatcggtcctgggcgaagccccggctttgtaaagcctgatggggtcgcatttggtgggaatgaggatgaaccttttcaagtatatagtccaatgcataatgggcttgccagcactgctggaacgagtttttcagccccgttggtgttgcgacaggcgatagcgttaagttcatcactgcaatacaacatcacacctctgactgctaaggcactccttatacatcatgctgaatgtaaaaaacttaatcgccatgaggtaggttggggtcgtttccctcatgatctgagtcaagtgatattctgcggggatgatgaggtaaaagttatctatcaaggaaaactgaagccatcccaacacatgcgagcgcttattcctgttcccgatgttctaatgaaaggtcgtgtgaatttgagggcaacattctgcttctcaagtccagtagatgctgaacaccctttaaactacaccagaagtggattggaagtgactatgcgtaaaggcatttcggatagtgatggactcacattccctcttttcaacctgaaaaatgtttatgctgatgaaaatgagcagcgcattgatgcccataaatgggagacgacattaagaagcgagcatacctttaaagaaggtgagttaactaatccttgctttgatatagcttattatggtcgcgattgcgggatgcctgttaacgtggatgagttagatgaattgccttatgttcttattgtaactttatccgctgaggaaatgcctgatttatataacctgataaggcaaaaatatcagacattgcagcctatccaggttcagcagcaaattattttgcgtgcttaa

SEQ ID NO: 146040 - DNA, 1494 bp, Enterobacter cloacae
atgaatacatcaacaattatctccagagtctggagcttctgtactaccttacgcgatgacggagtgggttatggcgactatctagaacaactcacttatctgatctttctgaaaatggctgatgaatactctaaaccgccatactctcgtgacgtgggcattcctacaaagtacaattggcaggcgctcaccagtaagaagggggcagagcttgaagtcctttatgtagagctgctgcgtgaattaggcaagcagaaaggtatgcttggccagattttcactaaagcgcaaaacaagattcaagacccggccaagttgtaccgccttatcgatatgattgatagtacccagtgggtcatgatgggtgcggatattaagggagatatctatgaagggttgctggaaaagaatgctgaagataccaagtccggtgcggggcagtattttacaccgagggctttgatccgcgccatggtagcatgtgttcgaccagaaccaggcaaaacaattgccgacccctcatgcggtacaggtggtttttttctggcggcctatgactttctaacaaatccagaaaatacttcactcgataaagagcaaaagcactttctgaagcacagcactttccatggtaacgaaatcgtcgccaatactcgtcgcctgtgtttaatgaatatgttcctacataacatcggtgaaattgatggcgatagtctggtttcccctaatgatgcgttaatcgcagccagccctgttagcgtggactatgtgctcgctaacccaccgtttggtaagaaaagttcaatgagctttaccaatgaagaaggcgagcaggaaacggatgaattgacctataatcgtcaagacttttgggccaaaacttctaacaagcagctcaacttcgttcagcatattcgtagcatgctgaaaactaccggcaaggccgcaatagttgtaccggataacgtcctatttgaggggggcgcaggagaaacgatccgtaagaagctattagaaaacacaacgttgcataccattctacggttacccaccggaattttttacgcacaaggcgtcaaagcgaacgtgttgtttttcgataaccagccagccagcccaaaggcatggacgaaagaggtatggttttatgattaccgaaccaatatccatcacacgctgaagaaaaagccaatgcgctttgaggatttagccgactttattgaatgctacaaccctaaaaatccaaccaaccgcaaagagacttggcacccagagaagaaccaagaaggccgctggcggaaatacagtatcgaggagttgcttgcacgtgataaaactagcttggatattttctggttaaaggataaaagtttaaccgatcttgataacctgccagaaccggatgaactggcagaaggaatcatagaaaatctcgaagctggattaaacagcttccgagaagtgcttagtggcctatctaaacaatccacataa

SEQ ID NO: 146041 - DNA, 1581 bp, Enterobacter cloacae
atggctattgaaactattgacactgttgtatttaaaaaagttgaatcaagaattttagatgttattccagaaagttgggtaaaaacaacgttgggtgaatgctttaaatggggaagtggtggcactcccaaaagcggtaatccagagtattacggtggaaacattccttggctggttattggtgatttaaacgacggcatcattaatgaatccacccaaaaaattaacgagaaaggcctgcaaaatagctccgccaaactagttgatgaaggtacattacttttagcaatgtatggctctatcggaaaactgggaatagctggtatgaagttagcgaccaatcaagcaatagcttttgctgaaaaaaatgagatcgaaacaaaatatctatttaatttccttcgatatgccagattagaactggccggtttgggaaagggcgcgacacaacagaatataagtcaaacagttattaaggcctttccatttccattagctccggtaaatgaacaaaagcgcattgtcgctaaaatcgaacaactattctctgagttggataatggaattaccgcgctggaaactgcccgtgaacagcttaaaatctaccgtcaagccgttctcaaacatgcctttgaaggcaagctcactgcaaagtggcgtgagaaaaatgccgataaactgaaatccactgaacaacttctagcccatatccagcaagagcgcgaatcccgctaccagcatcaactgaatgattggaagactgcgataaaagaatgggaagctaacggtaaagatggaaaaaaaccgggtaagcctaagaaaccatcccatcttaccccggtatctgaagcatcaaaagaagagcttccacagctaccagctagctggtcctacataaggcttggaaacttaatcgacgaacctgcttacggtacatccgccaaatgtgattatgaaacaggcgatcaaagcgtacttcgtattcccaatatttctgcgggaaaaatagacgactccgacttgaagttcgctaacttccaaaaaggtgaggttgaccatcttcgcttgatgtctggtgacattttaactatacgttccaatggaagcatatcgctggttggtagttgtgcacttatcaatgaaaaggatacaaaacatatatttgcaggttacttgatcagattaaggacaaataaaaaaacgctaaaaccagaatatttattggctgctatgagcagtcactttattcggaaacaaatagaatcatccgcaaaatcaacgagcggcgtgaacaatatcaatagtggggaattacaaaatattattcttcctttgacgacagtagaagaacaagaagaactgatgtcacggttagactctattctcccgttgattaattcaactgagattgaaattgataagcaactagtgaaagctgaaatactacgtcaatctatcctgaaaaaagcattctccggaaagttggtaacacaagatccccacgatgcacctgccagcgaactactggcgcatatccaaatgcaaaaaaatgagcgaaaaagaagagcaatcaaaagatga

SEQ ID NO: 146042 - DNA, 1170 bp, Enterobacter cloacae
atgtttaaatcagcaagttgttctgattatcttattggtacatttattaaaaaaatcatcaactcagaccattttgacaatacaatcattgttcttgtttcagatcatttgatgatggctaacgctgccagtaaagagcttgacagcattcaggacaagcgtacgaacaattttattattataaaaaaaggaattaaacccactaaaatcgccaaaccaggaacattacttgatgtctggccgactatacttgacgtctcttcggctgataaacctgattttggatttggtcacagtttacttcggaatgaaaaaagccagatattacaattatgggaaaaatctaaaaacattagtgactatctagggttttcgtcttcactatggaattacccttccctaaatgagaaattttcatttaaagatggcaaattgacaattggccaacaagaatataaatggcccctcttcggatccgctgataagaataaaaacatcaagagcatttattttgaagcctttgccttaaacgcgcaaaaaattactggggaagataatattctttattatataaatgattgttcagtaacatcaaaaagtaaacaaggtttatgtggttatgaactaacacataatagtacgacacagtaccaaataaatgaaaaaggtattttcaatagaagagaacttaacgttgcatctcctttgttttctgaggaacttattggcatttcgtctgggccacttaatgtccagacaggcattaatgataatactcaagagcaaaccatgccatatggggttaatttttacaaactggaaggagaaaataatgaacttaaactcttggccaattttaacacatgcaataacgttccagttgatgtgaatgcagtaaaaaacttgattggtaaagacagttcgactctcatcattgcttcaaatgagtctgttttttgtatcccttatgaaaccagaccatcagttaatgaattattgcgctcgaatgcggctactgacctggcccccagacagcaaataataggaacttatactaaaagtgatactaagttcattttagggagccctgatatcccattagatgtgtttataaacaaaacaaattataagctgaatgaattatgtaccattttcaaagactgtagataa

SEQ ID NO: 146043 - DNA, 447 bp, Enterobacter cloacae
  misc_feature (426)..(435): n is a, c, g, or t
atgtcaaaaagaaaaggaattattttagccggtggttcaggtactcgcctttaccctgtgacgatggcggttagtaaacagctgctgccaatctatgataagccgatgatttattatccgttaagcacgctgatgcttgcgggtattcgggatattctcatcatcagcacacctcaggataccccgcgctttgagcaattactggataacggtaaaaaatggggactgaacattgaatataaagtccaggaaagtcctgatggtcttgctcaggcatttatcattggtgaagagtttatcggtaacgattcttgtgcattagtccttggagacaatgttttctatggtcacgatttgccaaaagaacttgaaatggcaatgaatcaggaaaaaggagctacagtctttgcctatcatgtgaaagannnnnnnnnngccaaaaagtaa

SEQ ID NO: 146044 - DNA, 1083 bp, Enterobacter cloacae
atgaaaatattagttactggtggtgccgggttcatcggttcggcattagcgcgttacattattaaatcaacaactgattatgtggtgaatgttgataagttaacctatgcaggtaaccttcagtctttaaaagacattgaaaatagcgaacgttatgcttttgttcatgctgatatttgcgatgcacaggcgttagaagcaatcttttcaactcataaacctgatgcggtaatgcatctggcagcagaaagtcacgttgaccgttcaatcaccggccctgctgcgtttattgaaacgaatattgttggaacctacgtcttgcttgaagcagccagaaaatactggcaaaacctggaaggtgaaaagaaacagggatttcgtttccatcatatttcaaccgatgaagtgtatggggacctacctcatcctgatgaatgggataataacaaaagtcttccattgtttactgagcataccgcctatgctccaagcagcccgtactctgcctctaaagcatcaagcgatcatttagtacgcgcgtggcatcggacttataatttcccaactattgtgactaactgttcaaacaattatggaccttaccatttcccagaaaagttaatcccgttggtaattctcaatgcattacaaggtaaaccgttgcctatttatggcaaaggtgatcagatccgtgactggttgtacgttgaggatcatgcccgtgcactctataccgttatcacggaaggtatcgtaggtgaaacctacaatatcggcggttataatgagaaaaagaatattgaagtagtacagaccatctgcaatattcttgacgaaataaagccgaagaatacctcgtacagcgaacaaatcacttatgttgccgatcgcccaggccacgatcgacgctatgcaatcgatgccagtaaaatcactctggaactcggctggaaacctcaagagacctttgaatctggtattcagaaaacgattcattggtatcttgataaccaggattgggtccaaaatattatgagtggtgcctatcaggactggatcaataaaaattacgagcaacgctaa

SEQ ID NO: 146045 - DNA, 585 bp, Enterobacter cloacae
atgtacgagttgatgttcaaggtcaaacgaaaaatagccattcttttttcttcatttacatttcgcatttcatttaaaaaattcggaattaaaagtggtatttttaagcctgatatattgcaaggcatgaagtatatagaggttggcgatagagtagtaattcaaccgggattatgggccttggcattaaaaattgacaaccataatccgattctgaatataggtgatgacgtttatattggtcgcttttttcacattgtaagtgttcgtcgtgtagttatcgaaaaggatgttcttatcgccgataaggtatatatatcagataaccttcatgaatacaaagatattcagattccagtcagccagcaaccggttatatttaaagacgatgtagttattaaagaaggcgcctggataggggaaaatgtctctataattggtgcttgcattggtagaaatagtgtagttgcagcaaactctgtagtgacaaaagatatacctgattattgtgtttgtgctggtgtacctgcaaaagtaatcaaaaaatactgtttcgaacgaaatgaatggataagtgttctttaa

SEQ ID NO: 146046 - DNA, 594 bp, Enterobacter cloacae
atgaagcaagctttatcgagaattaaaataaaattgttatcatatttttataaaagaaaaaatcggtctacacaattcggtcgctacactgttttatttcgtcgcgcaaatataactaattctatagtaggtgattatacatatttcgcaggcacagcctctgtaaacaattgtcagattggtaaattttgttctattgctgaaggtgttaaaataggtcttggcaaacatccagttggttttttttcaacacatccgatattttactctgaaaatacctgttttccatatagattgaaaaatcatagagttaatgaaaaagtgattgagtctatcgctgaatccgagaaaatcattataggcaatgatgtttggattggcgtaaatgccattgtaatggatggtgtgactattggcgatggagccgtcattggggctggggcggttgttaccaaagatgttcaaccctatactattgtaggtggtgttcctgcgaaattcatacgggatagacaaaatataaattgtccctggtgggagtttgatgtagatacccttgtagatttttcctcaaaatttaaaaagagattataa

SEQ ID NO: 146047 - DNA, 138 bp, Enterobacter cloacae
atgaagccagaaacgttagagattctccgtactcgctggcagcgcctccggatttaccgccgcccaggttccgtgctggttgattaccgcattctccgtaatttcgttcgtatctaccaccctgcaggagtcgcataa

SEQ ID NO: 146048 - DNA, 135 bp, Enterobacter cloacae
atgaaaacgttatttttattgttgctggtaataagccatagcgtctttgccaactgctgggataaagccgccagttattatcatgtggatccttatctgttgtatgcaattgcggtaatggtgccaacttactga

SEQ ID NO: 146049 - DNA, 2052 bp, Enterobacter cloacae
gtggcgattcacgacccgtgggccgccctgcagaaacctcaggctggcgtcagcaactgggacgacccctacaaaggcaacttcggccagctgatggcgatgaagaaagccaatccagggctgaaagtgctgccgtctatcggtggctggacgctgtctgacccgttcttcaaaatgcacgacccggcgatccgcgcgcgcttcgtcgcgtccgtaaaagatttcctgaaaacctggaaattcttcgacggcgtagacatcgactgggaattccctggcggcggcggtcagaacgaaacgctgggcaacccgcagcaggataaagagacgtataccgcactgatgcgcgaactgcgcaccatgatgaatgaactgtcagccgaaaccggccgtacctttgaactgacctcagcaatcggttcaggcagcgacaaaattgaagacgttgattacaccgctgcccagcagtacatggatcatatcttcctgatgagctacgacttctacggcggctggagcaacaccgatctgggtcatcaggcggcactgcgtgcgccggcgaacaaaccggatactaattacaccaccgaaaacggcgtgaatgcgctgctggcacagggcgtacagcccggcaaaattgtcgtggggacggccatgtacggtcgcggctggaccggcgttcacggttacagcaataacaacccgttcaccggcacggcaacgggcatggtgaaagggacctgggagccgggcgtggttgactatcgtcagatcgttaacgagtacaaaggcaaagcgggctgggaatacaactatgatgccaccgctgaagcgccgtatctgtttaacaaaaccaccggcgatctgatcacctatgaagacgcgcgttccgcaacggcgaaaggtcagtatgtgctggcgaaaaacctgggcggtctgtttgcctggtccatcgactccgatactggagacattctgaacgcgatgaatgaaagcctgacgggcggcggcgctgcgccggttgatccggtagtacccaaccatgcccctgtggcgactgccgctgaccagagcgtaaccggtccggcgacggtgacgctggatggctcggcttccaccgatccggatggcgatgccatcacctacaagtggacgcagatctctggtccatccgtgaccatcaccaacagcaccaaagcgaaagcgacctttaacgttgccgctgtcaccagtaaccagactctggcgttccgcctgacggttactgacgcgaaagggttgagcagcaccgctgacgtccaggtcgtgaacaaagcgccgaaagcaaaccaggcgccggtcgtgaaccagatggaagccgtgacgctggaagcgggccagagctactctctgcacgcgcaggcgagcgatcctgatggcgacgcgctgacctactcctggagcgttcctgcgaatatgcaggcgacaggcgcagacaccgcgaacctgaacatcaccgcgccggacgtggacacggaatcaacttacacgctgaccgtggtggtaagcgatggcaagtccagcgtacagactaacgtccaggtgacggtaacgcctaaagcggctgaaacgccgtctgacgaaggaaatactccatttgatgaaggcaacacgccgtctgacgaaggtaacacccctgccgatgaaggcaacacgccgtctgacgaaggttctgccaccaatagctgcgataaccctgttgacgccaatgccagtaagtatgctgcctggagcgcaagcaaggtttacaacgccgggaataccgtcagcttcgacaacctggtctggaaagcaaaatactggactcagggcaaccagccgggcttcggcgtggatgcatgggagctggtcagtcaggtgaaattcaactggcgctccgacgtggtttataacggcggcgacaccacgacctacaacggttacacctacaccgccaaatggtggacgaagggtgataaaccgggtagcagcgatgtatgggtgaaaaaaggccctgcgactgactgccagtaa

SEQ ID NO: 146050 - DNA, 501 bp, Enterobacter cloacae
atggcgcatccgcaggaaacacgggaaaaactgcgacgatcttatatcttcggccagatgtcgctcgaaatcgcctccgctcaggctggcgtggcatttgcgacagctcgccgctggaaaaaggaagcacaggacgcaggcgatgactgggataagttacgcgccgctcaccttatggccggtaatggacttgaagagattggccgcgccattctcaccgggttaatgacccagtatcagaccacgctggaactgcttacaaccgagtctcagctccctccgggggaacgcgtcgagcttctggcaagccttgctgatgcatttaacaaagctgtcgcagcaaacaagaaaatactgccggaggtaagccagctggcggtggcgctggatgttatccagaagctcagcgcatttgtcgccgagcactatccaaagcatctggccgcattcgtggaaatccttgaacccttcggcaaggagatggagcaacactatggctga

SEQ ID NO: 146051 - DNA, 732 bp, Enterobacter cloacae
gtgcaggatagttccgatatacaccacatcgaacttggcccccgcgccgccaagcggcaggaccgtttttttgagccagttatcgagcttgtcacgctgctcagggttacgcaccagctcgtcgttctcgatatcatcgagcacagccaggtcaggacgatacgggccatggcgcagaccacgcagctttttaccactaccggcgacctgaaccttaatgtcgttacgggtgaggatggtcccggcctgccagacgcggccaccacccgtcgcttcagggaagtccatcagcaggtgggggttaaactgcagttccgcctttatcgcctccagcatcggataggcctggtcgatggagtccataatgatgaccgggtaatgcttgagcgccagcacaatgcaccagatgacaaaaagctgactcacgatggtggatttggcttcaccacgcggagccgctatcgcatcgttctggctccccgtggcctggatgatctcaggcaggcgcttataaagatagttatgcagttcactgcgggcggaatggcggacatagtgcgggaaataatgctgcacaaagtattcaaaccccgttacagggtcagcaacgaggccacgacgcgcagcgacagctgcagcggaggggtcaaagcccacatcttcggcttcaatggtgcgacgcagactggcggagagttccgccagttcggcaagaaaatctttgctggataa

SEQ ID NO: 146052 - DNA, 189 bp, Enterobacter cloacae
atggccacggcggggaacagctttaaattcgaaattgccagcgccggaaacggccagcatccagagcatatgcagggcatcaggcccgtcatcatggtcagctttggggaagtgccggagctggtcgatgagagtggtctgcgaagggtgcaagcgtatcaggccgttggccatatgtggctgcagtga

SEQ ID NO: 146053 - DNA, 393 bp, Enterobacter cloacae
atggaaaagcagcagcttttatatggcgttaaatacggtgataaagtccattttgactttgccgtcaggctgcctgttgtcagggacactattgaagccctgcgtctcacggatgaggcttgcggaacaaccgaaggggcttcggcggggatgtattatcgtgtagcgctgatggcacaggcaattgaagaacttggttcactgaataaggaagacataacaccagagttactccttgatgagttgaatgatgatgactttgacatcattgatgctcagattaacgctgttaaaaaaaagcggatggatttgaacaaaaactcaccggctaccgaaccctcgtcctcgcactcggacgatacgggatcagtgagcagcaaatcggaagcatga

SEQ ID NO: 146054 - DNA, 498 bp, Enterobacter cloacae
atgagcaatctttttacggcctcgagggacttcgaggagaaattgaaagcgcagcagcagagtaccggcgagatgctgaaggccgcattcagcgagcacgagcagtctgtcggagcggaactgagcgcaagcgcgaggagaatcagcgacgccatcagcgcccacgagcagagtatgagcgaggcgatggagaaaaaccggcggagcgtgctgctgacggcagggaggacatggcttaccatcctgatggtttcagcgctgctgatcggcacgagcgggagcattctgtggtggcaggggcagcagataaccgacaattacacgacccttcgccagcaggaggacgccctggcgaagatgagcgcgaaaacatggggtgtgagctaccagagcgacagcaacggccggttcctggtgctgccgaagggagcgaaagccgaaacaggctggacagtggacagcgggaagcggaacgcggtgaagctggtacaggagtag

SEQ ID NO: 146055 - DNA, 369 bp, Enterobacter cloacae
atggcgggaaaagtacgtggaatgcgcgaggcgaaggctaatctgaatcgaatcattcaggacattcaggggcgcaaggtagtgagggccatccagtcagcgctaattatcggcggttcacaggccgcgctgtatacgccaatcgacacttcaacgctgctaaacagccagtttcgcgacataaccgtgaaaggtagtcgggtgactggtcgtgtgggctactccgctaattacgcgattttcgttcacgatccgaatgtgcctcagaccttccgccgggccaccgcgcggaaagagttcctgaccaaaggctttgaggatacccgcagccagattgatgcggtgatcgccaaggagatgtcgttatga

SEQ ID NO: 146056 - DNA, 678 bp, Enterobacter cloacae
atgaccgctttaaccgatattggcgaactctctatcagcgacagccgcgaaggcgggaaagattacctgttgcgaccttcattcgaggctatgacgaggatcggcaatccggaagagattgtgcaggcgtacgccactattcatggcaatgatgtcgctcaactcattgatgtgtgcgctggcacgctggggcgttttcctgaatggctggccccatcattcaaccgcgctgccgagaagctgttatcaacgtgcatgctggtgctgcaggcgtgctgcgatgacgacctgacaccgatgatcggagaatggaaagggtggcggcattgcgtcgtctaccgaccagggcaaatgccgaagaacgacatcatcgtgctggcgcagcacctcatgcagcacggcgtcgtcggaaaggcaaaggttcgccagctgcagcgccacgaaacaggtgcgagaactaacgaatttaaagccttcgactacatcagcgcggcgcgtactcatttcggcatgatccgcgaagaagcctctcagttaacgatgaccgaatttcagatgcttctgtcggcaaaatacccggagcagaaaggcttcactcgcgatgagtacgatgcgatcgccgatgattacatggcgaagaaagcgaagcgattagcccgggcggaacgggccaagtaa

SEQ ID NO: 146057 - DNA, 369 bp, Enterobacter cloacae
ttgctgcactgggtccacgccgccagcagcttcctgctgcgggctgacggcctgatcggcacggattttcgcaaggttggcctggtgggttgcttccagtctctcagatgtctgattgaactgctcctgactgattttcttcgcagccagagcggtattcagatcctcaacatcctgcttatagctggcgttttctcgcgcttctggcaggagcttctcggctgccgcctgcgccttaatggcattggccgtatcccatttctctgcagcatactgccgggcctgtgcgatctgggcctgagtcgcacctttcccaagagattgctcggcattgagcatagcctgctcgcggctgagttcttgagttga

SEQ ID NO: 146058 - DNA, 558 bp, Enterobacter cloacae
atgccaccttcgcctacctggtacataccgccagccgtcaccggcccgccgtttttacgtttaccgagaaggttagcaccaataacgcccgcaaccgcaccgagaccgatagccgccgctgttcccattgaggcaatggaggataggatagccgccggagtccatgccgcagcggttgtcgctgccgctgctgtgctggtagccgtctgcgtggccactgccgccgtctgcactgctgtcactgtgccgatagccgccgtttgtgccgcctggcccatgatggctgacttgacccactcaacgcccatctgcacgaaggtattaaccaggctgttgagaaccgtgctaccaagagatcgcattgcatcactagccgtcatgctgccggtgataattcccgttaatgcgttggaggcatttcctgctagcgcatcgattgaagccgccagcgcttcattgcccgcgctctggttacggaagatctcccactgtgcagcgatgcgcgcctgctcgtactccctgtcagcgttagcacgcagcataagggcgttctggtga

SEQ ID NO: 146059 - DNA, 714 bp, Enterobacter cloacae
atggttgccggaactaacgaagggcaggcaaaccaaaatggcgattacatggctgctatgatcaaagaatttgtcctgtactgcacgggtcttggcagagttccggtgtgggttgagccttggatgtggtatagccagtcatttattggcggtgctggtcaaccatcagcaaattacgatggtgttgcggagttacgcgaggctggtaaacgccagatgatgaaatatggcaataacgtcatttgtgtaacaacaactcaccagctcccggccccatatccagagtatttcaacacgcaatacgacccacttctgcgtgatgacattcaccaaagccagttagggtatcgtctgtatgcggaaattatctgctctgccattatcgactggtggtcgcgtgttgattacacgccaagagcagctgttcaatggtgggctggaacaaacgtaacagtacaggcaccgtcaagtttaactgccaattcaattaatattaaactggcagccacttcatttgcgaatggcaatactgttataacgcttccgaggtggtgcagaccaaaagtaaccaaaaatgtacctgttccatttaccgcagatgggataagttttgggatggcaatggctacgattaacgcttcaacgggagcggtgtctatcgttggtgcaacaacaacatcgccaactttttacatcgatgtttcctgggaatag

SEQ ID NO: 146060 - DNA, 273 bp, Enterobacter cloacae
atgcaaaccgtgattaacttaaaaacggaaaaacagacgcttattgtcctccactcgtttgaggattttaaaaaatggtatttgcgtttttttgatttgagtatttttgccgaaggtgaagtgagtgcccttctgaatgaggggaaacctgagcattatccctgtatccccctgattcttgataaaaatatgaatcttatattttttgatgcaacgtctgtaaactgctggtgtgaacagttgaagtccatcaccttaaaacataagcattaa

SEQ ID NO: 146061 - DNA, 621 bp, Enterobacter cloacae
atgaaaaaaaaatcaacccgcactgatacccattatcttaaagtgataatggataaaattgaaccatttttaaattatgagaattatggtgcaaatacacggtttactattaatgaaaaacataacgaaaaatgttatttcattaaaagcggtgcggtttcgttgtatcggtatcctgacggagtattactggaaatttttgatgcgccgacactaagaggttacataccactcattaaagacagtgaaacagaatatgttatcaagctattattagcatccgaggttgcgattgtttccaaagaagcattgtttaatttattatcgactcaaaatttatgggaagagttcgcacgttatcaaatggcgcttatttcatctgtatcagaagtcatttacagactatcgacgcctaacagttatgagtcaatccgccatcagttgattgaattgatggcaaagccgagtgaaatcagggaactcattacggctgagaactatatccgctgtaaaacccgcatgtcccgaagcagtataatgcggatattatcggatctaaaacaggtggttatattacgattgaaagagggattctacgtggagtgcataatctcccgctaa

SEQ ID NO: 146062 - DNA, 651 bp, Enterobacter cloacae
atgtttattttgcgaagagtttatattatctctgatgatcaattttttgcactgggtattgctagccttttttatatggtaaatgcaaacatcattcgcccggaagatatatttaataaaaaacaagtcattgaagaagggatttgctatttatacataaaaaacagaaagttgcatcaacagttgtgttattatttcagatgtatgccgtgtaagtttatattttttttgccaaacgcacattgtgatatcgaagcaaagtttaggtattatttctggtctgccaaaatagatcttcactctttgatgaaaagaacagcacaggtctcactctattacaattataatgttcatttcacattaacttctgcggctcagagaagtatggaattaatttcacagggtgttgaaacatatgtcaccaggattaaggccagcaataaagatgctaaagtagtccatagacattaccgggctgtcatcaagtctgtaggaattgagagcgtaagcgttcataatttatttcttacagaatatatcgctgtaagtcatatgttgatggtctggctttcaagtcggacagaacgtactatatttcggaatctgaaacaacaaaagattgttaatgctggattgattcactcagtataa

SEQ ID NO: 146063 - DNA, 534 bp, Enterobacter cloacae
atgcgcgtaatgccaattaatggatatgaaggactgtataccgtttctgaatcaggagtaattaccagccttgcgagacttacttctgatggaaggaatatcaaagaaagagttcttaagccaagagctgttcgtgggtacgctcatgtaacactatgcaatgaaaatggttgcaagcaattgagtgttcataggattgttgcctctcatttcttgggaagttgcgctgaaggggaggtggtaaatcatatcgatggtgacaagctgaataacaccgtgagtaatttggaatggtgcactcactctgacaataacattcacgccttaactcatgggttgagggtgccaaagtctggacaggatcatcaccgattctcagcgccagttattgctacgcgactgagttcaggtgaggagtacaccttatgtggagaaaaagaaattaggggtatgggctttgattacgcgacagttagaaactgtgtggcgggaaagcgcaaaagacacaaggggtttacttttaggagcggttaa

SEQ ID NO: 146064 - DNA, 513 bp, Enterobacter cloacae
atgatccagtcgagtacacgggacttcagtatctgtgaggtagatatgaattggagtgattatttcgaatatcgggatggaaaactcttttggaggcacagccatagagggcctgtaaaagcaggcgatgaagttaaaaatcgcgacggtaaaggttatgtcagggttgttcttcaccagaaattttatctagcgcatcggattatttatgagatacaccatggagctattcctgcaggctaccaagttgaccatattgatggcgaaagacttaacaataatattgaaaacctcaggctggcaaccaacagcattaaccagcgaaataggcggaaaagctcgaaaaacacctcaggagtgacaggggtttgttttgacaaaaacaccggaaaatgggttgcgagactttgcaagaagcaccttgggaagttcgtaaactttgaagatgcatgtaccgctcgcgctgaggctctccgcagtcatgaaggtttcacatcccgccacggtgagtga

SEQ ID NO: 146065 - DNA, 327 bp, Enterobacter cloacae
gtgaaaccttacgaatcgaagaaatcacagttcaccagaaacctgatccgtcggcgccatgctgaatggtcagaaaagacctttggcaatgtcggtcccgtcggaccgctgaagcacctttcgaaagaggcgctggaagctgccgccgatcctggcgacctaagtgaatgggctgatatgcagttcctgctatgggacgcgcagcggcgcgccggtatctccgatgagcaaatcaccgcggcgctggaagaaaagctgaaggtgaacatgacccgccactggccggagccgaaagacggtgaaccgcgcctgcacatcaaaccatga

SEQ ID NO: 146066 - DNA, 519 bp, Enterobacter cloacae
atggcaaaaccggactgggaggctatcgaaacggcttaccgggccggttcattgtctatccgagcaatagccgataaacacggcgtaagtgatacagccattcgtaagcgagcaacgcaaaacgggtggcagcgagacctgacaggacaagtgcagaaggccacgcggcagaagctcgttcgcaaagaggttcgcaatgatggttcgcgcgaacatgtgcgaactgatgaagagattgttaacgaagctgctgatgaagctgcggctgtagttcttgagcatcgggttgatttggcgcgatggcgtcgtatcgctggaaagcttggtgacttcctggatgatgtggaattcaccgaggacaatcatgcgtcactgtccaggtctctggtggcaggtgtcgacgcacagataaaggtcatcaaggccgagcgagaagcctacaacatcgataccggtgacaagaacaacgatacggacagtatctctgacctgatggattcattgtctcagggggcgtaa

SEQ ID NO: 146067 - DNA, 315 bp, Enterobacter cloacae
atggaaaaatctggtaccgataataatggaaaagctgatgtaagctcatggttcaaggcaggtgttgaagatttaaaaggccagtgtaaagctgtagtattttttgctttgtctataactgtctgcatgtggatgtcactaggcaatacatcctctccaaaagtgagtattgcgtggcttttcgctgccattgtttgttgtcaggcatctactgaccttatcactttctctagccctaaaagcaaaagcaactttacggtcgctttaaggctaatttctggtggtctagctatttgggtcgcatataacatttaa

SEQ ID NO: 146068 - DNA, 264 bp, Enterobacter cloacae
atgaggcactcccgacagaacatttcttgtttgtcagtgagtgccatattttttaccaacactgaggtgaagtttttggacagttactacataaccattgacgcaatacaaatcttgcttgcgaaaagtaatggtttttacctaatttcttggtctaatcaaaaccgtactgccatttcaaaagaagagctagctcgcattctggcatcagaatttggcatcaccaaacgtgaagctactaattacattgctgatttgaactaa

SEQ ID NO: 146069 - DNA, 3261 bp, Enterobacter cloacae
atgatcgccgacgtcaccaaagaagttaatctgcaggacgatatcataaaccagatgtgccagaacggctgggtccccggcacgggcagcaaatacgatcgcgaacgggcactctatccgcaggatgcgctgacgtttgtccaaatcacccagccgcaggagtgggaaaaattcacccgcatctatcccaacgacaccgagcgtcattttctcgatgcgctggtcgcacagcttaaaaaagccgatgccaacgccaccgatcttcagtcacgaacctacggcaccctgggggtgctgcgtcacggcatcaaaagccataacgcgcgcttctcgttatgccagttcaagccggatcacaacctcaacccggacaaccttgcgcgctatcggcaaaacatctgccgtatcgtcccggaactggtttacagccctcacgcaagcggtaccgacacggaggcgaaagccaaacgctggcgcatcgacctggtgctgtttatcaacggcctcccggttgccactctggagctgaaatccgagttcaagcagacggtcaacagcgccattaaccagtacaaaaaaacgcgccagccaaaagatccggcgaccaacaagcctgagccgctgctgaccttcaagcgcggcgcgctggtgcattttgccgtcagccagtatgaggtctacatgaccacccggcttgccggcgatgacacgttctttcttccgttcaacaaaggcactaaagagggcggcgcgggtaacgacatcccagaggatcaccatgaatacgccacccgctatctgtggaacgaggtattgctccctgacaatctgctgaagatcctcgcctgctttgtgcatctgcaaatcgaggaaaaagaggactgggacggtaaaaaggtcaaaaaagagagcctgatcttcccgcgctatcaccagtgggacgtggtgaacaagcttattgccgccgcatacgaagaaggcaccggcaacaagtaccttatccagcacagcgccggatccggaaaatcgaactccatcgcctggacggcacatcagctctcctgcctgcataacgaaaagggtgaaaaacgcttccactcggtgattgttgtgactgaccgcaccgtgctggacgatcagctccaggacaccatctatcagtttgaacatgcggacggcgtggtcgggcgaatcaacaaccgcgagggggaaggctcgaaatcggagaagctcgccagcgcgctggagcattcgcagcccatcatcatcgtcaccattcagactttcccgttcgtacttaaagcaatcgaaaacagcacctgtctcaaagagcgaacctacgcgatcatcgcagatgaagcgcactcctcccagagcggctccacggcgcgccagctgaaagaggtgctgatgagcgaaggagccgacgacgatgtggtcctcacctctgaagatatcctcgacgccacccttgccgcccgcagcgggagcagcaatctgaatttctacgccttcaccgcgacgccgaaggcgaaaaccctggagctttttggccgtagacccaacccgcacgagcccgcatccagaaccaacaaacctgcggcgttccacgtttactccatgcgtcaggccattgaggagggctttatcctcgacgtgctgaaaaactacaccaattacaaagtggcctataagctgctgcaaagaatgggcgacaaagaccgggaagtggacagcaatcgggcgaagatcaggctcaaccagtgggtaacgctgcacgatcacaatgtctcgcaaaaggtaaaagtcatcgttgagcactaccgccagcacgtaatgcatctgctcggcgggcaggcgaaagcgatggtggtgaccagctctcgcaaagccgccgtgcgctataagctggcgtttgataaatacattgccgacatgggctacggaaagatcactgcgatggtggcgttctcaggcgaagttgagtttcaggaaaatgacatgaacagccttgcgctgttgcaccagaaatttactgaaatcaatatgaacccggcgctcaaaggccgcgatatgcgtaaggcgtttgataccgatgactatcaggtgatgctggtggccaacaagttccagaccggctttgaccagccgaagctgtgcgccatgtacgtggataaagcgctcggcggcgtggagtgcgtgcagacgctgtcgcgcctgaaccgaacctatcccggcaaaagggaatccggcacctttgtactcgatttttataatgaacctgacgatattctcgctgcctttcagccctactatcaaacggctgaattgaccgatgtcagcgatccaggactggtgttcgatctgtacgagaaacttcgcgcgacggggatatttttatggcacgaagtcgaacagctgtgcgaggctttttacagcaagaagaaatcgaatgcgacgctcagcaatatttgcctgcccgcagtaaaccgctgggcaatgcgctatacctccgcgaaagaggcgtatatcagcgccaagcagatctatgagttaacaaaaagggattcccctaaccccattttgctcgcgaacgcggaaaacagttttaaagcctgcaagcaggaaaaagatcgtctggagatcttcaaaaaagatctcggcagctttgtacgcttttacgaatttatgtcccagatcgtcgcctacgatgacaaatcgctggagaagttaagcctctattgtcgacacctacgccccttacttcgtgaagaggcaacagatgaagatgacgtcgatctatccaatgttgaaatgagccactatcggctttcaaaaatcatggagcagcatataaagcttcaggaggatgcggcagagtataagctcaacccggttaatgacgtcggcaccgcaaaagcaaaagataagaaagaggagtttatgtcgcaggtgctggcgcagctcaacgagctgtttatcaccgaaaacctaaccgacaaagatatgctcaactatgcctttgtggtttacgataagctcgcagaaaacaaacttgtcatgacccaactcgacaacaatacccgtgagcaggccatgctgggcgacttcacgaaagctattgatgacgccgtgatagacagtaacgaagcgcacaaggagatgatgatgcagtatttatcgtctcctgatgttgccaaagggtttgctcatctgatgtatgacatcgcaaaaatgcgcagggaatcgattaatgagtga

SEQ ID NO: 146070 - DNA, 924 bp, Enterobacter cloacae
atgagtgatatccagctcttccgctacagtgctagcggcgtaaaagaactttccggtaaagcagcaaccatcgaaaaagagctgcaatccttgatcgaatcccgaatggatacctttctcggcgttcgttttctcgacagtgaatacagtaccggtaagacccaccgtggacgcattgattcactgggtctggacgaaaataactgcccggtcattatcgaatataaacgtcacagcaatgaaaatgtcatcaaccaggggctgttttatttggactggcttctcgatcataaggctgaatttaagtggctagtgatggagaagctcggcaaagagacggcagaggccatcgactggtctggcacgcgcttgctctgtattgctgctgatttcaataagtatgacgaacatgccgttcagcaaattaaccgtaatatcagcctgattcgttacaagcttttttctgacgatctgttgatgttcgaactggtcaatgccgtggttgaaaacgcgttttcagaggctgcaaccgatacgctaaccgctgccgctggcaagcgtaacacacggtcgcatagcgaacagatcgccagcgcgtccaccgaattagccactttgttcgaacagcttaaaagctacgtcctgtctcttggcgatgaggtgcaatacaaagaactaaagctatacggcgcattccgccgtatgagaaattttgtttgcgccggcgtttaccccgttacagatccccatatccgtttgtggctgaaactggatcctgagcatattcagttagaagaaggatttagccgggatgtaactcatattgggcactggggaacgggcaacgttgagctagtcgttcgcaatgaaaatgacctgatgaaagcgaaactgctgatcgaaaaggcttatcaggagaattga

SEQ ID NO: 146071 - DNA, 456 bp, Enterobacter cloacae
atggcaggacgcattaataagaattgggaaatgttcgataaagaccaatggaatatttcagacgtaacagacggcaactatacatcttttgtttacatcatagagtttccagaaacaggtgaattctattatggaaagaaaatgatttatcaaaaagttaaaagcatagataaactaaaagttaattctgtagaatctaactggaaaaactacacaggtagtagtaagacagtgaatgctatgattgatgctggcatggattatacaaagaagattttgtattgtgttaaatcagacgcagaagcaagcattattgaaacggcgttgatttcgtactttggtttacatccagacaacctaaacaaagcaattctatgcaaagcacgtttaccaaagaacagacgtgatttattcaatgtattacaagatttagtagcgatgttggggaataggtaa

SEQ ID NO: 146072 - DNA, 147 bp, Enterobacter cloacae
atgattatcactaccaaagtttctcttcgcccttacatgaagccgatacttattctgtcggcgttgctccgctgggaatggttaaccgggaagtgttttaaagttgagacggtgagcggcaacacggcgaccctcgaatcaaaataa

SEQ ID NO: 146073 - DNA, 2718 bp, Enterobacter cloacae
atggtcaatcaaaatccagaacaaaaagctcgcgaccaaatagacgtgttgctcgcgcaagcgggatggttagtacaagacaagaagaagatcaatttttccgcttctactggtgttgcagtgcgcgagtatcaaaccgacgtagggcctgcagattatgtgctgtttgttgataagcaagcagtgggtgtgattgaagccaaacctgaaacttggggtgaaaagatcaccacagttgaagatcagtcacaaggatatgctaacgcaactttgaaatgggtaaacaacaaccaccctttgcgctttgtatatgaaagtactggagttattacacgctttactgatggtttagatccacttccacgctcccgcgaagtgtttaacttccatcgcccggaaacccttgccaagtggctcaaagaacctaaaagcctgcgcggtcgtttgcaagatttcccaccactgattaaagaaggtttgcgtgattgccagattacggccatcaccaacttagaaaagtcattcaaacaagacagaccccgtgcactggtgcagatggccactggctccggaaagacctttactgctattacggccagttatcgcctgctacgggagcccgtgaatgctaatcgcattctgtttctggtggataccaaaaaccttggggaacaggccgaacaagaattcatgagcttcgtgccaaacgacgataaccgaaaattcaccgaactatacacagttcagcgattgaaaaatcagttcatcgccaaagatgcacaggtttgtattagtactatccaacgtatgtactccattctaaaagatgaggcgctggatgattctctcgaggagcaaaacccagcggagcaatctactaagcccaaagagccactgccggtggtgtataatgaaaagattccacctgagttttttgatgtaatcatcattgatgagtgtcaccgctctatttacaacctgtggcggcaggtgctggagtattttgatgcctatctggttggtctgaccgccacgccggacaatcgtacctacggattcttccgcaagaatgttgtcagcgagtataaccacgaaaaagccgtggccgatggtgttaacgtgggtaacgaaatctttgtgatcgaaaccgaaaagaccaagcaaggcggaaagattgaagcgaagcagcaggtggagcgccgcgagcgtactacccgccgcaagcgctgggagcaacaggatcaggacgaggcctacactgcaaagcaactcgaccgcaacatcgtgaacccggaccaaattcgcactgtcatccgtactttcaaagattcactgccgaccatctttcccggtcgtcaagaagtacccaaaacccttatctttgccaaatccgacagccacgctgatgacatcattcaaaccgtgcgcgaagagtttggcgaaagtaaccagttctgtaaaaaaatcacctaccgtgttgtcaatgacaaaactgatgctgaaggcaaagtgattgaaaaaggtgaagaccctaaatctgtgctcgcccagttccgcaatgactattacccacgtattgcggttaccgtcgatatgattgccaccggaaccgacgtaaaggcgctggaatgtttgctgtttatgcgtgatgtaaaaagtaaacactactttgaacaaatgaaggggcgcggtacccgcacactcgataaagacagtttgcaaaaagtcactccatccgcgcagagcgctaaaacacactatgtgattgtcgatgctattggcgtcaccaagtcggttaagaccgcaagccaacctctgatcaccaaacctagcgtaccgctcaaagacttggcaatgggcgtaatgatgggtgcaagcgatattgatactgtatcatcgctagccggacgcctggcgaggttagacaaacagcttgatgacaaagaacgtgcccgtattgctgaaaaagctggtggcacgcctttacttacgattgttggtgaactcttcaacgccatcgatggtgaccgcatagagcaaaaagcgttggaaatcgtcggacagccggtcggcaccgaccctggtgattatgcccgtaacaaagctcagcagcagttggtcggccaagtggcaaacatgtttagtggcgagctgattgagctgatcgatactatccgtcgcgacaaagaacaaaccatcgtgcacgaagatcttgatacgatactcaaagccgaatgggatggagaaacaaccgaaaacgctagggtgctcatccaagaatttgccgactatctgcaagagcatgccgacgagatcgatgcgcttgacatctacttccatacacctgcgcgccgcagcgaagtgacctttacgcaaatcaaaactttgttagaaaagctaaggcaagatcgccccaagctggcaccgttacgtatttggcaggcttacgcccatttggataactatcaaggcgaaaatcctttaactgaactcaccgccttagtcgctctggtccgcagggtgtgcggcatagatagtgaaatcaagccatttgacaacaccgtaagaaagaattttcaggattggattatgaagtaccactcaggtaattcagaaaaatttaatgaacagcaaatgcaatggctacaagctattcgcgaccatatcgtgagctcttttcacttcgaacgtgatgatctggatggctttgttgaataa

SEQ ID NO: 146074 - DNA, 219 bp, Enterobacter cloacae
atggtccgctgccacctcgcccgcatgatgggtgaacgcaaaatgcgtattgcagacgttgtcagagaaacaggactcagccgcactacggtgactttactctacaaagagacagcacagaaagtggatctggaagcgctcgataaattatgtgaactattcgactgcggcattagtgaactgttagaacgtgcgacgccgacagccaacaaatattaa

SEQ ID NO: 146075 - DNA, 1428 bp, Enterobacter cloacae
atgttattatttcctgttgttatggccggaggctccggtagtcgtttatggccgctttctcgtgttctctatccaaagcaatttctctgtctggaaggtgaactgacaatgttacaagcgacgattaaccgattacagggcattgaatgcgaaagccccgtcgttatttgtaacgaacagcatcgctttatcgttgccgagcaactgcgccagatgagtaaactcactgagaatatcattctcgaaccggttggtcgtaatactgctccggcgattgcgttggctgcacttgctgctgttcgtgcccagcacgagggcaatgcgcttatgctggttctggccgccgatcacgtaatacaggatgaagaagcgtttcgtaattcagttcggaaggcgctaccttatgctgaaaatggaaagcttgtgacctttggcatagtcccacataaaccagagactggctatggttacattcgtcgaggtgttccatgcgatgatgttgagcatgccgatgcattcgaggtcgcgcaattcgttgagaaaccaaatcttgaaacggcagaagcctatgttgcctgcggtgaatactactggaacagtgggatgttcctcttccgcgcagatcgctatcttgaggaactgaaaaaatatcgtccggatattcttgaggcgtgcgaaaaggcaatgagcgctgttgatcctgacctgaactttattcgcgttgacgaggaagctttcagggcttgtcctgatgagtcgattgattatgctgtgatggaacagacttcagatgctgttgttgtaccaatggatgctggctggagtgatgtcggatcctggtcttcgctttgggacattagccataagacagcagagggtaacgtcgttacaggtgatgtattgtcctgcaataccgaaaatagcttcctgtattctgaatccgggctattgactactgttggggtgaaagatttggtcgttgttcagaccaaggatgctgtattgattgccgatcgtaacgccgtacaggatgtgaagaaaattgtcgaatcgatcaaagcagatggccgtcacgaacatcatactcaccgtgaagtttatcgtccctggggtaaatatgactcgattgatacgggaagccgctatcaggttaagcgattgaccgtaaagccgggcgaaggtatctctcttcagatgcatcaccatcgtgcggagcattggattgtcgtcgcgggaactgcacaagtgactattaacgagcaaacaaaacttctcggtgaaaatgagtctatttatattcctgttggggcaacacactgtctggaaaaccctggaaagatccctttagaattgattgaggttcgctcaggttcttatcttggggaagatgatattgtacgttttgctgacaggtatggtcgtgtttga

SEQ ID NO: 146076 - DNA, 1110 bp, Enterobacter cloacae
atgaaggttttacagtttagtaaattttaccctccagtacatggtggaatcgaacaggtagcattcgatataagtgaaggtatcgcaaaaagtaatgaccaatctgttgatgtactctgtgttgatccaattggagaaagaaaaaatgacgataaactccgttataaagtttaccgtcagaaattatttgcacaacttttttcaacaccgttatcattttccttaatatcccgctggagaatgataagaaataattatgatgttatccatgttcatcttccaaatccactggctgtgttggcactctttttattccctcccaaagggaagatcgttctccattggcatagcgatattgttaagcaaaagaaactattgatgctttttgctccgttacaaaaatggattttagataagtgtaccagtattattgttactagccctgtttatgggcagtcttctccaactttgcagccttatcaggataaaattgtttgtattccaattggggttgatacccgtgttatgccactgaatgaggaccttgaaaaaagtatcaagcagcgttatcaaaataaaaaaataattttttctttgggacgtcttgtttactataaaggtatggaatatctgattgatgctgcgaaggatcttcctgatgattacattgttcttattggtggtactggtccattaattgatacattaaagcaaaaaattgctaatgatgcattgtcagataaagtaattcttcttggtagtatcaattattcggatttggcttcttattacaaagcatgtgatgttttttgtctgccatcgattcatgaatctgaagcttttggtgtagttcaattggaagctatgagtttttccagaccgcttgtgtcgactaatattcctcgaagtggtgtggcgtgggttaatcagcacaacgagactggcatcgttgttgagcctaatgatgccaaagcgcttgcaaaaggaatagttactgttattcaaagcagtgagacgtatagtacaggcgcgaaggccagatttgatactatgtttactaaagagttgatggttaagaatataatgagtttatattcatcattaaagtga

SEQ ID NO: 146077 - DNA, 1056 bp, Enterobacter cloacae
atgatctatattaatgcgagatttttgactcaacgtaaaactggtgtacagcaatatgcattggtactatgtcgggaactcgttaaacacgttcctgatatctgttttttaacaccgaaaactgacctcattgatgacaaatggagaaaggaatttaatatccttcaaataggaaatcgtaacggccacttctgggaacaaatcgagttacctcgttatctaagaagcgtcggtagcccgttactgctctgcttcactgggttatcacctgccttttacaagaactgttactttactatccatgatatgtcattgtacgcatatccaaagtggttccgtttcttatatcgtgctgtgtataaagttaactatgccattcagtcgagaatcgcgagaggcatctttacggttagtgacttttcaaaatcagagatagagaagtatctggcggtagatccagataagatcactgtattgccaaattccgtggatacatctattaacctcaagaatcatattgaaaatgaagcggctaggcataaagagattttattggttggtaccttagagccgagaaaaaatatcgaatttgttattaatgcttttttgaattcaaaaatcgaagattataaactcatcgtggtgggagggttaggggctgctttctcaaaagtgacttttccaaagcatgagaacattgtattctgtggctatctatcagatgacgatttagagttaaaatatagagacgcttcaatttttgtctatccgtcactatatgaaggtttcggacttcctcctctggaagcaatgcaacgcggttgtcctgtaatggcttctgaccgcgcaagtatccctgaagtttgtggtgatgcggcatattattttaatccagaggactcagcagattttagtgctaagttacgtgaattgattgaaaattatgatgagctcagtcctgtattgattcgtaatggatatcgtaggctggaacaatttgacgtacgtgatgttgcatcgaaacttatggatgtgatctctcaaaggaatatttga

SEQ ID NO: 146078 - DNA, 948 bp, Enterobacter cloacae
atgctcttatggtttgttatattcagttatgctaaagaacttgaacgtaactttgatatatatagttttagtgtcaagatatcgagtttatttctttgtgctgctctgatactttacatcatggcgaagtttggttttcatgttaaaatattaggaggggcttggttatatgatgaaaactttcgctttgcaggcacttttgcagaaccgagtttaaatggctatttttatggcttaatgttcttgatggtgatgttgtctaatcaaaagtacagactaattcttgcgtgtctgtttgctattaccacctatatttcaggtgctaaattttcattcctgataattccagtgctccttgggctagtttatttcttcaaggttaagggcttttataattatacataccagctcattccgttatcttttattgttctttttgtcagtcttgcgttcatctattatgatctttttgcactcattgcagctcatttttcaaattctgcaaccatgacgtatgtcactcgtttgggtttcccaattgtaagcatatggcatcttagtgattatccacttggcagtggagtatatggtttcaagagtacactatcgccttttatacatgactattgtcaggctctttctggtttggatgtaaactgtaatgagatgagatcttatttatcttcattggatcccaatgcctatgaaagtttcgcccctaaagatgtcttaagttttattattttaacgttcggcctaccgggcttactcatatttgtcttaagtatatgtttattgtcagccagacttaaagcaaataagaatcactttatcattctaatgtatattgttgcttcgatgctctttacattaccttttagatttatccttttttattctttctttatgtttcagtgttacatctacagaatgccgagtaataaatga

SEQ ID NO: 146079 - DNA, 141 bp, Enterobacter cloacae
atgacacaaaacaacaatagccaggtcagtcgaagcaatgaccctgagcaaattgatttacttgatttaatgctgcagctgtggcgtgggaagtggatgatagcaacctttgttgttgtttttatcggctttgttgaataa

SEQ ID NO: 146080 - DNA, 219 bp, Enterobacter cloacae
atgactccagaaacagacaacgccatccgtgcagcctgccgccgctgcaccgaggaaatccagcaggccatgcgcaagaagccaaagcctaactggaacgaaacggtgcctcccatcatcaacaagcatcacaagaaaattgaagctctgggagttagcctcctggagttcgtcgtcaaaactggccgccttaacgggcggttcggagccgaacaatga

SEQ ID NO: 146081 - DNA, 588 bp, Enterobacter cloacae
atgagcaacgtaattttcacctatagcgaagaatcagcactggccgccggtatgggcggctttattaacgaaactggggcctacgctatcaccatcagcgaagcgttgctgaccacagcaaagagcggagcaaaagccattgagttctctggtgaagctgatgacggccgtaagatccagtacctgagcgtctacgttacgaaaaaggacggaaccgaaaacaccttcggcgcgaacatgattcacgcaatcatgggatgtgcaggtgttaagcagctgacgcagtacatgaagtctgctggcgtgtatgtagcgccggagtttgctggcaagcgtgtcggcctggttctgcagaaggtactgtcgaaaaaggatgatggcagcgatacctataaattcgatatccgtatgccattcaacgccgacacccggcagacgctgcaggaacgtcatgaaggtaagaatgccgagacggtagagaagatgatcgccaccctgaaagataaggatgagcgtaagaagccaacccaaggcaacgcaggctatcactacggcatggatgacgatccgggccataacgacttctaa

SEQ ID NO: 146082 - DNA, 681 bp, Enterobacter cloacae
atgggcacagcaacactgatcctcggtgaatccggaaccggcaagtcaaccagcctgcggaacgttgacccagccgatgcgatcctgattaaggctgtaggcaagccgcttccgtttcgctctaaagactggacgccgtgggatgccaaaacaaagaccggaagcgtagtcgtatctgatgactggaattacatctttaacgtcatcaaacgcgcgcctacctacggcaagaacatcatcatcatcgacgatttccagtacgtaatgagcaacgagtttatgcgccgctcagaagagaagtcgttcgataagttcactgagattggcaggcacgcatgggaggttatcaagtctgcccaggacgcgccggacaacctccgggtttacttcctggctcacaccgaagaaacgcagatgggccggacgaagatgaagacgattgggaagatgctggacgagaagatcaccgtcgaaggcatgttcaccatcgttctccgcaccctcacccgcgatgacaagttcttcttcaccaccaaaaacaacggatcagacaccgtcaaatcccccatggggatgtttgagaccaatgaaatcgacaatgacctcgcccatgtagacgcgaccatctgcgaatactacggcatcaacaacattcaccacattaaggactccgccgcatga

SEQ ID NO: 146083 - DNA, 171 bp, Enterobacter cloacae
atgagtgctatggagcgctgggatgacgatgctttcgtcaggctgatggcggatgtactgccagagcagccaatgacccacgaacaggcggcgcaggaagcgatcgccgattaccgttcggagcagcaggaaatgagaatggagggcgcactatgggcacagcaacactga

SEQ ID NO: 146084 - DNA, 486 bp, Enterobacter cloacae
  misc_feature (457)..(466): n is a, c, g, or t
atgtggtttaagaaaaaacaaccagaacaaccaaaaccagtacagaaaactaatgaagtccgtgaacatgttggtaaaacattacaacgtgatttaaaccagattcgtacaactagtaatggtgtgaatgctttcggctttggtgtcggtactaactcagtaagtattaataacatcattaaatggcatctatcagaatggcgtaatcaatcacgtgacgcaacactagtaaacccaatcgcacgtaagtacatgatgctttctgtagatggtgtagtaggcagtaatggtatctatgtaaaaccatcagtagatattgatgttgatgaagaaacaaaacataccattaaccaacaactagaaaaactatttgatcgttgggcttacgatgctagtaaattctctattgatggctcaatgacttttgatctattcgcacaagtactagagaaacacnnnnnnnnnncaccgctgccgcgatggtga

SEQ ID NO: 146085 - DNA, 777 bp, Enterobacter cloacae
atggatgatgccacacaggaacgcggtataccggatctaattgccagtactaaagttttagcagacttaaagaacttccaggaagcggcattacttgctaaacgaatctcagccagtgtaaccacattcattattaataatggcggtaacaatgaattagcactagatgaaggtgaacaagatacagcgatttataacgagtacttagaacctggtgctatctttgaattaaatgctaatcaagatgttaaatcggttgagccccgtaatggtgttgacggtatagcagaattcacagatgtactatttgataatatttcaatgggcttaaatgtcactaagcaatccctaatgggaagtactgctgatgcgtcatttagtgctgcgaaacttgccgaacgcctacaagctacaactttcagtactcgaactaatgtactcataaataaagtactcaagccaatttatacagcttggttaaagaatgaaatgctaaataatagtaagttgaaattaagtttttctgatttcgatgatcttgtatgtgctcgttatatccctactaaacctatttcacttgatccattgaaggatattcaatgtgaagtagctgctattgatgctggtttgaaatcccgtacacaggtaattagtgaaatgggtggtgatccacgtgttgtacttcaagaaatagagaatgagaaaaatatgaacaaggaagttctagatgaaaatcaaaaaacagacgagggaattaaccctaccaacggcgattaa

SEQ ID NO: 146086 - DNA, 1146 bp, Enterobacter cloacae
atgaaaatcaaaaaacagacgagggaattaaccctaccaacggcgattaattctgataatcgtaccgttgaagttgctttttgttctgaaactcctgtagcacgtgaaatagaagggaagttatataacgaagtacttctatgtaatccagaaaatgtagacctatcgcgtttgaacaattcaggggcagtactttttaatcatgaccgagatcatttgattggcaaagtactagcggcacgtattgattcagacaaggtaggccgtgctgtattacagatttccaatgcttcggaaaaagaatgggaacaaatcaatgaaggtgtattaacacatattagttttggttacacagttaatgattaccgtattgaaggaaacattatctatgtaactcattttaccccatatgaaatatcactagtaacagtgccagccgatgtatccgccggagttggtcgctcattgataaataacaatgatgacaaccagaaggatatgatcatggaagataaaaacgaaatcggaagtactgaacctgaaatcaaagatgaatcagaagtagttagtactgaagttgaatctgaagaagaaattactgaacaagaagaagtagaagaatctgaagaagtacgtatgagcgatgaagaactattagcactaatggctaatcgtccagacttgcttgaacaaatgataaataaaaccgacgttgaagaacaacgcgaagatgtacaagaaagtactgatgattctgaagtagaagattctacagaagaagtggaacgtaaacgtgaattggaatcaatcggcgtagttctaaatattgatgtgtctgaagcaattgaaaatggaatttcagttgaggacttcaaacgcacactaaatacaaaaacaaatccaaatcatgataaggaaatcaaaatggaaaaatccgtattaaatggcctaattcgttcactaagtgaaggtaattttgctggtaaaactgaaatccctgcgggtgatttcgtccgtacttctactactgttggcggtgctgctctagttaaagaagtatacgcagattcttatattgatgtgctacgtgctcagtcagtatttgctactctacctgtaggtaatggtgccaacttactgatttag

SEQ ID NO: 146087 - DNA, 552 bp, Enterobacter cloacae
atgccaccttcgcctacctggtacataccgccagcactcaccgggccgccattctttcgtttaccagacaacgccaagataccagccatcgcgccgatacctatcgccaccgcaccaccgaatgaggcgatggatgacaggatcgccgccggagtccatgctgcagttgtggccgccgccgccgcggtagacgtcgccgtcgtggtggcaatacctgccgcctgtgccgtggtggatgctgcaacagcagccgtggtggccgtttgccccatgatggctgacttcacccactcaacgcccatctggacgaaggtgttgataaggctgttcaggacggtatttccgatcgagcgcagagcatcggaagctgacatgctcccggtgatgatgccggttaaggcattggacgcattaccggccagtgcatcaaaggacgccgccagcgcttcattgcctgcactctggttacggaagatctcccactgtgcagcaatgcgagcctgctcgtactctctgtcagcagtagcacgcagcataagtgcgttctggtga

SEQ ID NO: 146088 - DNA, 438 bp, Enterobacter cloacae
gtgagtaataatcccttgctgctcgtatgcctgaataagcgcgagtttacgggcattttcattcgccagttgctgcaccgggtccacgccgccagcagcttcctgctgtgggcttacagcctgatcggcacggattttagcaaggttggcctggtgagttgcttccagtcgctcagatgtctgattgaactgctcctgactgattttcttcgcagccagcgccgtattcagatcctcaacatcctgtttgtaactggcgttctcagccgcttcagggagaagcttctgcgctgcagcttcagccttaatggcgttggctgtgtcccatttttttgccgcatactgaccggcaagcgctatctgctctttagtggctcctttcccgagcgactgctgcgcagtcaggatggcctgctcgcgactcagcttgttcgttga

SEQ ID NO: 146089 - DNA, 372 bp, Enterobacter cloacae
ttgctgcttgaggttagccagcttctgggcaatagaatcagcctgggaagcccccttcttctgctcggactggagagtcttctgtgcctgcgtatttttgtacgtagcggcagcatcatcttccatctgcttggcgtgcggatcatccttcgcaaacccggcatcttctgcagcgtattgcgcctgcagccgggcgcgggcctcaccctgcaacttcgacagcgcaaggttgcgctcagactgcttgatgaggttcttctgcccggccgtaaggttgtcggtggacttgttcaggctgtcgacgttgattttagcgttggccgcctctcttgccagatcaacaagcttacctgccagttcagcaatagctga

SEQ ID NO: 146090 - DNA, 672 bp, Enterobacter cloacae
atgaccgctttaaccgatattggcgaactctccatcagcgacagccgcgaaggtgggaaagactacctgctacggccttcatttgaggctatgaccaggataggcacgccggaagagattgtgcaggcctacgccatcatccacggaaatgacgtcgctcaactcattgaggtgtgcgctggcacattggggcgttttcctgcctggctggccccatcattcaaccgcgcagccgagaagctgttatcaacgtgcatgctggtgctgcaggcatgctgcgatgacgacctgacgccaatgatcggcgaatggaaagggtggcggaactgcgtagtctaccgcccgggccagatgccgaagaacgacattatcgtgctggcgcagcacctcatgcagcacggtgtagtcggtaaggccaaggttcgccagctgcagcgacatgaaactggtgagcgaaccactgagtttaaagccttcgactacatcagcgcagcgcgcagccacttcggcatgaatcgcgtggaggcctctcagttaacaatgaccgaatttcagctgctgctggcggcgaaatacccggaccagaaaggcttcactcgagaagagtacgacagcatcgccgacgaatacctggctaaacaggccgcacgcagggcaaaagcaaagcaataa

SEQ ID NO: 146091 - DNA, 594 bp, Enterobacter cloacae
atgcatagaaaggccggattaaaagcaatatttatagtgtgggtatttataacaacactaaactttgcgtttcagcttttttattcatcgcattcaaatcttggcttctttaataaatcattctggtactttaatatatcaaacaacctaagtgtatttattgctgggttcatgatattgtatggagctgataaaatagtaagttccaaaacaacatcatacctactatttgcagcactaattacagtgtctatttttatttttagcatgaatagacacattctttacagcatagtgccagccatttcagccattgcatttattttccttatatcaggacttgagcgctctaatgcctctccgaaaatcctaagaaggataggtcagctttcatttgctatgtatattacgcatattgtttttacatcatacgtaatgagggctataaacaagcatattccagatttttcgccttcaattaaactgctggctttttatattattgtcgtttctatttcatttgtagctgcggttgtttgcgaaaaactaattgaaaacccaggaatacaaattgacctgctccccgttgattag

SEQ ID NO: 146092 - DNA, 714 bp, Enterobacter cloacae
atgggtaaaaaattaataaatagccttaaatctgataatgacaaatcaaaacttaaaattgttatggcgcttggagttgcatttctgttgtgtgcgtctagtgccgtagcttaccgtcattttcaatcttatatgtcaactaagcgcgtatctgactttcagtcggtaatgctcgactttaaaaaaatgaatgcaaaccaggccgatggtgactacataatatacggggattcgctcattcaaggcatgtcaccttatggtctaaactttaaatatgtaaacatgggtgtaggtggttattcaatatctcagattttgtctttgtcaaaagattacgaagcatctgggtataaaggcgcaataattgagggcggtgttaacgatgctatgggttcgaaaacacaagaagagatttcgatggattatgagaaattacttggaaacgcctccatcgttgacaatgtttatgcattgaaagttttgccaatcataagtggagcaagaaaagatgttgaccatgttaactcaagaataagcatgattaacaccataattgataaattatgcactcgtaaagttaactgtaaggtgatcgaagttcccgctgagtttttatctgataaaaaaaatgatttatactttgatgacggtgttcatttaaacaaaaatggatatgccgtctggatgagagaaattaataaacatgtgaagtag

SEQ ID NO: 146093 - DNA, 711 bp, Enterobacter cloacae
atggttgccggaactaacgaagggcaggcaaaccaaaacggcgattatatggcgtcattgatagatgagtttgtcttatattgcaatggccttggtcgtatccctgtttgggttgagccgtggatgtggtatagccagtcatttattggcggcgctggtcaaccatcagctaattacgatggtgtggctgagttgcgcgaggcaggaaagcggaaaatgatgaagtatggcaacaatgttatttgtgtaagcaccacacaccaattaccagctccactgcctgaatatttcggtacacagtatgatccattgttacgtgatgatatccatcagagccagcttggttatcgtctttatgcggaaattatttgctcagcaattattgactggtggtcaagggttgatttcacaccgaggtctgccgttcagtggtgggctgggacgaacgtaaccgtacagacaccatcaagcttaactggtaattcaataaatgttaaacttgccgctacgtcatttgcaaatggcaatacagtattgacgttgccaagatggtgcagaccacctgttaacaaaaacattcctgtgccatttacagctgacggaacatcattcggaatggctatggcaacgataaacgcttcaacaggggcgataacgattgttgggtccactacaacatccccaacattctacattgatgcttcatggtaa

SEQ ID NO: 146094 - DNA, 1440 bp, Enterobacter cloacae
atggcaaatgccatcaacctcggagcaagtgcctctctagcttatgccgatgataaagcactccggccggaatcaataacacgattttatataaaccagtgccaagatttatcgcgtttacctcagctccataaaggcggttttagttacaatacactagtgcaggatgtaccatttagcgagcgatataatcctcctgttttcatggatacctctagagacacctcgaagactgataataaaagtggcagtacctctggaggggggaactcagcaaaaccagaaggcgatactcaactgtattatgtttacaatacagacaaagtcattgtcgcatggagagggactgcagggttgtatgatgtcggaacggatctggcatttagtcctgttagcactgaggtatgtgatgtaaataaaactatgtgcacaaacttgagtcctgctggaaaagtgcacgatggattcctaagtggatatagtagatctgaacggcttttttcttctgagtttgatgagctcttaactttaattagagcacgaaatttatttgtttgcggccatagtttggggggagcgcttgcattaatttactctgctgcactaaagtctgaaaaacctttgctctacacatatggtatgccccgtacctttaccaaggaggcagttcagcagttatccgaaatcacccatttccgtcatgtaaatgataatgatcccgttccagcagttccacccgaagcgagtctagataatgcgttatataacctctggggaccacttgggcaaactttaggaatgctgtggtctgttggagaacttctggcttaccaagctatatcttggggggattgcttttggcaccatggtaatccagttgtatttctaactgcgacacaaagtcgtgagtggcaagagtgtaaaacaagtttgcccgtacctgctggttgcataaatttaaaaaggcttcttccgataaaagttaaattatatcttgttccttctttggcggaccaagagatgcaaattgcaggccgtaaacaaaaggagttcagaacgtcactaacggctagcaagctggaagagatttttcctgagggacaaaaccccgaccgtggagcagatttaacatttggcgatcacttcatgacgtcgtatatgccttacatgaataataaattattggaactaatagataacgaaggattgattgagaaccggaattttactgagcatctatataatgtagatcgttttaaagagcaaatgtcggaacataaagatgaaattcctgaaaaggaatatgaaagaaatgagatattccttgacatagaagggttattgaaggcatcactatctcctactctgtctgaatcttatgggaatgatgcgctagttcgatttgccatttatggtgatgaggtggttgaaaatgcttaa

SEQ ID NO: 146095 - DNA, 792 bp, Enterobacter cloacae
atgcttaataaaaacaaatttatttttttatcgcttgtcttttttatagtcggaggttgtagtcatgccacaagcaatgcaatttcccctccagcggataccaaatgggtgactattgaggttagtaatccttcaaaatacacaagaccatttcctcttgaagttagatatatttcacgtgaatgccagaaaaaaagagtcaacggatttgatggttctgtggatgcggaattaagctataacgttattaaagtacctttacaacagcagaatggtgataaatggaaaggtacagtcgctattactggcgggggggagtgcgtatggagcttaagcgcaatcaatgtgggtattgaatatatagatgctacacatcttgggaatgatttagtacctggaactgcggttggtgtaactattgcttttgatgctgatgctgcgcggaatggacaatttgacactgtggtggggaatgattttaattacactccaaaatactatccttttataaaaaaatggaataataacccacagtctactatgcgggataaattatatcttttcggtaaggaagatgcgttttggaaagtgaagttggactataaacctaacgaaaatgttttaataaattacaatccctctatagacgaaaataaaaaagtattgatgatattccctaataagaaggggaaagatgctatgtattcttttgtctatccagatgggaacgtcatttcatcaaaaaacacaacacctgattttagcaaagtcgacgggacgaggggggaataa

SEQ ID NO: 146096 - DNA, 621 bp, Enterobacter cloacae
atggctgcggctgcggcggtatttggtgcgataaaatggatgtcaggacgggggggggctgggggcaagccagcaggctcaaatccccttgaaattctcgcggaaggtgcttctggcaacaatgccgtacctgtttatgtaactaatgctcaggaaatcggcggcgataaagaaggcttccttgacaaatttttggggggaagtagtgatttgccaggccagttaggaaaatgggcttcatatgcaaatgtggcaaatattatttatgagtctgcccaggataaattcgattctgctgacgaggaagctaaatcaaaagggatcactactggcgagctttttagacaaaagtttcaggaaaaagagaataacaagaaacctcttttcgatgttgatctcttttcaatggtcaaatcctggtggagttcacctgccactatagggcaaaacacacctgcagcaacaggcgtgccgtcttatctgttgcctcagcagcaacaaaaatcacaacccattaacctcaccacaaagctgatactggacggtcgtgaaatagcatcagctgttaatgaatacaacggcgaacaatccgttcgcggctcaacaggaggcccgcagtga

SEQ ID NO: 146097 - DNA, 246 bp, Enterobacter cloacae
atggctaccaacgaaattctcatagttaacaaaattgggcgcgctgatggtgattacggatgctactgccctcactgcggagagccgatgtttttcagcgatgatgaactggaagatatccgaggctctcaataccagcattctcgcgtgataaatctcagaaccggtgaacggtgtgatggatggctggaagtatctaccaatgcgggttactcgcgaatcttgttcgaccagggagatgaatag

SEQ ID NO: 146098 - DNA, 339 bp, Enterobacter cloacae
atgaaaacctcgcctcaactggaaactacgccagtcaaagaactcgtagcagccgggcatgcgctggcgaaagaactacattgcgctgagtctgccgcgctggttcgcaatctggctacagcgcttgatgtccagtttgctcgtgccaacgcgctaacggttgttgatgtttgtgaccctaatgtgctggcgcagctggatgagctggaagctgtgaacgagctgtttttacgtgcaaggcagctgatgtatcaatcaggaggggcaccaatcgaaaactcattgaatccgattgatgcatggctgtatgacgcagaacgcgttgccggtaaaggatag

SEQ ID NO: 146099 - DNA, 720 bp, Enterobacter cloacae
atggaaaataaagagaaatatatccagagaattaaaaagctgatcgcgatggcgcgtaataactccagcgctgaagaagctgcacttgccctgcgccgtgctcagcgtctgatggaaacccacaagctgactgaggctgatgctgatttgattgatatcaatgaagcttctacccagaaggccccctctcatgctgagaagatgccggaatatatggcaatactggcagagatggtcgcccgcgtttttggcgtgaagttttacaccagccatggcactgagcagtggggcaagccagcaaaacgcaccatacactattacggccccgacgaacgccctcagatagcggcatactcattcgaagttctgggtaagcaactggtgaaagcccgccgtgattacctatctacattacgcaagaacatcaaacaggccacaaaagttgcccgcgccgataccttctgctccgcatgggtcaacggtgcttatgccgttgtcagtgatttcgccgtcacggaggcggagacaactctgatggagtgctaccgcagcaggaaattaagcgaaggcatgaaaaggctggaaccgcgcaaacccggcaaagccagaggaacggataaggcggaaagcgagggatatctggctggacgtaatgcgcagctacatcacgcggtaagcagttcagctaataaatgcgaacagatcggagtgacaaaatga

SEQ ID NO: 146100 - DNA, 228 bp, Enterobacter cloacae
atggaagaccatctctgcattctcatgtcccatctgattcgctataaaagcaggattagcacccgccgacaacatccagcacgcatatgtatgacgcaactgataggggcgtctgcggcgaatgcccgaacgccttactgtaatgtcccatattcttatgccgtcggcagctacttcgtgggctccatgccttggtggaacgtagtgcgtcttggtgaattggcttaa

SEQ ID NO: 146101 - DNA, 690 bp, Enterobacter cloacae
atgctggaagctccaaacgaatttaacaatgacagattcatgtttgacaaattagtaagggcgcagcattacggattacccacaagattggtagatgtatcattaaatccgctggtggcactatattttgcttgctgcgaatttaaagggggaaaagaagagttagcagatggtaaggtttatataataagctttaagtcttcgcgggttaaattctccgacagcgatacaattagtctgattagtaaccttacacgcttgtctgatgaggaaaaaaaagcgcttaaagaaaaacaaaacttcgcagttgctagctttagaaagcttgatgaaattaaacgattgttagggttcgttaaaggcgaaaaaccttatttcaccaatgaagttagacgatcagatttgtttagatacttttttgtttatcctacaaaaaacaataggcgtgtcatagctcaatccggcgctttcatgacggccggactattaaaatacgattcacctcaaagctcaaatggattaaaaatcaatcaaatcctcatacctggtgccagtaagccaaaaatattagaagaattagataagctaaatataaattccagaagtttgtttccagaaattgaatcagcatccaaatatattaaagccaagtatgttattccttcggcaatggaagatgagaacttgtaa

SEQ ID NO: 146102 - DNA, 573 bp, Enterobacter cloacae
atgagctacttcacgctgttaaatcgtctgctgccactcgtttcgtacagtccgggccagcctctgcttgatgcatcattgcgatctgaatcaggtgtttttgagactctcgatgcgtctgcagggcttgttgaaggtggagttactccattttatgcacgcagccttttgtctgactgggaacgcgtcctggaccttactcctgctgaaggtgcgacataccagcaacgccagcagcgtgtactggccaaactggctgaggtcggtggtctcagtattccgtactttactcagttggccagtaaccttggctacatcatcacaattgatgaaccgcaacctttcagggcgggagttaaccgcgccggtgatcgcctatgggttgaagacattatctgggtctggcgcgtcaatattcagaactcaggaacgcaatcctatcgctttcgtgcaggcagttcagctgcaggtgagcgcctgactacctttggtgatccggttattgaagaagtcttccgcgatctcaaaccagctcatacattttgctacttcgcatatcaggagaatgaataa

SEQ ID NO: 146103 - DNA, 669 bp, Enterobacter cloacae
atgtcttctctgtccgggactgcgggtaataccacctcagtcacatcggcaacgctgaccactacacctgacgggtttgacagcacagtgaccgttggtctgatgactggcggtacggatgaggaaactgatgcggagctgcttgcccgtctgcttgaaatcattcgccgacctcctgcaggcggtaataaatatgattacaaacgctgggccctggaagtatccggcgtatctgctgcatatgtttatccgttgcgacgggggctgggtactgttgatgttgttattacgtctgcaggtgggctgccttctcaggatgtgatcgacaggacgcaggctcacattgacgatgtccggcctgttacagcaaaaaacacgctggttatcatgcctgtcattcgtacatttgacgtgctcgtaaaggtgtcactggaaggcatcaccctcgcagcagccaaacaggctatcgccggaacgctggaggacgatgactctcgccgtgagccgggagtggcttttatccgcagtcaggcggggacattgatttctctcattccaggtatcaccgactatgacatcgttacaccatcaacaaatattcagcctgtaatcgatgccacgaaagtcgaatggcttagattaggaaatgttgaggtagagctgctatga

SEQ ID NO: 146104 - DNA, 450 bp, Enterobacter cloacae
atgaaaatagaatctcttatcctggcagtgctggtgctcttttctgcgccttcctggtctgcttttcaggagcgggaatataatacctggtatataaaaaatgcggtcctttatgatatgacacagacatcggaaggtttccctgtcatggtgagcgtctcccagcctgggagaaaatccgctaatttactggtatcttatattactgaaggccgctgtggtgagaataatctgccgcttaatgtgaacggtaaagtgctgcccgcaaaatataattgtgtccagatagggaaaaacagaattgaacatttttcagtggtggacgcggaaagcgtcaatggcatggtgatgcacctgagatctgatttcactattcttctgcaaaacgatatcaaaatttgggcggcaaatatcaaaacgccaaaatatggactggcgccgagattctaa

SEQ ID NO: 146105 - DNA, 273 bp, Enterobacter cloacae
atgaagaagcttagaggatattcctggcgccgtcttgattctggcgtaactggctttggttttattgctcaggaagtccaggaagttttccctgaagcagtaaaccactttgggcaggcgatgacgatggaggatggtactgaggttaaggatgtcctttcagtcgatacgacgggtgtctctgccgcgctccaccatgaagcgatccttgctctcatggatgagattgaaaggcttaaagcacaggtcgataatttgttattggcccggtaa

SEQ ID NO: 146106 - DNA, 255 bp, Enterobacter cloacae
atggtgcagagctgcagcaaccccgtaagtatcgacagttttcacatcaggaatcactgttccgtccttcagagtaatgtcatagccgcctttaactgcttcgggaaacacttgctcaacgtcctgagcaataaagccgtaacccgttgtttcattgtctatacgctcccaacagcagcccttaatggttctcatctttacgagtggatcagatatgcgcacgatgtctttttttatacgcgcatcagagagtga

SEQ ID NO: 146107 - DNA, 1083 bp, Enterobacter cloacae
gtgctgctccacgcgggcaatggcctcggcaggctgcgccagcttgctgttgatctccccgctcgccgggaacgccgccatgcggtcgcgcaccagctcgcccagcgtctgccccttcaggcacagcagctcggtgaccagcagccacgggatcatcccgctgtcgcagtaggcaaaatcacggaagtagtggtgggcgctcatctcgccgccgtagatggcgtcttcttcgcgcatgcgctctttgatgaaggcgtggccggttttggacatcaccggcgtgccgcccgccgcggagaccacgtcgacggtgttccaggaaaggcgcgggtcatgaatgattttcgcgcccgggtttttctcgaggaacgcttctgccagcaggccgacaatgtagtagccctcgatgaactgccctttctcgtcgaacaggaagcagcggtcgaagtcaccgtcaaaggcgatgcccatgtccgcgccgtgctcaatcaccgcgttgcgggtgtcgtcgcggcactccggcagcagcgggttaggaataccgttcgggaagttgccgtccggggtgttgtgcaccttgacgaaggttaccggcacgttcagcgccttaaagcgggcttccagcgcgtccaccaccgggccggccgcgccgttaccggagttgatgaccagcctcagcggcttcaggttcgccacgttgatgtagcccagcaggtggtcgatgtactctttctgcaggttgatttttttgtagctgccgcgcttcgcatcgttcactggcgggaagtcgttggcttccgccagacgttgcacgtcgcgcaggccggtgtcgccgctgatagggcgcgcgcccttgcgcaccagcttcatgccgttatagtccatcgggttatggctggcggtcacttcgataccgccgtccacgcccaggtggaaggtggcaaagtaaatctcctcggtcccggaaaggccgatatccagcacgtccacgcccgcgtcctgcagccctttcgccagggccagcttcagggattcactggtcagacgcacgtcgccgcccagcacgatggtctgcggttttaa

SEQ ID NO: 146108 - DNA, 201 bp, Enterobacter cloacae
atgcgaaaaaaaccattaacgatttgcgtcgggatgtcgattctggcgctaaacggctgcgcatcgccgcaacctgccctggagtgcccaaagccacctccacctccggcgtggatgatgcaggagcccccgaacttactccagacgctcgacggaattatttcgatcaccgggacggaatcgcaaccgctgacaagatga

SEQ ID NO: 146109 - DNA, 462 bp, Enterobacter cloacae
atgaaaacctcgcctcaactggaaacatcaccagtcagagaactggtgcgagctggccatgaactcgcagcagcaatggatgctgatacccccttaatcgagatcgcaaagctggtcagccgactggctacagagcttgatgtccagctcgctcgggcaaacgcgctggttaaaccattgccgtatggtggagggcgtgcaatcgccatcaagcaccccaaacgcctttatgagtggcacggagcaaccgttgttcttaagcgagaaacagcaaatggctgggctaaattgcccgctggcacggagggaacaatcagaacggtgaagggttcgcgacggggcctggagttcgttagcaacccgtgtcagtgctgcggcgtgcaggtgagtattaacggtatgcgcccggagcatttcgaactgctggaattggtgaaaggcaatgcaggagaggaaaagtga

SEQ ID NO: 146110 - DNA, 186 bp, Enterobacter cloacae
atggagtgctaccgcagcaggaaattaagcgaacgcatgaaaaagctggagccgcgtaaacccggcaaagccaggggaacggataaggcggaaaacgaggggtatctggctggccgcaatgcgcagctgcatcacgcggtaagcagttcagctaataaatgcgaacagatcggagtaacaaaatga

SEQ ID NO: 146111 - DNA, 744 bp, Enterobacter cloacae
atggctaattgccagaactcgaacgagcgcctgttcggcggtgcggtcgtgctggaagtcgccgatggctgcccggacgtcaaaccactggaaagtgagtggaaggcgctggctgctggtacgtcgaaaggcttcgacttcaacccgaactcggttacctctgatgcggatgacggcggcggctatgtcgagaccatcatcaccaacagtgatcttaccttcagttttgaaggtgaagtgcgcaagaaggacaagctggatcagtacggcgtcggcaaattcattaagtactttgctgacgagcttgctgccaagcgtcaaacgggaatctgggtgcgaatggaatatggcccggttgaattcatcggctacatgaacatcacggcgctgagctctgacggtggcaccaacgacatcgtcacgttctctactgagttcaaagtaggtgatgcaagcactatcgaagtgaacgaaatcactgcggtagcggtgactggcgtgacggtaacgccgacaaccagcaccggcacggcaggcggcaccagcactttcacggtgaacatcgcaccaaccggcgctaccaacaaacaattcactgtggcgactaccgacgcgaccaaagcaacggccaccgcctccggcaacaccgttaccgtgacgcgtgttgccaccggcagcgcgcagatcatcatcaacaccgaagacggcaactttgtggccgtgcatacggttaccgttacctaa

SEQ ID NO: 146112 - DNA, 663 bp, Enterobacter cloacae
atggggattgaggtcaaatcgtgggagcaggacattgtcacggtacagcaggcatggggaccaaaagaaacccgtgacgttaaggcgttacgcttcaacggcgagctttacacgcctgatgccggattcgggcacaatccgggtcagggctggctctcttctctcggacagcgcctcatggataaatctgcaactaccacgccccggattgcctctcaggccatccatgaaactctatctgaacctgctgtactggatgccgtcagcgatgatgtgcgtcgctgggtcgacaccgtcagcgtgcggcagaagacccgtggcgacctgaggcgcgttggcggtatccagcctgagctgctgaatcgcctcgaagagcgtggtgttaacggtgcgatcacattaagcgttcacgaagaggatgtccggctggctccgggcccgatgtggtcagagcttcccgttctgctccgtcagccagctggtgtctggcttgatgatgacgctctggtgtggctcctctccgggcagaacggcacccgcgccgtgcgtggtgtgcagtctgacgatggctggcgtctgtcgcttgtaaacgccggtgccacagtcacccctggcgatgtgttatctgaacgcgcggcgcagctgctggagctgaaatcatga

SEQ ID NO: 146113 - DNA, 552 bp, Enterobacter cloacae
atgaaccatcatagcgcaaatgaaactgacgatctgatagtaacagcggatgataacaggaagctttttaatctgaccaaactggtagctgaggagctgtgccttaagagcgaacgtgatgttactgtggttcgaccaagcaatgtctatggtttagcgctaaatagtacattattcttaccgtcaattatccgtcatgccattaataatggtgaaatcaatatgtttgttgcacctgaatatgctaaggattatgtttcggtcaatgatgtcgctaaagcatgtgtgtggttggctgaaaaccaaaacggcaataaagaaatatacaatgtcgcatctggatttaacgtaacagcaaaacaaatcgctgatgtcatagaaaaagagacggcttgtaaagttaactggcatgacggtaattttccgcgtgaagagtttcctgttaccagcatacgtaaattaactaatgaaattccggattataaaccacaacatgtgcttgatgatttgaaaattatgatagctagttataaagaagaactggcgagataa

SEQ ID NO: 146114 - DNA, 129 bp, Enterobacter cloacae
atgttattggggcatattcaattacttaataagtattgtgtaaaatcttcttgtttgtactactgcgacaataaagcacccaatagcaaagcatattttcataccatcttctattgggtgtacatttaa

SEQ ID NO: 146115 - DNA, 516 bp, Enterobacter cloacae
atgaaaattattgaaacgcccttaaaagatgctgtaattattgaacctaaagtttttggtgacgaacgtggctatttcttcgaagtatatcagaaaaaacgttaccaggaagtaggatttggtctggactttgttcaggataatcgttctaaatcgacgaaaaatgttctgcgcgggcttcattttcagaaaacaaagcctcagggtaagttccgcccagaatcaccaacatttggtcagcatcattcagtcattctatccgaagataattttcttcagttttatattcctcctggtttcgctcatggtttctgtgtattaagtgatactgctagtttccagtacaaatgcacagattattatgatccaactgatgaaggtggtcttatctggaacgatccagatcttggtatagaatggccagtttctaatcctgtagtttctgctaaagattgtattttaccttcacttgcaagtatcaaagaacagattcttaaaggctggacaaatggctaa

SEQ ID NO: 146116 - DNA, 558 bp, Enterobacter cloacae
atgcttattgggtatgtcagggtgtcaacaaatgaccagaacaccgcattacagcgaacagcgctggaatgcgcaggatgtgaactgatatttgaagacaagatcagcggaaaaacctcggagcgtcccgggctaaagcgcgggcttaagaccctgagaaagggggatacgcttgtggtctggaaattagatcgccttggacgcagcatgcggcatcttgtcctgctggtagaggagttgcgggaccgagatatcaattttcgcagcctgaccgacagtatagatacgtcaacgccaatgggacgtttcttctttcacgttatgggggcactggctgagatggagcgtgagttaattgtggaacgtacaagagccggtcttgcggctgccagggctcaagggagagtcgaagggagacgcccaaagtttacatcggaacagtgggcgcagatggggagattaattgcagctggagaatcacgccaacgagttgcgcttatttttgatgctggtatatccaccctttatcgtaggttcccggcttcatcatttgaatga

SEQ ID NO: 146117 - DNA, 276 bp, Enterobacter cloacae; identical to SEQ ID NO: 14803

SEQ ID NO: 146118 - DNA, 525 bp, Enterobacter cloacae
atgattaatcctataattcaacccatgataaggatgcataatcacgggaataaccagcatgttgaactcctggtcaacaaacttattttccttttctcgatgattgtctttattggtgtttttattgcttggtttgcctctatacatatccttggcgtctggctggggtatcagcaagcgacaaacttgcacattatgttttctttgctgcttgcggcttatcttattcgaatgattgcagcgccctacgggcttatgttagtcgcctacggtaaacaattgtcaattgcctggctaccagtgctcgaaggaatattgaattttgcgttgtcgatttactttgttcgtatatttggcgccattggaattgcctgctcgacgtttatttctggcatattaatcatggctgtttacgcatgcaaatatcaggcagaagctgaatataagtcaaaattaacatttgtctcgtttctgataatacctgtgattatagccatctgcctggtcagtctggtgatgacttaa

SEQ ID NO: 146119 - DNA, 168 bp, Enterobacter cloacae
gtggggaaccggttcgttaaaaaatcccgttccaactttgagcagtggaacactatcggggcgtataaaattaagatgcccgcgcgtcctttcctgcatctcaccgaagatgacgtggagaagatggagagtacggctgagcaatatctgaaacgtattttagactga

SEQ ID NO: 146120 - DNA, 195 bp, Enterobacter cloacae
atgcacttgataaagatggtcctggttataccggcattggtcctggtggcctgcagctcttccgcgaagccttcggctaccccggaaccgaaggcctccccgctggtcagcatctgccagccaccgccagcggcacttctggtcattccggccaggccacaggcaccggtggcggactctcccccaggggaatag

SEQ ID NO: 146121 - DNA, 258 bp, Enterobacter cloacae
atgaccagaagtgccgctggcggtggctggcagatactgaccagcggggagaccttcggctccggggtagccgaaggcttcgcggaagagctgcaggccgccaggaccaatgccggtataaccaggaccatctttatcaagtgcatcgtcaagcctctttttaagatcgcgaacagtctcatcatgtgccttttgtttttcagccagctcgcgggtcagcgcatccgctttctgctgccaggcgttctgcttatctag

SEQ ID NO: 146122 - DNA, 402 bp, Enterobacter cloacae
atgggttatgaacaggtggaagtgaccaaagcgtcgggcgataagggtgttgatgtcgtcggcagagtacaggtgggcattaccaccatcacggaagtggtgcaggttaagcgtatgcagagcaatatcacccgccctgttatcgaccagttacgtggtgcgttgccttatcacagcgcgatccggggcacactcatcaccacggggcgttttgccgggaactgtgaaaaagcggctctgcatcccggagctgcccctattaccttgatagatggtgaccggctgctagaactgctgattgagaataatgtcggcatccgacgcagcaatgcggtcgagctgctggacgtggatttacagctttttgatgagctggaagagggattaaaaggcgaaatttaa

SEQ ID NO: 146123 - DNA, 747 bp, Enterobacter cloacae
atgatgaaagccgtctccggctattcagtgaattctgtacgtaacatgatcactgcaattcaggaacaaaccggcacgccgcaaaacccggttgactggtccgaacctgatatgtggatcaacgaacgcctcaaaggtgaagacgctgagatcgcgctgcggatctggaatcaggataatcacatcctcaatccgcgccatagttacggtagctatttgtttctaaactcttcagtcttcgcactgatggaaacgacgccgaaagatacctgggtacccaccgagggcgggcagcaatttctgaataatgaagatgtcacgttacgctcgctggacgataaagaagggttactgcatcttcttgaactgctggctggacgtgaaatgtcccgtcgtgctgacttactcccggaatggcaggcttttttacacctgcattcaaaattcgcttctaccagctccatcaaaagcacgctctactcgcgcctctataacctgatcgatcgcgatatggtcgcccgagaaggaatgagctactacatcaccgataagggccgcgcatggttagcgaatgccttaccggcccgcaaagccgacccacgaaaagaacttctggacgcagtgaagcgttacaaccagcagcaaaaagagcagcttcgcgaacaaataagcacaatgaatccctacaagtttgagcatctgattggtcaacttctcgagggatgggttatgaacaggtggaagtga

SEQ ID NO: 146124 - DNA, 471 bp, Enterobacter cloacae
gtgattatcggctggagcgcgctgcgccagtttacgtggctgtttacgcttatcgagctttgtggggcgctgtacctgctgtggatcggctcgcatctgattcgcagccgccagcaggcgcgggcgctgaacgaaacccaccagcgcttcccttcgctgcgcaagcagatcctgctggggctcggttcggcgctgctaaacccgaagaacgcgctgttctatctggcgctgatgacggccttgctggggccggacgtcacgctgcttcagcaggcgacctgcggcgtctggatggtaatggtggtgctggcgtgggatttagcgctggtgtcgctgatggggctatcggcggtacaacagaagctcagccgttcgctgtggtggattgagcgcacggcgggggtggtgctgatggggtttggcgggtgggtgctgtggcgattggtggcagaaagtgttttgcctatatag

SEQ ID NO: 146125 - DNA, 141 bp, Enterobacter cloacae
atgtcctcaccccggccctctcccacggggagagggagaaaacaaattttgagagatttcttctttcacaagcctgtgaaagaaaagaaaatctggcctttgcgcctgaaagttgcggagaaaaagcatggcggggaatga

SEQ ID NO: 146126 - DNA, 867 bp, Enterobacter cloacae
gtggcgattgacttacgggcagcgttcgagaacgaaccgcccgcactagactttatttggccgggctttcttgctgggacggtaggcgcgttggtggctcccggagccacgggtaagagcttctgggcgctggaagcggcaatggccatcgcgtgcagcgctgccggtggcgatcttgtaggccttgcccctgcgtgtgctggccgcgtggtctatttcgctggagaagacccggaagtcgcgctggtgcgccgtattcatgccatcggtcagcacctgagtcagcaggcccgtgaaaacatcgccgagaacctgacaatcaagccagtcatgggtacgctcatgaacgtcttagatgacgctcaacgcgctgccctaatcaaattctgttccggcgctcgactgatcgtactagatacactgagccggattcatgaccgcgacgagaacagcaatggcgacatggccaagcttgtcgccacgctggagcacattgcagcgcgtaccggggcctctgttctttacctgcatcacgttagcaaaggtagcgctcgtgaggggcaaacggatcaacaacaggccgcaagaggcgcatccgccctaatcgacaatgcccgctggtgcggcttcgtcgcaaagatgaccgaggacgaggccaagagcctaagcgaccgcgcctatgaccgtcagcccatcggcaaagaccggcgcggcttctttgttcgttttggtgttagcaagcagaattacgacgctactccgcatgaccaatggtatcaacgccgcgacggcggcgttttgctgccggtggagctattggacgccaagcaggacagcggaaaggggcgtcagcgtgagcaagcatga

SEQ ID NO: 146127 - DNA, 900 bp, Enterobacter cloacae
gtgagcaagcatgacttgactcacgcccggcacgacccggtgcattgtctagcacccggcctgttccgtagcctcaaacgtggcgagcgaaagcatagcaagcttgacgttgcatatgactacggcaatggcaagcgtatcgagtttagtgggccggaaccgcttggggctgacgatctccgcatcctgcaaggattggtagcaatggctgggccttctggccttatgctttctcccgatcctcagacagaagccggtaggcagctccggctatttctcgaacccaaatgggaagccgtccagcagaatgcgatggtggtcaagggtagctatcggtcgctagcccgtgaggttggctatgcggatatcgacaatactaggccagtacgcgattgcattgagaggctctggaaagtctctatcattgcgcaaaacgataggaagcggcagggcttccgtttgctgtccgagtacgcaagtgatgagcaggacggcaagctgtacgtggcattgaacccccttattgctcgcgcaatcatgggcgggcagcacatccgcatagatatggccgaagttaggaaactacggaccgaccccgcccgcttgattcaccaacgactgtgcggctggattgacctcggtaagtcggggcggatacagctagacacgctatgcggctatgtttggccggatgaaccgacgaacccgaataccgtcaaaaaacgccgacagacggcacgcaaggcgctggccgagcttgctgccgtgggttggagggtaggcgagtatgctaagggcaaatgggaaatcgggcgacccaaggcatccgactgtaacgctgctgccccctgtttaacggcaccccaccccctgtttaacagtacccaatcccctgtttaa

SEQ ID NO: 146128 - DNA, 321 bp, Enterobacter cloacae
atgatggccgtacttatgttcgctggattcgtagtatttgcatcgacgttcgcagttggtatgtgggcgctcggtcgatggctacgtagcaagggctacgggccgcaactcgatagattggatcgccagtacacggccttgcagcttcgagtaagcccgctcgccttgtcggcctcctatcacatgtttgccggggcacaggctatgaatcgcctgcctttgctgggcagcaagaataacgcatcgctgaatcagcaagcattgatggccatccaggcagcgcaggaagcacagaaacaagatagtcccggcaagcggtga

SEQ ID NO: 146129 - DNA, 1524 bp, Enterobacter cloacae
atggccgcaaccgacctttcacatgccgatacatcggttcaaggcctactcgacctagttctacaacagtcgcaccagtggtcagcgaagctctatgagtatgcgatccgactgttctggctgctggcctcgattcagtttatttggacgttcatgcctctggtcatgaagcaagccgacttcggtgagattgtcggcgaacttctgcgcttcatgctggtgatcggcttctttcttgcagttatgaagtactcagtagagtggtcaacggccattgtcgatagcttccgcgatgcagcagcatcggcgagcggcctcgggcgcgcattagaacccggcgatatgcttgccgttgcgctggattttggccgcacaatggtaaagggcatttcggtattttctccagctaagggacttctgatcgctgtatgcgcaatccttgtgttggcgtgtttcgccttcatcgctgcatttatgtttgtaacgctcgtagagtcctacgtaatcatcaacgcgtccgtgctgttcttagggtttggtggctcgcaatggacgcgggactttgcaattgcgccaatgcgtttcaccgttgcgattggtgccaagctatttgtattgaccttgattgtcggcctagttgtacagtctgctaagcaatggttagcagcctatacaaatgatgaagcgtcattgatgacgatggtcggcttagccttagtgtgctgctatctgaccaagactattcctgacctgatcggcggcatgattagcggcacttccatgggcggtggctcggccattggtgggatggctgtggccggggcagccggggcggcggcggcggttgccaccatcgccacggcaggggcggccactccagctgctgccggtgctcttggcgctgcgggtactagcggcgccactggtgcaggggtagctggtgcaggtgggattagcggcggcggtctggcttctgcgatcaattccagttttgccggtggtggtacgccagcagcagcggcaactagcggcgctgcgagtacgggcggccaagcggccgcccagagcgcttcgtcggccggtgcccgcgtgggtggcagtgccgcccctcaatcgtcgggtgcggctccgcagcagcctagcagtggcgtgcagcaggcgaccaggcaggctgggagggacgcacagggcaacgacgacaaaaaccagcaagggacaccgaaagctggacttgttggctctggtaacgccctttcccaagcggccaacgctagcgcaaaggcgctcggcgtgatgacctcgatggcagtgccgggaatggagaatgcacactctctgtctcttggtgcaggagctccgccatctgcgcctgacgccaactcgaccgttccagccgatagcggggaaactgcacaaacggaatctaacatcatccgtccagtctcggacgcaagccccgctacaagtcgcctagcctcgctcaatgtgcccggcactgcctcaaacaacgataacttggagtaa

SEQ ID NO: 146130 - DNA, 189 bp, Enterobacter cloacae
gtgactatttcaaaatggatcattgcgttgatgtgcgccggctccgccctggccggttacatggttaccgtaatggttaaaagcaacggtgaatgtactgcggtggcagagcaacaaatgcaaaagcgtgacgctgatgcgtcatttgaggcgcgcccgaacactcgtggcggcgtgaaggggtactag

SEQ ID NO: 146131 - DNA, 795 bp, Enterobacter cloacae
atggaaaaagaatcgcaaagtacgtcagcttttaccgcccggatatttcgccgaggtgcggcactagctgtggcaatggcaactacaggcttcggcgtaggtctctacatgacacctgtaccggcttacgccatctactgctctaactgctcgacgttctatcaacagatgttcgagtacgccgagcaggtcaacacagcgctgaacaccgccgagcaattgcaaacgcagattcagcaataccaaaatatggtcacgcaaggcacagggttgcccgattcaatgttcagcagcatcgcgtctgacttgaaaagcgtcgtcaacatctacaaccgctcgcaggcgttgggccgccaaatccagaacatggattcgcagttcaacacagtttttccgggcttcgaatactacctaaatcaagcagctaattcggcagaggccccggcgcaggatcgctatcaaaagtggtcgcaacagggccgcgacaacgtaaaaacggcgatggaagcggcgaacttcaataccagcaccttcgagtccgaggatgcccagctagaccgcatggttgctcgttcgcagtcggccgttggtcgtatgcaggcgattcaggcgggcaatgaaattgccgggcaaaacgtgcagcaattgcaaaagctgcgcgacctgctggccacgcaaatcaacatgcagggcaattacatggctcagcaaggcgaccggaaggctgcgagcgaagccaccgaacagcagtttgaagcccgcaaaaacacacgcggcggcgttaaggagtactga

SEQ ID NO: 146132 - DNA, 363 bp, Enterobacter cloacae
atggcagagaagaaaaagacgacgtacggcacccggcctcggaacgaatacatcaaggtcttcgtgaccgaggacgagcgcgccgggctgatagagcgtgccgcgcaagcgggcatgtctcagtcggcgttcctgcgcgccgttggattgaatgagccgatccgctcggttgttgacctgcaagccgtggccgacttgggcaaggtcaatggcgaccttggccgagtcgctggcttgctgaaactttggcttgcagagaagcgcggccaaggcgcgcggccggtggatgttgaagcgatgatgaacgactttcgcaggctgcagggtgacgtcctcgctattatggcgcgagtcatcaagtaa

SEQ ID NO: 146133 - DNA, 192 bp, Enterobacter cloacae
atgaaggacagatcacatctacaggcgatggccgagtactttcgggctgatccggcttatgcagcggagttgcttgccgatgttcgttgcggcggcgatcaggacgagttagatattttgatgcggcaaatggacgaggccttcatgatcgaccacaagcttcccggctccgcgtccgaggaacagtcatga

SEQ ID NO: 146134 - DNA, 699 bp, Enterobacter cloacae
atgacacaggcagcttggacacatgacggcaagccggtagatgcggcctccatctcctccgacgagtgggagaggctgaaacaggccgcccggctaggtgattttgtgatgccatgttgcaaagcgccagcggtactcaagacaagcatcaatggtctgccgttcttcgcacacctgtcagatgagtgcagcacagcgcccgagacgaaatggcataagtcgggcaaggccgcagtgatggccgccttaattggcatgggtattgaaaatcgagacgaggttcccggccgatcaccgagcggcgagaagtgggaagctgacgtgctcttttcagtctcaggccgcaccattgccattgagctacaacgctcctaccaacacctacgggaattcactcgccgccaagagcgatacgctgcatcaggagtagagtgctactggctggttcgcaaagagacctttctgaccctaggcaaagcgacgtctcgcctgcttttgaagcgtgatttcggcagtgttttcccgtctggcggcatcggcactggcatgctgcctgagcttcctgtggccatgctagacacagaaggtgagttgcttgtccaatttggcggtttcaagactgcaacgatccctctgtggttggggggcatcattgatcgggccttcaagtatcgagggggttcttggaatcttggctaa

SEQ ID NO: 146135 - DNA, 147 bp, Enterobacter cloacae
atgactaaacgcaaaaccaaagagcaggggatgaccctgctggaagtgatggtggcgctggtgattttctccaccgcggcgctggcgctgatgaactccgtcaccctgaacgtgcgctttacccacagcctgtcggaaacgctgtag

SEQ ID NO: 146136 - DNA, 1488 bp, Enterobacter cloacae
atggcttctgctgtcggtcaacaaatgaaacagatcggtgaagcagtcaatggctatataaatatccgttatgataagttgtcaaccttatccaatgctgccggaacaggaaccgatccgggtccaagaacctgttcaggttcagtatgtgaaattacttaccagacattgattaacgaaggtttgctaccttcaacctacacaggcactaatgctaataaatcctcgtatagaatcatattaaaacgagatggaacttcaccttactttgttattaatggtcttataacgacatcgacggcatggattgaaggcggaaaaacacgttatgatttattagggaatgccatgcaaaccgctggtatagatagcggtatgacaagaacaacatcaaatgctttcggttatggtggtcaatggtctgaaacctctgctaatttcaataatattacctccgctggacaattagcatttcgtgtaggatataacagtgctttatattctgtttatttaagacgagatggaaccttgcctatgactggcgatctaaatcttgacggacataatattaacaatatcgccaatatcaatgccacaggcaatattacgacgacaagcgacctacaggcaagaaatattaaagctacaggaaaagttgatgctgatggtgatatttcagccggtaattgggtgtgggctaagaatggatatggggacgctataggttttggtggcgatgcttatggtggagactatgaaatacgtttaggaacggcaaaaccattaactttatattcaccatctgcaggaaattatacaacagtattacaagttaatagaaatgccaaaatagatcaaaggcttggtttaatggggtacgatccaaatgagttaccatctggctggggtggtggtttaagaacacttgatgtatatgccgctggaacagtaggaacaggttcgggaggagctgtaaatgcttatatgaatagttctggtaatatttatgcctctaatgatatcaatgctggtcatcagatgaatgctcaatacgtatgggcatcaggaaatcttaactctaactatattcattcaaatggtaatatagatgctaatggcagagttaatgctggtgagttcgtgtatattaacggacaagcgaatgtaggatggggatgttctccaaatggattacagggaagaacgccagaaggtaaagttatttcttgtgttaatggagtatggagcggatcaacaggaagtccagtaataagaacagcatatgcctctgtttatcgtttccccggagctgttgcttattgcgctggttcagaaaaagttgtaggtggaggcggtcaatgtaatacagcagaaggatatgtttggttaacggtctccagacctaatggtgataacagttggtatgcaggatgtgatacaactaaaaatattacagctactataactgtttatgctatatgccaataa

SEQ ID NO: 146137 - DNA, 2037 bp, Enterobacter cloacae
gtgagcatggatattagcgatttttaccaaacattctttgatgaagccgacgaattgttggccgatatggagcaacacttgctcgatttggtgcccgaagcaccggactccgagcagctcaatgccatcttccgtgcggcgcactctattaaaggcggagccggaacgtttggatttaccatcctgcaggaaacgacccatttaatggaaaacctgcttgatgaagcacgacgcggtgagatgcagctcaataccgacattatcaacctgtttttggaaaccaaagatattatgcaggaacagctcgacgcctataaaagttcggcagagcctgatgccgccagctttgaatacatctgcaatgcgctgcgccagctcgccctggaagcaaaaggtgaagtcgctgcagccgttgtccctgcggcgaaactgagcgttgtcgatgcggttgctgccgacgaggccgcgccagccgctgcacaagcgggcaaactgcgcgttgtgctgtcacgtctcaaagagaatgaagttaacctgctggaagaagagctgggtaacctggcgaagttaagcaacgtggtaaaaggcaaagacagccttgccgcgacgcttgatgacggtattggccaggacgatatcgtcgcggtgctgtgctttgtgattgaagctgaccagatcgccttcgaaaccgaaacggctgcggttgacgcccctgtggcagtggaagaggtggccgttgtcgctcaggccgccgcaccggctgtggctcctgcggctccggcgctgaaggcagtgccaaaagaggccgcagcacctggccgcggtgagaaacctgccgcgcgctccagcgagtcaaccagcatccgcgttgcggttgagaaggtcgaccagctgattaacctggtgggcgaactggtgatcacccagtcgatgctggctcagcgttctaacgaactggacccggttacgcacggcgatctgatcaccagcatgggtcagctgcagcgtaacgcccgcgacctgcaggaatcggtcatgtccatccgtatgatgccgatggaatatgtcttcagccgcttcccgcgtctggtgcgcgaccttgccagtaagctgaataaacagattgaactgaccctgatgggcagctcaaccgaactggataagagcctgatcgagcgcattatcgacccgttaacgcacctggtgcgtaacagcctcgaccacggtatcgaactgccggaaaaccgcatcgccgccggaaaatcgccggtcggcaacctgatcctctctgcggaacaccagggcgggaacatctgcatcgaagtgaccgatgacggcgcggggcttaaccgcgagcgcatcctggcaaaagcgatttcgcaggggatggcggtcaatgaaaacatgaccgatgaagaagtgggcatgctgatctttgcgccgggcttctctaccgcggagcaggtgaccgacgtgtccggacgcggtgtgggcatggacgtggtgaaacgtaacatccaggagatgggcggccacgttgagatccagtctaaacagggttccggcaccaccattcgcatcctgctgccgctgacgctggcgatcctcgacggcatgtctgtcaaagtggcggacgaagtctttatcctgccgctgaacgccgtgatggaatccctgcagccgcgtgaagaagatctgcatcctctggcgggcggcgagcgcgtcctcgaagtgcgcggcgaatacctgccgctggttgagctgtggaaagtgttcgaagtggacggggcgaagacagaggccacgcagggcatcgttgtgatcctgcaaagcgcgggccgtcgctacgcgctgctggtcgatcagctgattggtcagcaccaggtggtagtgaagaacctcgaaagcaactaccgcaaagtgccgggtatttctgccgccaccattctgggtgatggtagcgtggcgctgatcgtcgatgtgtcggcgcttcagggattaaatcgtgaacaacgtgtggcgtacacagccgcctga

SEQ ID NO: 146138 - DNA, 153 bp, Enterobacter cloacae
atgaagccatttttcagaccggtttgtctggcgggcgcgttgggaatggcggttgctggccaggcgcaggcggcggccaccatcctgctctggcccatcgatccctggcttgctgcagacgccaacgccacggaactgtggatccagaactag

SEQ ID NO: 146139 - DNA, 510 bp, Enterobacter cloacae
atggcaatggtaaagtgcaaagagtgcaaaaaggagatctccagcaaagcgaagacttgcccccactgtggtgtaaaaaacccaggagtcaaagccagtgatgcttttggcggctttgttgttctgttggtgctggtcgggattggttactggtatttcagcggcgatgaagaaccggtagcaaaagaaccggcaaaaactaaggtatgcgacaagaacgacggccagtgtatttttgatgcgcacctagtagacgccttgatggtctgcaaaagcccgattgagaaaacatcaaaatacgatttcgaatggaccaatggcgcttttgagaacatattcagccgctacatcaacaagcctgaaaagaatcagattatctatgttggcgacaaactgaaatttactaacggtttcaacgccaaagttaacatgacttatacctgcacgctggacactaaaactaacaagctggttgatttcgaagtaacacaaggccgcttgcctgattga

SEQ ID NO: 146140 - DNA, 1944 bp, Enterobacter cloacae
atggctcagacagtcattacaaaagcgttcaccgaatggaaagcccaacaggcaattgataatcagccggttaatctggatgaatttatttttgcctatatccccgatctggatgtgacaaagccggttgagaatacagagggtttgccacctgccgataaaatcgtccatcgccaggcggtgagcaaatcaggcgtggttaatgcgaattccgttgtgtattccgtcactctgggcgcggacgtcggcgactttaatttcaactggatcggtctggcgaacaaagcaaccggtacgctggcgatgattattcacgcccctacccagagcaaaattaagaacgccagcgggcaacaaggtaacgtcctggttcgttccatgcttatggagtatagcggggctgaatcggcaaccaatatcaccacgccagcagaaacctggcagattgactttaccgcacgactggcggcaattgacgaacgccagcgccgggaaaatatcgatctttatggtatggcggcattttttgacagcggttatctggtcgccaaaagtggcgctcaatattacgtaacaaaaggcgcaggctacgttgccgggctgcgtgcagaactggccgcgaatcagaacatcacggtttcagccaggccggtaaaggtctggctggatgtgtcctggtcgggaacgctgacaagcgaatgggcagtaaagagcaaaattactgtggctgcgagtcttgccgattatgtggaaaacggtagccagcattatgtgtttgcagtggcgagcatcgacgcaagcggcaatattaccgatctgcgcccgaaaggctcccttaacgaccagtcaatcaaagagcatgaaaaatcacgaaatcaccctgacgcgaccactaccgaaaagggatttacaaagctaaatagcgcagtcgatagcgaatcggaaacggaagccgcaacaccgaaagcggtaaaagctgctaatgacaacgcaaatggacgcgtgccgtcagggcggaaggttaacgggcgagcgctggcggaagatatcaatatcacttcgcaggacatttttaatggtcaggccgtgctgattgggaatgctgccgatctgaatagctttactacaccgggattatattaccagtcatccaatgcgcaggcggaagctggaactaattatcccgaaaaggtggccgggtcgcttgaagtttacaaacatgcaggtgttacgcaggtataccggatatatgctgattcacgctcatacatccgtattttttataatggcacatggacaccctgggcaaaacagtatgactcagccaataaacctaaaccaacagatattggtgcggtgtctgcgaatggtggtgattataacgccacattcaagctgggaagagttgaaaccttgccaacagaatcaaatatgtctgccctttataatgtgcaggctggtgatggtggggttgtgtcaggtgttgaatttaactggtacggtcaaaaatttacagtcggcatcacccgcgacggaagcaccggcacaaacggtttagtatttcagcacaacggatatacgcgcctaagaatagataaggatggtaatttaatatcttccggtgcaatttccgcaggtgataaattggtagctggcgctggcgttttcgatactccaggtgtgcgggtttattcttcgaataaccctccaaatttaagcgcttatgcaacaacatcatggactatcgctaacttcctgcaaggggggcttaggctggcatcagcaggagtcgccacaaacggaaataatgataacgaatttgcgtatgcgcctaacggaacggtagttactgctgtgcaacaaaaaacgaattacacggcggtacagtatcgttctcttcaatataacatcggcggaaactggtacacagcatgggtggcttaa

SEQ ID NO: 146141 - DNA, 228 bp, Enterobacter cloacae
gtgactatccgttttcagacttcatgtgccgcaccgctgtgcgtaagcaagcgtgcaaccgctgaattaagccagtacgcgaaaggccggagaaattattcccgcattgcgccacatcattatttggtgatccgtctgggttgccgctggcggttgttgagtaaggacggcggcaaggtctggtcattactgacccacgaaaagtacaacgtggaaagtaagaaatga

SEQ ID NO: 146142 - DNA, 459 bp, Enterobacter cloacae
atgatagaaaatcgagatatcaaaactatgtcggatttccgacaaaaccctctagagccaacacggatcaagtctgtctgcaaaatgacagagtctcaagccgcagcgatccgggatatgaaaaccgaagaactgcaagagcagattttcgttactcctgctgaattcgcttacctgacaggccgcacattaaagagcgttcgcaacctaatggaccgcgcacaattgccggtccaccgcgaagggatgccgggttcgaaacgtcctaagcgtttcatcatgctgcaagaatactgggccgccgttgcgcattgccgcgcactaatcaccccagaagaaaagcactgcatcgatcgcctgatgcgggacaagaaaacatatcgccaggtaacagggaaagcgcttcaaactcataagcgtacccgccgaaactccttttcacttcaacgcgcctgctaa

SEQ ID NO: 146143 - DNA, 423 bp, Enterobacter cloacae
atgttcagagagaatttattagttatcctagccgcatcagccttttctgtaccaactatggcggcaggcgatccacttcaaagcagagttcaggattattgtggcaaagtcagttccattattttacaggccgcggctgattataatcatcaactgaataatgtagtgaaaccagaagacgcaaaaatcagtgtcacgcagaaagtgaaggattctgaagaatatgtcagtgcatccccggccgtaaaagcggagattgacagggcggtaaacagtagtactgactataccgaacattccagaatgatggccgaacaagataagatccacgagccttatatcggtatgcacgcatggacatgggcttatcagaatgttacgccattcacagcatggtgtaattataaccatatacagggttga

SEQ ID NO: 146144 - DNA, 417 bp, Enterobacter cloacae
atgccttcattactattacagtcactgtttccgctcgtctttataatgttacttggatggctaagtggaaagctgggatattcccggcgagaagatgcaaacgtcatggcaaccgtggtgattcgtttcgcccttcctttccatctttttatcggtgcactgcataccgacccgaataaaattaagaacctgacctttatggccgttttagttgtcggtttaatggggtcgtatttactgacgctatttatttcgcgctacgttttccgccacgatatcaaaaccagcgccattcagtctctggtttgcgcctttccggatatggcctactttggcgcaccggtcctggcggtattgattgggccggaaggatttatcggcgtgctgattggcaatattaaaccagcgttatcatga

SEQ ID NO: 146145 - DNA, 693 bp, Enterobacter cloacae
atgttaaacaaaatgattaagtcaacgctggctgttgcgattattgcagcaggaattaatattgctttcgctgagagcgtcgatgtgaaagtaattggtactatcattcccgcagcctgtactccagctctgtccggtggtggtgttgttgattacggtaacatcaaagctagtactttgtctgccgatgattatacaaccctcccaggaaaagaaattgatttttctattacttgtgatgctctcgcaaaagttgcaattaacgctgttaatgatcgtcccggtacaatggccggcgtaactgagggctacaacggtgccgccggtacaccggtaccactatttggtggcggcgtaatgggcgttggtctcggacttgatggaactgccaaaattggagggtacgccattcaatttgatcctgaaaaaatgactgtggacggtggttctgttgatggtattaaaaacggcggagcaggttcagactcttggactgcctcatcaggctttccatttagtaatgctgctcgctatctttcatgggctaagactggcgagcttgcgcctgttgcttttaaagttctggctggaaaactggcggtggaagcttatattaataaagcatcagaattagatcttacccatgcagttcatcttgatggccagactacattagaagtcatatacctgtaa

SEQ ID NO: 146146 - DNA, 699 bp, Enterobacter cloacae
atgaaactcacctcaattaatacatttggggcgactgctctcgcgttgatatcaacttttgcccatgctactggcgtggttcctgagacgtctgttgtagttgtggaacaaaacgacggtgagggaagtattaatgtcaccaataccgaaggttatccagtcttattgctcagtacattacacaatattcaggaggacaaatcttcactattgacgataacgcctccggcagcacgcattgaggcgggaaaaagccagcgcgtgcgctttctgttgacggataacaagccgctaacgactgagcatctgatgcgagtcacgtttgaagggattcctccgcagaagaaagatcaaaatattgttcgcatgagcgtgcgtcagaatcttcccgttctcattcgtcctgccgacctgccaagagatgaagctccgtggaaacgtcttgtctggaaacagtcaggtaacacattgacggtaacaaatccttcaccctacgtggtgcgaatgggccaaggggttacgacattgccaaataaaaccaactggacgatgaatggtacatacgttctcccaggccaaacccgtacgcttcaggtcgatggcggcaaaagcacaggtatcgctacccaggtccgtatttcgcctgccaccacttggggttacaccgtagaaagttacgacgcagctttgacacgctaa

SEQ ID NO: 146147 - DNA, 2322 bp, Enterobacter cloacae
ttgattatttcagtacgtcgcattcgtaaaggtatgcctgtgcgatctgctctttcattagcagtcttcgctgcaattactctcccgacaatggtgaaagcggctgacaccgcatcagataacgatagcattcagttcgatgtgcaagcgatgaaagcacgaggtgttgatcctaagctagccgatatgtttgctcatgcgccacgtttcatgccgggtgtaacccttgttaaattgacgattaatggagcagaacgcggcaaagttacggctcgttttgatgataatggtcaactatgcgctgatcctgattttcttaaaaaagcgggtataggcatacctgaaaattacgacaaaggatctgactgtttcgatctgaaaacgatctggccttcggctgttgtcactcttgatccgggtgaggcggcggtcgtgcttgttgttccgcaacaggcaattgtatcttccactgatccatctgttggtaactggacgcatgatggtactgccggtgtgcttaattacgatgcgcaatatatgtcttcttccaacacggattatgcgcaaatcgacagcgaagcgggctttaatgtgcgtgactggatttttcgtagtcgccagaatttttcacgcttcaatggtgaaaatgtctcgcagcattcagcagcgtatgcgcagaaaaccttggcggaacgaaaacaagttttgcagacaggccaaatttccttatcaaactctatgtttggtacgggacaggtttggggggcccagattttcccagaaactgcgttacaaaactcaaaacgcggtgctgggcttgttcaaggtattgccgattctcagtcggtagtcgaagttcgtcagtccggcgcgcttgtctacagcacaaccgtcccggcgggtccgttcaagcttgatggtttttcgttgttgaatacgcgtactgacctggatgtcaccctcacaggacaaaatggggataaacggcagtttaccgtgccggctacaacttttttgcgtaatggcccggcaattacccctgggttttcttttggcgcaggcaagctagatcagcaaggcagtgatacttctcccgttgttggcaccgcagccactggatggctgctcaacgaacgtaccactgtgaatgctgggatcctgggttctaatctttataaagctatagcgtcaagtcttgacatgcagccatctgcgggaacgcaattgtcgacacagcttacaggtgcccaagatacgcatcacaatgaaacaggtatttctctggccacgtcactatcccaacaactaacggaaagagtgggagtaagccttaatctgacccaacagaccaaaggttatcgtgaactgagcgatgcagtgcaaaatgatccgctggatatgcaggacaatattcggaatcagtatggattgggagttaattggtctcaagaaacgctaggcaatctatctgcctcatggtcgcgctcaaccagcttcaatagtgaaaactcaaactatctaagtggtagctggagtcgtcagattatgaaggcatatcttagcgtaagcgtggaaagtaacaccggcaatgacaatggtgataatcgcctctacgccaacataatcatcccatttggaagtcgaagcgtcagctcatattacaacaattctaattcaggtgcgcgagctggtgttcgctatagcgatcgttcgtcccaagatcgtggttggagtatctcaagcgataaagacttccgtaataacagtaccacttatggcgcttcgatggatggcgttacgccatacagccaattgagcggcagcgtaagtcaggaaagcggcgtagacaccacatggtcaggccgtgcaagcgggagcattgttgcacataaccacggtgtaacagtttctccataccgcgttggggacacctttggtattgccaaagttggagatcaaggtggagtgcggattgaaacgccagccggcccaacatggactgatggtcgcggttacgcagtcataccctccattagtggatatcgcaaatctaccattgaagtggataccagaagccttgataaaaatatcgatatagctaactcctggcaagaaacagaagccgcccgtggttcggttagctatgtcaattttgatgtggtacgtacccgacgcgtacttgtatctctgaaagatgcttcaggaaaaccaattcagcatggttcgagtgtatttgataacaaaggcaatttcgtaaccatcgctggggataacggagcagtattcattcctgatattcaggaaaacatgcaatacgactga

SEQ ID NO: 146148 - DNA, 234 bp, Enterobacter cloacae
atgagcaattttttacttctcaaatgcaccaaagacactgaaggttggtggactgagggagaggtttacccggatcgtgtggttgcgggtggcttcgttctggttggcgatgatgacgaactggacggagaaggatggagtgccgcgccgaaggaataccgtgaagatggctcagtggtttatcaggtcggcggcgttgatggtgaagttttgtttgaggaatcagcccaatga

SEQ ID NO: 146149 - DNA, 651 bp, Enterobacter cloacae
atgaacgacgttggcaaacgaccgtaccgcgctgacggcggggatataagcactggccgcctcaaagagatagcagacaacccatacggtgacgaggagaagtgctggctggcgaagcgcgtgctggcatcgctcgaagcggaggctgtggcgtggacggatgagcaggaattgcgcgatgtagaaaagtttggatgtgcgtatctgtttactgtaaatcccattacaaccaacgcagatccgcgtcgcgttatcaagctttacaccgccccgccagcgccagtagtgcctgaagagataaacgtgctgcaagccgcgaatctggtgttgatgttgggtgttttggataacggtatcccgacagtcgctatgaaagtatggaacgcctgtcgcgcggccatgattcagtgtgtcgaaaacaccgagtcgcgctgcaccatgcagcccgcgtcagcattggattctttgccccaaaatgccgattcgcgctgcagcaactctccggtgtttccggatggttgggtaatggtgcctgtcgagccgacagaggaaatgcttgcagaactctgcctagttaaaggttggacggcccgagcgcttaatgcccggtaccaagcaatgctcgccgcagcccccaagccggaggcctga

SEQ ID NO: 146150 - DNA, 9018 bp, Enterobacter cloacae
atggatacccgtcacccacccgttcgtttctcgcagcgtctgatcagctggattgtctgcggcctgatggtctggcagccggtggcacccgccgtcgcggcggcgcttacgccggccgggcagaccacggtcgaccgggcggggaacggggtgccggtcgtcaacattgccaccccgaacggggcgggcatttcgcataaccagttcggcgagtataacgtcggcagcgaggggcttatcctcaacaacggcacggaccgtttaacccggacccagctgggcgggcttattcagaacaaccccaacctgcaggccgggcgggaagcgaaaggcatcatcaacgaagtcacgggcgccagccgctcgcagctgcagggctacacggaagtcgccggtaaggcggcaaacgtcatggtggccaacccctacgggatcacctgtaacgggtgcggatttatcaacaccccgaacgtcaccctgaccaccggcaagccgcagtttgacgccagcggtaacctgctggcgctggaggtgacaaaaggcgccatcacggttgaaggccaggggctggatgccagcaagagcgacgcgctgtcgattattgcgcgcgcaacggaggtgaacgccgcgatacatgcgaacgacctgacggtaacggcaggggcgaaccgcgtgggtgccgacggcagcgtcaggccaattgccggcgagggcgccgcgcccgtggtggcggtggataccggcgcgctcggcgggatgtatgcgaaccgtatccgcctggtctccagcgaggcgggcgtcggggtgaacctcggcaacctcaccgcgcgccagggcgacaccacgctgtccaccggcggcagcctgacgcagcgcggcggcagcgtcaccggcaggggcgcgctcagcgtggcggccgggaaggatatcaccctgacgaatacccgcagcggaagcgatacccgcgcgaccctcagcagcggcggcacgctgtcatccacgggcagtgcggtctcggcaggagagagcctggcgctgagcggcgggcagctggtgctggacggccagagccgggccgatgccgcggccgatatccgcctgacgggcagcaccgtcagtaaccaggggcaggtgaatgcggggcgcgacattgcgctctccggcgacagggtgtccagcagcggcctgctggcggcgaaaggccgtctggacgtgaacgccggagagctgacgaacggcggcacggcgcagggcagcgacgtcaccctgaaggggcagacggtgaccaacagcggcaccctgcagagcgccggcaacctgacgttaagcgccggaaccctggcgcagcggggcacgctgagcgcgaagggcaatgcggacgtcacggcgcagcagaccctgcgtaacgacggcagcctgctggctgacggcgcgatgaacgtgaccgcaggcgtgcttgagcagaacggcaccctgtccggcgcgacggcgctgacggcgcaggccggcaccctgaccagcggtcaggcgtcccgcacgaccagccagggcaatatacagattaccgcgacccgcagcgccagcctgaacgggcagacggacgcggcgggggcggtcaccgtcagcgccggcgacctgaccaccggcccggatgcgcacctgcagagcgggcaggggctcaccctgcaggcgcagaacgccgcgctgaacggcacccaggcggcgaaaggcgccctgtcggtgacggcgggcacgattgcgcacgccgggaaatccaccggtgacgcgctgagctttaacgcgaccggcgacctgaccagcggcggcgaactcaccgccggcggcattactctcagcggacagaacatcctccagtccggcgccgcaaaagcggaccgcatgaccctgacggcccccgggcgcatcaccagcagcggctcgctggttgccggtatcctctccctggacgctgcctcggtggagaacggcgggctgctgcaggggaccaccctgctcggcctgaagaccggttcactcgcgaacctcgcgggcgggtcggtttacagcgcgcaggatttaacgctgaacgttcctgtgctgaccaacggcgggcttatcaccaccgacggcacgctgcgcattaaaggcgacacgctgaccaaccagggtgaaatcaacggcgtcagcctgagcagcgactacctcagcctgaccagcagcggacgcctgctggcggacgaccggctcacgctgaacggcactactctggttaacgcgggcagtattgccgccaacgacctgcacatcaccgcggacagcctggagaaccagggcaccgtcgagggggacgcggccctgacgctcggcgtggcagacctcactaaccgcggcgcgctgcgcagcggcggaacgctgacgctcagcggcgacacccttaccagcagcggcgagctcagcgccaccgcgctgctgctgaacctgacccgtcaggtcagcaacgaggcgggcggccgggtgattgcccgggacggcctgacgctgaccgccgccagcctgaccaacagcgggctgatggccggtaccgacgcgcagttcaacagcgcgtcggtgaccaacggcggcacgctgcagggaacccgctcgctgacggcgacgggggcacagctcagcaacctgcaggcgggcatgctgctctccggtggcgcgctcggcctgcaccacaccacgttaaacaacgccgggctcatgcagggcaacaccctgaacctggccaccggcgagtggatgaacaccggtaacgcgctgggggaagcgggcgtgacggcggcggtgaccggcgcgctgaccaacagcggtaaggtgctcagccagcaggcgctggacgttcaggccggcaataccgataaccggggccagctgctggcgaaagtgctgaccctgcggggcgacctgcagaacagtggcctgcttcagggcagcagcacgctggcctggtccggcaacaccttcgcgaaccagactcaggggcaggtgacgggcggtgagaccctcaccctgagcggacacacgctcagcaacgcgggcagcctgcaggggcgcagcgccacgctggacgccgcaggcctgaataaccagggcagcgttcaggcgctggacgccctgacgcttgccgcaaccggcaggctggacaacacgggcgccctgctcagccagaacctcttcacgctgacggcggcgcagctgtttaacgacggccggctggcggggaaagcgctgacggtgaacgccgcgcagctgaccaacaccggcatgctgcagggcaacgacacgctggcgctgaccacccgcgcgctgagcaacggcgccaccgggcagctggtgagcggaagcggcctgaatctgtccctggacacgctcgataacgccggtctgctgctggtgaacggcgggctcaccctccggggcagcgacctgaccaaccggggcgatattcaggcgcaggacctggatttggggctgggcaacgccctgagcaataccgggaacatcgtggccaccggcgatgccgcgcttcacgcgacgacgctgaccagcagcggcacggtggcgggcagaacgctgaccgcaggcgcgacggagctgcgcaacagcggcctgatgcagggcagcagcgcggttaacgccgccgctgaccgctttatcaacgcgctgaacggcaaatggctctccggcggcggcttcacgctgacgggcgggcagctgacgaacgccggtacgctgcagggcgcgacgctggacatgaccggcaccaccctgaccagcagcggcacggtgaacgggctggcggggctcagcggcacgctcggcggggcgttaaccaataccgggctgctgcagagcggcggcgcaaccaccttcaccgcggacaccctggcgaacccggggcgcatcaccggcggcacgctctccctgaccgcccgcgagatgaacaacgacgggctgatgcagggaacgaacggcctggcgctcaccggcaccgcgctgaccacgggcgcggcctcgcgcaccctctccggcggcatgctgacgctggacgcaggccagctgaccacgcagggcacgctgcaggggaacggcgcggacatccgcgccaccggcgactggacgcacggcgggtccctgctcagccagggggcgctgacggccgcgaccggcggcacgctgacctcgtccggctcgctgatgagccaggggcgggcggatatcaccgcgcagacgctggataaccgcgggcagctcctcagcgaaggagacgtgacgctcggcggcagcacccttaaaaacagcggcaccgtgcaggggaacaccctcgcgctgcgccaggacagcattaacaaccagggcaccctgaccggcctgcagagcctgaccgttcaggggcagcagcggctgatggcgcgcatggcgatggccgcgccgcagcaggcgctgattaacggcgctggcggcaggcttctcactcagggcgcgctgaccattgcctccggggcggtgaccaacgccggcagctggcaggcgcagaacatcctgcttaacgcgcagtcgctcagcaacaccggcacggtgcagagcgccgacgggctgcagatgacgctggccgacacgctcaccggaaccacgggcagtaagattaccgcgctgggcagcgccacgctgcaggccgcgacgctggtgaaccaggggcagtgggcggcgaaaaacctgacgctgaccggcggcacgctcagcaacagcggcgccatcagcggggtgaatggcctgaccctcagccagaccggcgcggtcagccagcagtcgaccggcaccctgctctccggcggggcgctgaacgtcacggcggcctccgtcaccagcgacggcaaaatgcaggggagcacgctcggcatcaccaccggggcgctcaccaacggcggacgtctgcagggcgataacggcgcgacgctggccctcagcggcacgctgaccaacagcagcgggggcgaaatcgtcagccgcgatggcctgacgctgaccacgcccgcgctgtttaactacggcctgattcagggcggcggcgagacgcgcgtgaccgcctcctcgcaggcgcgtaacgacggcaggctgctctccggcgcgcgcctgacgctcggcacgccgcagttcaccggcaccggctggctgcaggccaccgacctgatactcaatgcggcaaacgccactaacggcggcacgtgggtggccgaccgggccacgctgaccggcaccacctttgccagccagggcaccacccaggcgggacagctgacggttaactacggccagctgaacaacagcggcacgctgctcggcaacgcgcagctgaacatcgacgcggaccaggtgacccagagcgcgggcggcaggctgctgagcggcggcaacctgtggctgcagagccgggggctggacctgaccggccagctggtctccctgggggacttaacgctgcagctgacgaacgcgtttaccagccggaccgccgtggcggcaggccggaccctgaccatcagcagcggcggcgacatcgataaccgcagcgtgctgcaggggcaggcggttaacctcagcgcgggcgggcagctcagcaacaacggacaaatcaccaccggcggcggcaccagcacgctctccggcagcagcgtggcgctgaacgccgcgggcacggtgcagggcgggggcgacatcaccgtcgccagccggagcaacattaccgtcgacggcttcaccggcacgcgcggctcgctgaccctgagcgcaccgggcgccatcgtcaacaccgcgctgctgtacgcggcgaataacctggcgctgtttgccgacagcatcaccaaccggcgcggcgacatcatggcggggaacaacctgtggatgcagcgggatgcggcggggaatgcgaacagccaggtggtgaacacgtcggggaatattgagacgcagaatggcgatattgggatcaggacggggcatttgctgaatgaacgagatgatatggagtcgagcggtaatacgcagactttgaccaatcccgcttacgtcggaacggcatcgtatcagatatctctggatgacatgccaaaactcaattacgacatagtttatacccgtactgatgtatgggttggcagttgcggtccaacgggcgcatgtactatggatgaacctttttacaggaaatcctacaagctttccgatacaggaaaaactcagcgttttgctatctcccgtacaacaatggacatttcagggaatagcgcggcaggtcgtattgcttcaggtcaaaacctgaacataaacgccgctacgctagataacaatgcaagcaacattctggctaatgataatgtcgcgttaagcggaaacgtgctcaataacaatagctatcagtcagggggttatacagattatctggtttactcatcctcttatgttggcgcgggtggggctctctacacgctgactggtcaggagcgggtgcaagatgaagggggcgctattattcgtgccgtcatccaggcgggcggcaacgtcaccgcaaacttcaccagcaacatcagcaacactaataccaccgctaacgcgggcggcgtcagcaacgttatctccaccccgtcgctgaacaccctcagcaaccagaccatcggcagcggtgtgcaaaaacaggggctgagcaataccggcaccgtggcggtgaactcgccgcagtggaacgatcggcttcagggtgcgctgcagcagcttaacggcggcggcgcgctggaaaacggcggcgcgtccggcacgtctctcagcaacattgccaccacgcagaaaggcaacgcgaacctcggtcagctgggcacgctggcgaacgccggggtcaccacagccgatctccgaaccgcgcagggcggcgccgtcgggcactatcagggccagcgcgtcgacaccagcgcttacccgctgccgtcgggcaacaacggctattttgtcttctccgacaacccgaaaagcccgtacctgatcggcatcaacccgaaactgaatggtctcggacagcttgatcccgccctgtttgccgatctgaacgcgatgctcgggatcaaaccgtcgtccacggcgccgcaggagacgcggctggcgtttaccgacgagaagcagttcctcggctcgtcctatatgcttggccgcctcaacctgaacccggactacgactaccgcttcctcggcgatgcggcgttcgatacccgctatgtctccaacgtggtgctcaaccagaccggtaaccgctacctgaacggcatcggctccgatctggatcagatgcgctatctgatggacaacgcagcggcggcgcagcagtcgctgggcctgcagtttggcgtctcgctgaccgccgatcagattgccgcgctcgaccacagcctgctgtggtgggagaaagctaccgtcaacggcgaaacggtgatggtgccgaaactctacctgtcgccgaaggacgtcaccgtcaacaacggcagcgtgatcgcgggcaacaacgtcaccctgaagggcggcagcatcaccaacggcggcagctcgctgctggcgaaaaacagcctgacgctcgacagccagaacagcatcagcaacctcagcaacggcctgatgaaagcgggcggcgacctgaacctgagcgccatcggcgatatcaataacatcagctccaccatcagcggcaaaacggtcgcgctggagagcctggacggcagcatcaacaacctgacgcaggttgagcagattgatatcaacgccggcgggaagtacggcaacatcggcctgaaagacaccctgctggggaacgctgcgtcgattaccgcgcaggatggcctgtcgcttgaggcggggaaaaacatcaccgtcaccggggcgaacctggcttccggcggagatatgctgctgaacgcgtggggcgatattgccgtcaacgcgaatcagatcaacgacgcattcagctccagccgggagaaaaccagccgttcgtccgtcacgtatcagggcagtaacgtcaccgcgggcggcaacctgctggtgaatgccgggcacaaccttgacgtgaccgccagcgacctgaaggcgggcggcagcgcggggctgagcgcgggcaacgatctgaacctgaacgcggagcaaaccagcgaaagcagccggaaagggaaaagcgagtcccacagcaccgggctcgaccgcaccacgatttccgcaggcgataacctggtcctgaaggccgggcaggatatcaacgcccgggccgccgcgctggcggcggagaaaagcgtcgggctgcaggcgggtcgcgacgtgaatctggctgcggaagagaccacgcagggcgacagctataggtcaggcaagaaaaccgttattaacgaatcggtacgtcagcagggaaccgagatcgccagcggggagaatactcaaatcctcgccggacgcgatgtcaccaccgaagccgcgcaggtgacggcgaagggcgatatcggcgtggcggcaggccgcgacgtcaatctcaataccgcaaccgaaagcgattatcactacaaagatcagaccaaaaccaaaaaaggtttcctcagcaagaaaaccacccacaccatcgaggaggacagcgcgacgcgtgaatccggctcattacttagcggcgacaacgtgcagcttaaggcgggcaacaacgtcgatatcgtggcggccacgaacagcgacacctcctggcgctttaaggaagagaaaaaatccggcctgatgggctcgggtgggattggcttcaccatcggcagcagcaaaagcacgcacgatctccgtgagaagggcaccacccagagccagagcttcagtacgtgggatcgacggggggtaacgtcgcgatttctgccggaaaccagactcacatcggcggggcggatcttatcgccgggaaggatttaa

SEQ ID NO: 146151 - DNA, 279 bp, Enterobacter cloacae
atgttatggtcaggcaatgagtttgtgagcggaaataatggaattgtgaaccggggaagaaagaaaagggggattggttgggccaatttgaagcaggggctccacagtatgatggtgggccccgcagaagagttaatcgaatttcaggaattagacagcattttgaatagaagcggtctccccgatgactatcaaaccatcttgttgcttaagacggttatctttaatctccagctcaataacatcggagatcacttttcgaagaacactactggttga

SEQ ID NO: 146152 - DNA, 270 bp, Enterobacter cloacae
atgggagttgaggatttcaagacaaaaagtggcttagcaaatgatgagaagcaagcactctggatgatgatttatcaggggatgactgaagcccaacgtgaagctgttatggagatatttatcactggtggattaaagatgcttatgcctgcggtgcttgagttatctgattcaaatccggtccgacagaaagagattttcggacaatgtgattccgttgaaaaggatagcccagcgtcgaacgtaagcacgcaaaacaaggctggctga

SEQ ID NO: 146153 - DNA, 237 bp, Enterobacter cloacae
atgatgaccaaaagccaagactggcacccggaagacatcaaagcagcgattagaaaacgcggaatgacgaccagtcagttatcccgttgtcatgggttagcggaatcaacattacgtaacgtattccgtcaccactggcccaaaggggagaaaattatcgctgactttctcaacatggagccatcagagatatggccttcgcgttatcagaatctgactgttaaagaggttgcatga

SEQ ID NO: 146154 - DNA, 1983 bp, Enterobacter cloacae
atggagttttgggtatcagtgaaagaatgtgttggcgtctgtggtttcccacaggctgaatctaatgcgcggaaaaaacttgaggatctggtttgcggtcgcagtgagctacgccgcaaacgtgccggaaccaaagcatttgaataccacatatcagtattgccaccagaagttcgggctgaattgctggctggtcgtgggctgattgaaacctcatctggcctcattactctgccgagagagccggaacgtgtggccgctgatgaccttgatcgtcagcgtctctggtctgcatgggagaaagcgaccggcgaacagagactgcatgcagagcgtcgcacgaaagctgctgcgctggtggctgagttgatggcgtcaggtgttggcaatcgaaaagcgattactctggccgcgaagcaattacagatcagtgaaggaacgctgcgcaatctgtactacaaagtgaaggacttcagccctgacctctggggaccggtactgctcgatcgccgcgtccgcgaaaaacgcgtgacaggacgttcggctgaaatctctgatgatgcctggcaattcttcctgggcgattatctgcgcaacgaagccccgtttttctccaaatgctatgaacggctcgaaatcgccgcagaaacacatggctggaccataccggctgaacgtaccctgcgtcgtaagctggaacgtgaagttgatccgcgcattgtcgttgccacccgtgaaggtgaaaacgccctggcgcagatgcacccatctcaacagcgcaccgtcgcacaattgcatgcgatggaatggattaacggtgacggttatcaacacaacgtgtttgtccgctggtttaacggtgaaatcatccgtcccaaaacatggttctggcaggacgtccacagccgcaaaattgtcggctggcgggctgatgtatcagaaaacagcgacagtatccgcctgtcactcatggatacactgaaaacctacgggaaaccccaacacatcacgatagacaacacccgtgcagcggcgaacaaatggttgtctggtggcgttcctaaccgctaccggttcaaagtccgtgaggatgatccgatggggattatccctctgctgggtatcaagctgcactggaccggtgttatcggtggtaaaggctggggccaggctaaacccgtagaacgtgcctttggtgtgggtggtctgggtgaatacattgataaacacccggcactggctggcgcatttgccggtgaaaatgtcagttccaaaccagaaaactacggcagccgcgccgttgatgttgagacctttatggaaattatcagtgaaggtgtcgccatgtttaacaggaaaacccagcgtaaaacggaaatgtgccggggtgaactgtccttcgatcaggcttttgaacaaagctacagccaggctgtgatcacccgtttaactgaagaacaaatccgccagttcatgctgccggcagagtcggttcgcgtgaaaccgaccggagaattcacgatggaaagcggcggctccctgtttggccgcaagaacacctactggagtgagcaacttgtcagccatcgctcccgcaaaattacagtccgttttgatccgcgcaaccttcacagtgaagtggcctgttacgaccttgatggccgattcctctgtatggcggagtgtcgcgccgcagtggcgtttggtgataccgaggctggtcgtgaacacaaccgcgcccgtcgtgaaatgatgcgcagcacgaagaaagcagcgaaggcactaaaccgtatgacagcgattgaagttaacgacctgctaccgaagacagaacatgcagagttgccggaacgtcatgttgttgagcgcgtattcaatatgggtaataccgtcagacgtgtggaggaaattcaggacacgcaaaccgagaatgacgtgatttttcagacgttcgttaataaagcgaaacagtcgcagaaataa

SEQ ID NO: 146155 - DNA, 939 bp, Enterobacter cloacae
atgacgcaaattaaccatgatgttgtgcgtagtgccattcgtgaattaattgacagcaaggcgatttcaggtgcagctctggcacgtgaaaccggcacctcaacggctacggtttctcagtttctgaacgggaaatataagggcgataacgatacggttgccgccagtctgaatacctggctggaaagccacaccgccgcgaaaacctcgctgccagtggctccggatttcgttgaaactccgacctcacaaaaaattctcgccaccctgacgtgggcacaactggccggaacgattgtgctggtttacggcaaccccggcgtcggtaaaacaaaagccatcagacagtatgccgcgactggcaacaatgtctggcatatcaccgccagtaagtcccgcagtaacgaactggaaacgctttatgagctggccctgaaaatgggtattgctgacgcgccatatcgccgcggtgctttgtcccgtctgttacgccagcgcctgccggatacgcgtggtctgattgttgtggatgaagctgactggctgagtctggatgccgttgaagaattgcgtattctccaggaggaatgcggtgttggtctggctctggtcggaaaccataaagtctacgaccgtctgactggtggacaacgcagtgtggacttcgcccgtctgttttcccgcgtctctaaaaagtacgtcatcaataccgtatcagccggtgatgtggacagtttttgtgatgcctggcatgtctgcggacaggaggaacggaaactgttgaagatgatcgcccgtcgtcctggcgctctccgttctctgtctcacatcctcccgctggcggggatttatgcacagggcaagggtgagagcatcggtacgtcacacatccagtctgcgatgctggaactgggtcacagcaatctgaacgaggaataa

SEQ ID NO: 146156 - DNA, 240 bp, Enterobacter cloacae
atgattactgaacgtattgcagaacacatcagcatggcagaggcggcgcagaactggcttcgctcccgtggtagccgtgtcactgacgttcgggttttcatgcgtcgcccgttactggagattgtctgcccaccaacagagctggtgcgtagtgcatcccgtatatcagaaacacacaacggcggcacccgctccgtctgggtagccagtctggaaggttgccggattatctggaggtaa

SEQ ID NO: 146157 - DNA, 291 bp, Enterobacter cloacae
atgggctggggtacggggagagcatggtcgcgtgaagaactccgcattctggaacagaacgcgggaaaggtaagtgtaagcggtatagcgttgcaactggggcgctcaaaacagtcagtgcagaattgcgccattcggcagggtctttcgctgcgcatcagagcgggaaatgaagatgacgcatatttgtgtcgtgagctttacaaggaggggctgaccatatcggttatcgccgaaaaaatggaaatgtcctgtagtcaggtatttaacattatttataaaggtaattaa

SEQ ID NO: 146158 - DNA, 252 bp, Enterobacter cloacae
atggctaaacaggtaatcaccattattctcgaggatgatgcggtaattaaaaacggggaaatggttaaaaccggtgagaactcaggaaagctcgctatcagttttcaccttaacaacgccaatgatgatggttcattttcgtatctggttgcggaaggactttcagctatttttccaatggctatccagcaggtcactgaatttgcaaaacagaaagttgatctggataaccgtaaaattattaaacactga

SEQ ID NO: 146159 - DNA, 528 bp, Enterobacter cloacae
atgaaagcacccaaaaagccccgcgcaaaatcagccgctgctgtcgccgttcctcaatgccgcgatgacgtaatcagcgacatccgtaagattggcgatattacccgtgtcattctgcgtcgtgaaacggaactgaatgacaaaatagcggccctgacaaatgatgttgcgcccggcattgaagcacttaaaaaagagcttgggcgtttgcaggctggcgttcagacatggtgtgaagccaaccgtgcagaactgaccaaagacggcaagaccaagactgctaacctgacaacgggtgaggtccgctggcgtaaacgaccacccagcgtcactattcgtaaagttgaagatgttattgcgttactcaaaaaattcagtctgggtaaatttcttcgcaataaagaggaaataaacaaagaggcaattcttgcatcaccgaatgaagttaagggaattgcaggaatatccattaaatcagatgttgaggattttgaaataatcccatttgaacaaacagtcactgactaa

SEQ ID NO: 146160 - DNA, 303 bp, Enterobacter cloacae
atgaacaattatcaatataaagatgtggacgaggctctgagagcagcgggaatgctggaaaggattagaaccattgtctcaacagcaatagaaaacggctggtcagtcagtgacgtgatgaaaactattcagcgtgaaattgcgctgattacagacgaatttgatgcgaaaaaaaacaaagctcacgacgacatggtgaggcgtgagcttggcctggattcctctgcggttatacacccggaggattatctgcggacgttattcagaatcgtggcgttgggtggtcggaggaaagggtcttga

SEQ ID NO: 146161 - DNA, 270 bp, Enterobacter cloacae
atgtccggtgcaccgaccgacaagaactttgatatcgcggcctttattctcacgggtaatctgatgattaagctcgtcgaaaaaggcgttatcgacatgcgggatgcaaatgacattattgcccgtacacgtactgcttattctctgcgtgaatgctacaaagatgaacgaaccggcagtgatgcgggggagttcatcgagacactattcaataagttatgggattcaagaccctttcctccgaccacccaacgccacgattctgaataa

SEQ ID NO: 146162 - DNA, 528 bp, Enterobacter cloacae
atgagtcgcacatccctgattaagttaatccatgttgcccgtcgcaagctacaactggacgatgacacctaccgttcagtgcttcatcgcgtaacgggaaagcaaagttgtcgtgatctgaaggtcggccaactggaggatgtactgaaggtactggaggataaggggttcagacgtacccgcccccgttctccggctcgccgtcatcgtgaaacagatatcaccgcaaaggtccgcagtatctggcggcagatgcatcttgatggatttattcgtgatggcagcgataccgcactggatacgttcgtcgcgaagatgactgtcagaaccaacaaaggtaaaggtatcgccagcctggcatggtgccgtggtgataatcttctgatggtgctggaaagcctcaagcaatggcatctgagagaaatgacagaggcgctgagtccgcgagacctggcatttcaggataatcggggttatgacgccatcaacagtctgtattccagtaaagtaagaaaggtgcgcacatga

SEQ ID NO: 146163 - DNA, 411 bp, Enterobacter cloacae
atgagcgaaaagcagaatgacctgtttggtgatatccaggatgacagcattctggagcacctggacgatgacagttcggcggaaactgtgcgttttcctgcactgctgacagaactgaatacgctgctgcgtggcgaactaacaaagcatggcgttgaccctcgaatcgctctggaactggtttatgcgattagctgtcagattggtggcatgcagatttatttcccacgcggccagactcttgagtcactgattcgtgatatgaaaatctggcgtgatttcaatggcagaaacatcacagagttggttgagcgttaccgtgttacctataaaacggtgtataaagccatcagacgcatgcgtaaactagagcaccgcaagcatcaactggatttatttggcagggagtaa

SEQ ID NO: 146164 - DNA, 510 bp, Enterobacter cloacae
atgaaatttactgatgcattaatactggccgttattttagttggggggtatcactattttttcgataaagatgaactaacaggtaatgaaaagcttatttctcaatttgataaaatgggtgtcctgaaaaaaacagaatggaaaaaaggagccatagttgatggtgttcaggtttatacagcaacaactgaagattccactgtaagtacagtttgggcattaggtacagatgcagttacagcaatggtgttttcaagtggtaaagatattgacggtgaatcactggctgctgttaatcaatgtgtaaaactcatagagggagtgacgggaaagaaagactcagaaaactcaatcaatcaagttgctgagatttttacaaaagcgacggcaaatagaagagaagacgattcttattcagcatcaggttttacatctggaatggaattacgagccactattcgaaaagttatggagtcagttacttactcctgcgatttacgaaaagcatag

SEQ ID NO: 146165 - DNA, 591 bp, Enterobacter cloacae
atgaacaacacccccgattctcccgcatttcgcaatgctctcgctttcgtgctcagcgcagaacgcggatatgtcaatgaccccactgaccgtggcggtgaaaccaacttcggtatatcagataaacgcgacggtgttgccgatggcatgaccgacgttaatggcgatggcaagcctgatactcgtattcgtgatttaacggttgaacaggccggacagatttacttccgtgactactggtatcccgcgtattgccagttttggccggatgatatcgccctgtttgtctttgactctgccgtccagcatggcgtcaaaaaggctgtccagttgcttcaggaagctgcgggtttcaccggcaaaagtgttgacggtatcgccggtaaaaacacccgcgcagccgttgaacgtgctgaccctgactggctgctgaaccgtttatttctgcgtcgttcccgctattacgccgacatcatcaaatcaaacccttcacagggcaagttcctcaacggctggtttaaccgcctggacaacctcgctgacgcctgtcgtgagatttccggtgtgcgttattcggtagcccggagctga

SEQ ID NO: 146166 - DNA, 219 bp, Enterobacter cloacae
atgggcaagggatgggacgcttcgctgaaactgggacgacgtgaccgactgcggcaggaagttcttcatcgtatggccggtggtcccgtccctgttccgacaagttatgaaggtcatgacgggacgcacggcagctactacatgcgcggctggtcatccgtcgatatcagagacatcgtctggcaatgccagcgatacaaggaaaaacacaatgtttaa

SEQ ID NO: 146167 - DNA, 408 bp, Enterobacter cloacae
atgtttaaatcgtttagctgtgactggttaaagctggcgctggtacaggttttgcgctccggatggagcattgtcattctcgtcggcctgtcgctgttcatctgtagtttctcaggccgccaggcatttatggtctggtggctggcgttgtccggtgtggtcctggtcgggttcagcatctttcttggcaatctgccttacaggcttcttaaacctgaaatgcatatcagccggcatgcatgtttctggtcgtgggttgtctggggagttgggttcgttcttatctgcctgagtccactttatgccagcccgctgtacctgcttgtccttgaaccactcggcgcagccacaggatttctgttctgtcagtgggttgcacgtaaggggctgcttgtatggatccagtaa

SEQ ID NO: 146168 - DNA, 609 bp, Enterobacter cloacae
atggatccagtaaccctcaccaccattgcctccgttctgatgaaggccggaccgtcattactgcgtaccgtgggaggctggttcggtggcgacaccgccagaacggcagattctgtggcggggatcgttgagaacgtcaacagcgtcatcaacccgcaggaccagcagcgggtgcttgagcagaaactggcggcgctgccgccagaacagttcgtccagctccagtccctgaaagtccagattgagcaattccagcttgagcgggacaaagccgtactggctgaccgtcaggctgcccaccatgaacagcaggaaaccatccgtaacggggacaacgctacggatgaatatgtccgtcagaccagaccgctgatggcccggctatcgctctacagctgcattgcgtatgtgatgctgatgtctgtgggtcagcaggctggcgcggtatccggtgcttttggtcatgccttctccatgccatcaccggactgggatatcgcactcatgctggcgacaccggcgcttgggtatctcggttttcgcacccttgacgggttcgcccggtacagcaaatcaagcaaacacaaaacgatggcggcgggtagatga

SEQ ID NO: 146169 - DNA, 207 bp, Enterobacter cloacae
atgacggatgaactggacaaggccagcggccttgagatggcagaccgtgaacgggcattaaatgctcagttaaacagggttaaagaatctcctgacacgccaggccactgcaacgactgtggtgacgaaattgacccgaaacgactggcggccatgccggatgccgtgacctgtattgactgccagacactcagggagacggcataa

SEQ ID NO: 146170 - DNA, 306 bp, Enterobacter cloacae
atggaatgggaaaccgtaagaagtaactgggctgtcatctgggccggactgatgtccggtatcaatattatccacctgctgctggtgaaaacctatgcccgccgggaagagatggagaaagttaacagccggatgagtgcacttgaaaaggccatcgacgggatgccgtcacggcaggaactccaccagttgcaactggatatgagcaacctgcgcggcgaaatacgggagttctccggaatgctccggcaggccacacgtatcagcgatctgttgctggaaaacgaactgaaggaaaaaaattaa

SEQ ID NO: 146171 - DNA, 288 bp, Enterobacter cloacae
atgcaagaaatcctcaacagcgaccagcgtctggtcattctgcgctcactggtggagtgcggagacagtgcaaacgaatccattctacagacctgcctccagacctacggccaccgggtttcccgtgacaccgtccgcaccctccttgcgtggctacgtgaacagggactcgtcaccctgtcagatgtctccgggtgttacgtcgccggcatcacaggacgcggtgaagatgtggcctttgggctggcgacggtccccggcgtcaaaaaaccacgtgcgcgggagtga

SEQ ID NO: 146172 - DNA, 375 bp, Enterobacter cloacae
atggaacgggccagaatacttcaaatgttaatgacctgccgccagcaggcggaacagttgcgccgcctgtcaggtctggcggagcgtcgggagtccggtgaaatcggcatgtcagcgaatgcgctttttcaggccgctgtgatcattgattcccttatcagtgcaaatgaaaaagcactggaaggcattgcccggctggaccgctctgaaacccagcttatcggagagcgcgatcaggttatcgccgtactggacagcatgtatgaggctgtaaccggtgcccccccggagtggagtagcgcatttggttttacggatgcaattaacgatgtaacagagcgtatttttgaactggagaacatcagccatgactaa

SEQ ID NO: 146173 - DNA, 279 bp, Enterobacter cloacae
atgactaaagcccttaagccactgagcagtagccagcgcgacatcatccggaaaatggccgccattctcgtctgtgcggaaattgaagtcagagccattgcaccgcagtttgaaaaatcgacgggtaaaaaatacaactccgaatccgctgattcgtatctgaacacattcctcaacagcaatccggaatacaaacgcgtctggaagttgctgctgaaagacaaatccagcgttgaacgtgacttccttgaccgtatgaggagggagaatggcaagtga

SEQ ID NO: 146174 - DNA, 579 bp, Enterobacter cloacae
atggcaagtgaacgccagacgcgcggacgaccttcaaagattgatttgctcccggatgcggtccgggagcaacttcatcagatgctgcgcgacaaacgacatacccaggaagaaatccgcgaagcgattaacgagttgatcaacgaatataaccttccggaggacatgcaaatcagccgtaccggtctgaaccgctacgcaagccgcatggaaacgatggggtcaaagattcgcgcttcacgcgagatggctgaaatatgggcatcaaaacttggctcagcgccgacgtctgacgtcggaaaattactgctggagtttgtcaaaacactggcctttgaaacctcaatggaaatggctgacagcgataaaactgtcgaaccaaaagcgctgggccagcttgcgcttgtcgcccagcgactggaagctgctgcgatggcaagccacaaacgcgagaaagagatccagcaggagtttgcgaaaaaagccgctgcggccgcagagaccataacccgttcagctggtttgtcggctgagactgctgccgatatcaaacgccagattctggggattgcagaatga

SEQ ID NO: 146175 - DNA, 1584 bp, Enterobacter cloacae
atgacgacgatgacgccggacagaacactcaccagtcagtccgctgcggctatcctgtcgggcgagttcgacaaaagccagctactgcttccctaccagaagcggtggattgctgacgcctctcaactgaagattgccgagaagtcgcgtcgtaccggtctgacctgggcggaagcggctgacgcggccctcaacggctcaatgtcggtggaggctggcgggtgtgacacgttctacgtcggcacaacgaaagacatggcccgtgagtttattgatgcctgtgccatgtgggcgaaagcctatgaccgcgccgcgtctggcattggtgaagaagtgctgaaggatgaagacaaagacatcctggtctatgtcatccagttcgccagtggctacaaaattaaggcgctgtcgtctaacccgtcgaacctgcgtggtatgcagggtaacgtcatcattgacgaggccgcattccaggctgaccttgcagcggttctcaaggcggcgctggcgctgacaatgtgggggaataatgttcgccttatttccactcacaacggtattgataacctgtttaacaccatcatcaccgacagccgggccgggaaaaaacgctactctgtccatcacgtcgatattgaaacggccattgcagaggggctgtatcagcgcatctgtcaggttacaaaaaaagtctggtctgtggaggccgaagcggaatggctggctaacctgctgagcgacacggccacagaggaagatgcccgcgaggaatactactgcgagccgaagaacggcggtggcgtctatatcgcacgttccctgcgcgaacgtgcggccagaggtccgaccgttgtcctgcgcttcaccggtacggctgattttaacgcgatgccggacggactgcgccgtgtggacatgcaggaatggctggagacggtcgtactacccgaactggagaagctgccgcagaacctgcgccactgtctgggggaggactttgcgcgtaatggtgacctgaccgtgtttgcaccggtgacagtcaacgatgacacgacgcgcaacgtcccgttcctggtggaactcagcaatgtgccatttaaacagcaggagcaggcgctgttttatatctgtgacaggcttccccgccgtgacggcatcaagctcgatgcgcggggtaacggtcagtatctggcagaacaggcggcggaaaaatacggtgatgaagttgagcaggtgcaactttccgtcaaatactaccgggagaacatgccacggttccgtgcggcattcgaagacaatgagctggtactgccaaagcatgaagatgtgatcacagacctcggcgcaattcagctttatcgcggcgtaccgggcattgatgatgcacgaactaccggcaccgatggccgcaagcgtcacggtgactctgctatcgctatttttctcggtttcctcgccagtcgcgaggactgccggcgttatgaagtccacaagttaaagaaaccttcccgccccgatgagcgtaatgaacaccgtcaggtccgcatcacacggggtcttaaaaatcagcggggattactctga

SEQ ID NO: 146176 - DNA, 1581 bp, Enterobacter cloacae
atgtttaaacaactaaccggacaactaaccggagccgttcgccggctgctcagtcctgccacgggagaagttgtcaccgtgaacaaggatgagctgaagcagacgcaatccgcagcggcggtaatgagtgtacgttccccctcggcaggtatcagcgttgccagtacgctgagtcccggcaggcttgcggggatcttacgtaatgcagccgatggtcatgcccgtgatttcttcattatggcggaggaactggaggaacgtgacctccactacgccagcgttttacgtacacgcaagctgacggtttccgggattgaaccttcagtggaggccgggagcgattctccgcgggatgtggaaatcgcagatgatatccgtaacctcatggcacaaccgcaggttcccgaactgctgttcgatttgctggacgggcttggtaaaggcgttggtgtctgcgaaatcctctggaataccagcgccacactctggaaaccccgcgattatgaatgggtagatccacgctttctgaaacctgaccgggaaacgctgcgtgatttcagactactgacggacaggaaccccatcgatggtgagccattgtcaccggggaaatttatcgtccataagccccgcctgaaatccggcctgcccttgcgtaacggtctggcgcgtctggtggccgtcatgtatatgctcaagtcctatacagtccgggactggtgggcgtttgctgaaaaatttggcatcccgattgtggtgggcaagtacggcaataacgccagcccggagcaaatccagacattgctggatgcgattgcatcactggcatcagatgccggctgcgcaatccccgattcgatgaaactggagatgcaggaagcggcgagccgtaacagcggtggcactctctttaaagagatggccgaatggtgtgacgcgcagattagtaaggccgtactggggcagaccatgaccacggatgacggcagttcacgtgctcaggcggaagtccacaatggtgtgcgtatggacatcgccaaatgggatgcctggcagttatccaacacgctgtctgaattccttgtccgtccctatgtggatatgaattacggaccacaggagcattacccccgcgtcgttctgcgcatcagcaaaccggaagatctcaaggttctggtggatgcactgtcgccactgattgaccgggggatggaagttcagatgtcagagatccgtgacaaattcgggctttctgaaccggagaaaggcgcaaaaattctgacaccaacggcgcaaatggctaacccactaccggccatgaaccgtgagcagaccgcacttaaccgcagccaacctgacgttcttgatatgatggtggatgaggcgatgaatgactggcagcgtaccggcgatgcgttcaccagtccggtgcttgagctggcaaagaaatctgacagctttgaatcttttcttgctggcctgccggcgcttcagaaagaacttgatgctgatgagtttgcgacgcagctggcgatgctctgttttaaagcccggtcgctgggagatgtaaacgatggctaa

SEQ ID NO: 146177 - DNA, 795 bp, Enterobacter cloacae
atggctaagccggtcagcgataaatacagcattattccccaggaagcactggcctggctgaaggcgaaaaagctgaagccgggatttgattaccgcgatgtctggatggaagaacacagcatcggctttactgtggcaaagatgacgcagcttgatttgctggcggacgttcgccagctcgtggaggacgcactggagagcggccagacctttgagcaatttcgcgaggttcttaaacctatgctggtcaaacgtggatggtggggacagcaactgatggatgaccccctgaccggtgaaacccgtactgtccagctcggcagtgaccgcaggatgcgcgttatctatgacactaatatgcgaaccgcccgcgcggcgggacaatggcagcgtattgaacggacccaacgggcaatgccttatcttgtctacaccgtcggcccatcacgtgagcaccgtgcggagcatctgcgctggaaggatgtctgcctgccggtggatcatccgttctggcgaacacacatggggccgaacggctggggctgcaaatgcggtacacggcaaatcagccggtatgagtatgagcagatgaaggtcaacggcactatcaacacggaagcccctgaagtccgtacggtcaggtgggttaacaaacgcaccggcgaagaagagaccattccggaggggattgatcccggctgggcgtacaaccccggaatctcccgcagtcacgagctggatgaacagctacgcagaaaacaggacgcgtttgacagtcattcgccacaaagataa

SEQ ID NO: 146178 - DNA, 957 bp, Enterobacter cloacae
atgaccccgaacaatacggaactgctggcgctctgctttcagcttcctgaccttaccgatgatgcattgccggaatggctgccgatgataccggcgggaacctttacagggcgtgatggccgttcatgggtgaacaacaatcctgaagccatcattcgtgcctcgatggcttatccaaagctcccgtttgatatcgagcactccaccgaactgaaaggcccgaaaggcgatgaagccccggcttatggctggattgacggctatcgcgtcagtgatggcgtggtggaggcgcacgttgaatggactgatgacggcgtggcgcagctgcgcggcaagaagtacctctattacagtccggcctttcggttcactgcggacggtcaggtcacccgcctgtccagcgccgcgctgaccaacaaacccaaccttgatttacccgcactcaactctgaggaaaacacgatgaccgtacctgtccagattgtgacagtacttggcctcgcggccactgccacagcagacgacgcagtaaaagccattcagcagattaagaccgccgagcaggtggcgcttaaccgcgctgagaatcctgacctgacgaaattcattccggtagagacccaccagttagcacttaaccgtgcggaaagtgctgaaagcaaactcaatgagattgccatcaaagaatcagaagctctggtggacagtgccatcgagtcggggaaagtcgcaccggccaaccgcgaaatgtatctcgccacctgccgctctgaagaaggccgccagcgattcgctgaattcgtgaaagcggcaccggtcattgtcagcaagaccacgacgaccaaaaaagaaagcaccgaaggtcacacctcgctttctgacgaagacctcgcgatgtgccgccatatgggcatcagcgaagaagaattcctttccgttcgtaagcaggagaaataa

SEQ ID NO: 146179 - DNA, 894 bp, Enterobacter cloacae
atgcaggtatccgcagaagtattgcatgccctgaccaccgcactgagcgccgcctttaccaaaggtgttggtcgggtcaatccgcagtatcgatccatcgccacggtcatccccagttctggcgcgtctaacacttatggctgggttgaagacttcccgaccatcaaagaatggatcggggcgcgtcaactgaaagaactggctcaggccgggtatgtcattaccaacaagacctgggaaaactcggtcaaggttaagcgcgaaaaaatcgaggacgatcagattggtcagtattccgtgattgctgagcagcttggccgcgataccacgattttcccggacaagctgtcgtttgagttgctgtgcaaaggcttcgatacgctgtgctgggacggtcagtatttcttcgataccgatcaccctgttggtgcatccaccaaatcgaacgttgtgggcgacccggcgaccgatacaggtgagccgtggttcctgattgatgcgacgcatgcgctgctgcccatcatttatcaggagcgccgtccgtttaacttcatcgctcttgatgatctcaccagcgagcacgtgttccttcagaacgaattcgcctacgggaccgatggccgcagcaacgttggttttggtttctggcagacctgtgtgggatcaaaagccgcactgaacaaagccaactatgaagccgccgtctccgcaatgatgggtatcacggactctaacggcgaacctctgggcatgaatccgacattgctggtcgtcggtaagaataaccgtggtgcggccaaggcgctgattgaagcagttacggctgatggtggcggttcaaacatctattacaaggatgttgatctgctggtctcaccttacgtcaaagcatga

SEQ ID NO: 146180 - DNA, 594 bp, Enterobacter cloacae
gtgagtggaaaagttaataagtcagccgctggtaagaccggaaccacttcggaaaagaaagacgacaaagcaacgaaggatacgcctgtcccggcgcaaccggcaccggtggaaccagttattactgatgacagtcaggcatcacaaccggcggttgcagcttcagatgtcgcatctgacccggaacctgtacccggtgacagtggaataacggttatcccggccacagtcagtattgtcaccatgccgggtgagaacacgggtgatgacctgagaaaacatctctggcgggagacgctggcccatgaccattcagaggctgttcgcattgctgaaaatgtcgttgtgctggaggtccgcgccattccggaaaatggttttcaccgggcaggccgattctggccgcacgatacggtgcatgtgtttgtcagcgataaccctgatgaacagattctggaagatgccggaggtaagccgctacagggttgcgtgatcagcaccgacacagccctgcgtctgaaggctgaaaagatgctgattgtaaccgaactggcgaccattgccgggactgaagccgacgtggagagcaagtaa

SEQ ID NO: 146181 - DNA, 441 bp, Enterobacter cloacae
atgggcatctacgtaacgcgcgaggacctgctggcaaccgatggtgaccgcgtctggaacatggcaatcaacaaagagacgcagcagcttgacgaagaaaagatccagcgtgcgattgatgacactgatgcagaaattaattcctttctggcaaagcgttatcagttgccgctgaaccttccgaccctgccgagtccgttgcgccgggcggcggtttccatcgcgttctactggctgtctgaacgggaccatcagatcaccgatgaaatccagaagcgttacgacgaagccctccgcaccctgcgtgaaatcgccaacggcacccgtgacctcggtgtgccgtctgacaccccggtccctgagaccgacacaggaaagctgatcatcgtcagtgaaaaccgtcgtctgttcacccgtaacaacctgaaaggggtgctgtga

SEQ ID NO: 146182 - DNA, 543 bp, Enterobacter cloacae
atgggaattactgtcgaggtcagaggagatcaaaagcttcaggacattcgccgtgcgattgagcgactggctgaccagtcgctgcaacaggagctactggagtgcattggcgctgtggtggagtcacagacccgccgacgtatctccagcgagaaatccagtcctgccggtgagaagtggcaggactggtctgacagctacgcgaaaacccgacacagcaaccagagtctgttacagggcaacggcgacctgctcgacagtatccagtatgtggtcagcggctctgtcgttcgtgtgggtacgccgcttgattatggccggacgcataacgagggtttttccggctcggtgtctgtgtcagcccataagcgcctcatctcacaggcatttggtcgggcgcttaaacacggggtatggcaaagcgtgggggcgcataaacgtatgttaaacatcccgcagcgtgaattcctcggcctgtcctccgggaacagtcaggaactgctgcacgtcatcggggatttctggaatgaggttctgcaatga

SEQ ID NO: 146183 - DNA, 624 bp, Enterobacter cloacae
atgagtgagcgtccggcatttgtcaccctgggcagcacggtcagtgccgccgagaatattgttaactggctgaaagctgaacttgagggtgaaaaacaaccagacagggttgaaaaggtggaacgtcacatcggtcagtttaacaccccggaacaggtcaaaagctatatgtccgggcgtggcggcagtatccgtatagcagccttgcgggtcagaaacatccagaaccgtcgcggtatgaccggccttgtgacctgggcggcctacatcatgatggctgatttctggggatacccgcgcgatgcccgctgtgaggttatcgccggacgccttgcccgtcgtatcagttgtcgtgaagcggctgcgggcatgaaggctgagcgtatggctgagaacatcgccgctgaaaacctctggtcgggtggtctggacaatctcgggatcaccatgtgggccgttacatgggaacaggaattccgtcttgatgatgagatagacctgtccacgctgccggaattcctgcgactgggggcaaccattgtggtgaacggacagccggtaagcgatgagccgcaaatcataaacgtaagagaaggacagactgatgacaaagaaaattattaa

SEQ ID NO: 146184 - DNA, 189 bp, Enterobacter cloacae
atgacaaagaaaattattaagccatcacgggcgggcctgctcgttcgtaaggctgatggcagtcaccttgccgctgatggcgagacactgccggtcaatgcgtactggctgcgccgtgaaaaagaaggcgatgtgaatatcactgagccaccgaagtcccgcacatctaaaaccgataaggaggcatga

SEQ ID NO: 146185 - DNA, 1479 bp, Enterobacter cloacae
atgtccatcggtaatattcctgatgatattcgtgtcccgctggtctggatcgatatcgataactctatggcgatgagtgccgcgccggcacagtcccgaaaaattctggttgtgggtcagcagctcgccagcgcgactgctttaccgttgacgctgaatcgtattactggcgacagcatggccgatgaactctatggccgtggctccatgctgggtgaaatggcaaagatggtccgtaaggccaacagctacaccgagatgtatgcgatgggactggaggatattgcccagggcgccgcagcgagtgccacagtcacgatgctcggcaccgccactcaggccggtacgctggcactgatgatcaatggcgtgtctgtccaggtcggggtcagcatcggtgatgaagcggaaaccattgccggcaatatcatcactgccattaccgcaaagcctgccactcaggtcaccgccacagcaaaagctgaggctgctgcaacggtagtgctgaccgtgaagtggaaaggtgtcacgggaaatgacagcgatgtgcgcctgaactattacgccggagaaaaaacacctgccggcatcagtgcaacactgaccgcattttcgggtggcacggggacgccggatattcaggcggttgtcgctgcgctgggagatgactggtacacggatatcatcttcccatacctcgatacccagagcctgaacactatccgtgacgaactgctggagcgctggggaccgctcaaaatgatggaggctttgctgtggtctgcttatcgcggaacacatgcccagagcggtacattcggacatacccgcaatgactggctgatttcctgtattggcaccaacatcgcacctgaaccgtcatggttatgggcagccagctacggcgcaacggcggcataccagcttgccatcgatccggcccgtcctctccagactctgatcctgagcggcattaagccgcccgctcgcggtatccgctgggatatgccggagcgtaacctgctgctgcatgacggtatcgccacgcactttgttgatgccggagataacgtctgtattgagcgcgaaatcaccatgtaccgcgttaatcgctttggcgatacggacatttcataccttgatgtgcagtcgccggcaacgcttggccgtatccgctatgtcatcaaaaaccgtttcaccagtcgctacccacgccacaagctggcggatgatgacgtgcttgatttgctcgatgccggtcagccggttatgacgcccaaaatctgtcgggctgagttactggatattgcgctgacagagcttatcccggcaggtctggtggaggatttcgaggattataaagacacgctcgatgtcactatcgacagcaaagatccaaaccgtctgaactttatctgccacccgaacctggtgaatcagttgcgcgttctggccggtctcatccagtacaaactttaa

SEQ ID NO: 146186 - DNA, 357 bp, Enterobacter cloacae
atggcaaatattctgggtatggcggcgattcgtattaatggccgtgaaatcaaaactgaaggcaaatccaccctgaatccgggaggctatgcccgccagcaacacatgggcggcggtaaagtctggggtaattcccgcaagatggcggccccctccatcaagctgaccattgctgcggatcgcgatgtcgatgtgattgaaatcagtaactgggaggacgtgaccatcatgttctacggtgacaacggtctcaattacatgatgaccggcgcggccaccgataacccggcagaactggacgaagacgcggggacggtctcggctaacttcatcggcatcaagtgtgtgaaggtgtaa

SEQ ID NO: 146187 - DNA, 396 bp, Enterobacter cloacae
atggctgaaatgacattcactctggtacacggtctgcgtaccggcaaaggctctaccgacgaaatgcttcacaaggatgtgacgcttcgcgaactgacatcacgggatgttatcgaatcacaacttgcctcagagcgcgtcgtgcttggggataacggcaaggcggttgcctactgctctgaggtcatgatggggctggagatgatgcgccggcagattaagaagattggagaaatccccggcccgctggacatgaatcaaatttatgccctgcatccggaagatttgaagttgctgacagaaaagggtcaggcgatggatgacatgctgggggagactgccgaacgggggcgacatgatgccgatggcagcggcgctcaatctactgctgattaa

SEQ ID NO: 146188 - DNA, 1914 bp, Enterobacter cloacae
atgacaaaccgcctaagcactgaaattctgattaaccttgccgggaacctgacggccaaagcccgccagtacggcgctaatatgagcgagtttgccagccgtaaccagaaagcaatgtctgttgtgaaggctgcgtctgaatctgccggacgtggtctggatatgctcagtaatcgctatacaacgatgattgccggccttgccagcggcgcagcgctgagggattttgctaaaacagatcgacaattaaccgggctgggtattgctgccggtaaaactcgtgatgagatgcgcaatatctttgatggcattcaggaaacagccattaaattccgggtcgatgactcagaggtgttggcggcgctggagaatgtcaacaaaacgaccggtgatctggattttggtattcagaataaggacatgattgccgcctctatcgctgcatcaggttccgatggcgaggcaattggtggattgtttgcaactttccagaagtttcagacaaagaatgccaaagagaaccttcaggcaatggatattgccaacaatttagggaaagaaggtgcattcgaacttaaagatgctgccgagaaagcaaccagagcgctatcaatgtacgcagcggctggaggaaaaggcgtagaaggaataaaacaggggctggtggtcctaaattccgcgagggatgcaacgggagatcgtgatacagccgccactgcgactgaaaacctgattcgcgatctgcaattaccaaaggttgttgacactctcaagaaaaaagctgggattaacgtttatggcaacgacgggaaaatgcgctcgctttcagtgctcctatctgaagtagcgaaatcatccggtagcaaaggggcgcaggagcagaacaaaagacttctggaagccggttttaaccaggacagtattttacttatcagcagcgtcacctccggtaagggtgcggaaaacctcaagcgataccagtcagttgtcggagacggtacaggcatcatgaaagatgctgaatatgcggcgaaagattttacttcggcgctgaccagcctgaatgttacctggaagaagttttccaacagtaatcttgccggcccggtacaggagttggctgatgccatcaattcagttgatcaaaagacggttcagaactggcttgaagtcggcaagaaaattgccattgcgaccgccggagtcattgcggcacgcaaagcatttaaaatcggtaaaggcgcatgggattttctccagccagagaaaggcggaaaaggcattcctaaaggcgtctccgatgtttttggctccggcgttatgcccgtttatgtcgtgaacatgggcaaaggtggaatgggtggtcctggtgatttaatccctgatggaaaaaatccccgtaaccctaatagtcccagacgtcctggtggactaaatgggatgattggtctgtttggtctggcgtcaactattccatacctttatgaagaaccatcactgagcagtgatgacaaagctggcatggttcagtgggcaaaggatcgtgccaaacgcaaagcaaatgagaagccggttattgacccacgcccgtgggcatcaatgacaccggcaacgccgtttatccctgcggctgaaaatcacccgacagacaggtctcgccctgaaacgaatgaccattctttgtttggtgtcatcgttgattttctgcgtggcactaacgccgcaattgaaaacaaaaatgcgcttgataaatcagcacagccatccgttcctctggccccgacagtgaaagagatacagggtgaaattcgtgtgatccttgaggggaatggtcgcgttaaaaatgtctccatgaaccagtctgatataaaactcagcgcttctgctggcgtgagcagcgtgggacaaggctaa

SEQ ID NO: 146189 - DNA, 1332 bp, Enterobacter cloacae
atgggaaaaacacgatgggaagacctgcgagatgcttcatttcggggcgtatccttctatctggtcgataacgaaggcaccagtggacgccgtgcaatcccccgagcctaccctaaaaaagaagtgggctggaccgaggataacggtgctgttctgacccaacagcaaatcaacggcaagctgattggcaaggactaccagagccaactggaggcgcttctgcacgttctgaacatgccgggtcctggtgaactaatccatccgtggttcggcattgagaaagttcaggtcggcaaggtgacgcaccgtctgagcactgaggaaggcggcattgcctatatctcttttgaggtatatgaggcgggtgaacgcctgttccctgcgccgacagaaaacaccagcctgacggtactcagcgcagcggataaggttaaagctgccctggctaatggtgatgtctttgccctgctggatggtcttggtgagatggctgatacgtggatggacgacatggagaatctggtggtgggtgtgctgacgctaccctccgcgatcacagaatggactgaccgcctcggacgctttcgcggactgattgagctggccgtcgcgaaaccagccgggtttatcaatgatgttctgacccttgtcagcggtgtacgcgataccgtgaccgaacctttgtggtcaatgcgggtttatgatcagctccgtagccggtggcagggagaacagttttccggttcttcatcttcgccgtggtcgtcgccggcttcgtcaacaaatacaagtgaccgcgcgacagccgctgcacttcaccagttgcccaaatacatgtcagtcacaccaggttcagtgactgacggaaagtatggttttgccagcagccttccggacgttgtccctgagctgaccgatgccatgcaggacaacatcactcatttccgtcagttgattgtcgttgccagtctaattggacaggcagagaccgttgccagcactgagttcagaagcagtgaggaagccataagttcgggtgacacgctggctgagcaactgaatgaacaggctgtgtacgccgtagaaaacggtcagcgggatttgtggcatgccctgcgtgagctgcgctttgccgtcgtcaatgacgtgcgggtcaggagtgctcagctaccacagacacgaacggtcattctgaccacaacgtccccggtatctctgattgcgtggcgtgaaaccggtaataccgagaaccgtgatgccatcgcctcaaggaaccgattgaaagacccggcgttcattcttccgggtaaacctgtcgaggtaacagattga

SEQ ID NO: 146190 - DNA, 1092 bp, Enterobacter cloacae
atggaaatggttgtgcttgaggttgacggccagcagtgggacggatggacagagatgtcgatcacttcctcactggaggctgttgccggcgaatttgatctcactgtcaccacgcaatggtcagaagcttcaccgcgcgtgattaagcagggcatgccctgcatcgtcaggctgggagaagatacggttctgacggggtatgttgatgattttattcccagctatgacgcagaaaacatgagtattcgcgttatggggcgggataaaaccggcgatctcgttgacagctcagtggtgcataaatccggccagtggaaaggtgttcgactggagcaactggcagtggaaatctgcaaaccctatggcatcagtgttatcagtgaaactgacactggtgaaaccttcggtagcgtggtgcttgaacagggagagaccgccttcgatcttcttgaccgcctggctaaacaacgcggcgttctgctgactgctgatggtctgggtaatctgatcatcacccgtgcatcaacaaagcgtgccggcgttcctctgattttcgggaccaatattcttgcagcccgtggccggttcagctggcgtgagcgaaacagccagtacatcgtgaaaggcacctccagtgcgggggggagcacatgggacgatcagcctgtcaaagtggttggtggacgtcagaccatcattgatgacggtgatatcaaccgttaccgcccgaaaatcctggtcaatgaagacagcctgaccgttggcggcgcaagtacacgtggtgaatggtacaaagcgcggatgatgggcgaagccaacagcaccgaaattacactgacaggatggcgagagaatggcgatgaaggcccgttatggcagaaaaacaggctcgttgatattgatgacccgatacagaacctgaaggactcatggctgattaaaaccgtcacgtttactgaaggtgataacggacgtctctgcgttctgacgctggttccccctgagtcgatggatatgcctgaaaccagtgcgaaaaaagcaggcaagaaaggcaaaaaatcaaaggcaaaaacggaggaaacatgggactga

SEQ ID NO: 146191 - DNA, 543 bp, Enterobacter cloacae
atgggactgaatccggcaaatatcggtcgcacacttgaaggtattggacgccggctacgactgctcgttgacagggccgttgttcgtatcgttacagacagtctcgggcgtcagaatctccagatccagtctctggcagattccaccaatgatgacgttgagcgtttccagaactacggtctgacatccgttccgcctgtcggctcagaagcacttattctggccgtgggaggacgtcgcgaaggactggtggctattgctgttgaggacaagcgctgccgccccaaaggtctggaggatggagaggtcaggttatatcacggcgatggtctgtcatatatcaccctgaaaaagaatggcgttattgaagttaaagggaaatcggttaattacgctggcctcgatatgtttgagataactacaaaacagttaaaagttaacggctctacccagtttacagaagatattcaggttgccggtaaatctgtgcttgagcatttccatattgacggagatggcgaaaaaacatcggagatgaaatga

SEQ ID NO: 146192 - DNA, 453 bp, Enterobacter cloacae
atgactattggtatcagctggaataatcaactctccagaggtgaactgacaattaaccatgatggtttatcgcgtgatgaaggtatggtcacgctggttctgatttgtcttttcaccgacgtccgtgctgataccgatgacattatccccgataattcatctgacccgcgaggctggcccggtgacaccttcagtgattatccgtgggggtcaaaactctggctactggaccgcgaaaaactgacggaaacagtcagaatgcgagtggaagattatgcgctgctctccatgcagcctcttttacgttccggatatgcacgtaatgcaacggtgacggccacgataagcggcagtgatcggattaattttattgtcattcttacccgcccggataaaacaacgatccggattgaaataagtaaacgctgggagtccaccgctaatgccttataa

SEQ ID NO: 146193 - DNA, 1077 bp, Enterobacter cloacae
atgccttataacgttcccgcactgcgcaaacttattactgacggcgaaaaagatattgcctttgaactggggctgcaaagacttccgccagtgggcgttgagaaagcgcttaatacctcattcagtaatcaggttcgtgatttatacgaccatcagagctggattaaagaccagattattccgtccgttaaatctgatgatgaaaccattatcgaaactgcggccagtgaaggtgtcatcagaaaacaggccacgtttgctacgggtccggctgtatttaaagggaatacaccgttgccggaagatacggagatgcaaaccgctaccggtattgtttatgccgtaacgacttccggcgtttctgtagatggggtcatgactgtaaccattcaggccagcgatgccgggtcgtccggaaaccttccggaaggtgaaagcctgaccctgctgtcccccgttcccggcgtggagagcattggtttaacgggaacggggggcatcacaggtggtgcggatattgagcctgttcctgaattgcttgaccggcttttattccgtaaacgcaatccccccgttggtggggctgtgcatgactatgtcatctgggcgcgagaaatggctggtgtcagtcgggcgtgggcatttgatgcctggcatggcccctgcacaatcggactggcatgggtttatgacgatcgttcagtgattacccccggatatcaggaccggaaaaatatggaagattaccttttccgtcatacagacccggcgactggcgtttgggttggtaaaccaggaggaatagaagtctggcccgttgaactgatgctccgtcccgtcaatatggttatcgacataacaccggatacgtctgccacgcgtaaagctgtccagtcccgcctgctgacgcttcagaagacgctgcaacctgggcagacgttacacatttcatcaatcaggactgctatcggcacagcatctggcgtgaccgattacacactgaatctgactgctgacattccctgcgatcagaatgaacttatcactattggggaactgacatggcccacagcgtag

SEQ ID NO: 146194 - DNA, 591 bp, Enterobacter cloacae
atggcccacagcgtagatgaatggctgggtgctttatggcagatcatgccacgtggcaaagcgtggtcacgcgatgaggatggtgatttaaacctttttttacgggcgttagccagacgtttaagtcagacggaatttgatgcagaaaacctgctcccggagatgcggccagaaacaacatttatgctgctggaagaatgggaggaataccttgaactgccggagtgtgggcagttaagcggtactgtagaagcccggcgtcgtgccgtcgtggagaagtatcaccgcaaaggtggtctctccccgtggcagattgaagctgtggccgccgcgcttggatttactatccgggttactgtcattctgcctcaccactgcatgcgtagctgcatgtatcccctttatccagcccgttaccgctggacgttacagattgatgtgatcggtataagcggcggacggtttacctgtatcgataacgtcatgacaccgcttctgagtgaacgggcaagagaactggagtgtgtgctgacaaaataccgtctcggcggcacagcatacgaatatttttattcttcaggagataactga

SEQ ID NO: 146195 - DNA, 660 bp, Enterobacter cloacae
atgtatcacgtagataattcgaccggtgttccggttatgccacaaccgtctcctgtcaccagtgagacagagcttttctttactgaaggtggtaatggagttcctccgacgtatcccggcccggactggtttaataccattcaaagtgagctgcttaatattctcagggacgctgggcttgatcctgacaaaatggacaacacgcagattctggccgctctcaaaaaactgtttctgagtcgctccaatccatttggcgacattaaagcagatggtgcggcggcaatcgcgacggctctctcaaaccttggtttgggagaagcggctaaaaggaatgtagggacaggggcgaatcagatacctgatatgggtagcttcacgctttctgtttcaggtactggatatcaaaaattaccatcaggttttattcttcagtggggctcaatcggcacaccaggcattgcacaggatgtagtaacccatttcccgattgcatttccaaacagatgtctgcgtgttttggtctcacaagactacacaccagataccggggctgttggttatattgcctgtgcaggttttagttccgacccggttaaatttatatccagagccagtactcctggcctcggcgcttcatttttagcgttaggctgttaa

SEQ ID NO: 146196 - DNA, 441 bp, Enterobacter cloacae
atgaattacatatattccgcgactacaaactctttctatccgctggagatgaaagaggattacactcaagctgactcatggccagatgatgctgttgaagttgatgagcaagtgtatattgagttttccggattaccgccgaaaggaaaaatccgtatcgctggagaaaatggttttcctgcatggtctgaaattccaccaccaacacatgaggaacagattgctgcagccgaactggaaaagcagcaactgattaatcaggccaacgattatatgaacagtaaacaatggcctggtaaagcggctattggccggctgaaaggtgaggaactggcgcaatataatttgtggctggattatctggacgcactggaactggtcgatacttccggtgcgccagatattgaatggcctacgcctccggcagttcaggccagatga

SEQ ID NO: 146197 - DNA, 411 bp, Enterobacter cloacae
atgaatgcgtcatatgcagttattgaaaatgggatggttgtgaatgtcattgtctgggatggtgaggatgaattcactgtgccggataatctgcagctcattaatatttctgatatcagtgagcagcccggaatcggctgggcgtattcagacggggtatttactgcaccacccactccggaacgttctcatgatgaactggtagctgacgctgaacagaaaaaacagtcgttgatagacgcagcaatggtcaatatcagcgtgattcagttaaagctgcaggccgggcgcaaactgacgcaagaagaaactacccgacttaacgttgtgctggattatatcgacgctgtgacggcaacagataccagcacagcgccggacgtcatctggcctgaactgccggaggcgtag

SEQ ID NO: 146198 - DNA, 600 bp, Enterobacter cloacae
gtgaatacccgggttttcacgtcatcaggtacgtacaccccgacgccaggaacaaaacggatcagggtcacaataacgggcggcggtggcggagggggtggctgccaggctatatccagtaacgaaacgtttttcggtgctggcgctggggccggagggacagtaatcaccatactgaccccgacacagaatagttatcctgtcactatcggcgcaggtggggccggtggtgttagtgcgacgaacggcaccagtggcgggaatagcgtatttgcatcgttaattgctcctggtggcgcaggtggcgggaaagtgggagttacaaatacaaacggcggtaacggaggtgtgccgagtactggcgatatccgcatcactggtggaaatggaggcgacggtcagtccggaaatatcagcgtcagcggtgaaggcggaacatcgtactggggtggcggtggacgcgcaggcgctggcggtggcgttagcggtaaggcatatggttcaggcggaggtggtgcatacgatgccggttatagcggaaccagtatgacgggcgggaaaggtgctgatggggtttgtattatcgaggagtttgcataa

SEQ ID NO: 146199 - DNA, 657 bp, Enterobacter cloacae
atgcacacaacccacaccacgttcattcttgccggccacaccgtctaccacgtcaccttcgcccccaccaccttcaccgacaccgaccttctctggctcccccactacgctgaactttcaaacgccggacgcaaacgcaaagccgagcatctggcaggccgcatcgccgccgcgcatgcgctcggtgcgataaatgaacgcgcgatccccggcatcggccccagcggcgaaccgctctggccggaaggggtttcgggaagcattactcatagcggcacgcaggcgatggcggttgtcgtccgtcatcaagatgcgctcgtaggtattgattgcgaagccattcttccagaccgggaagcccgcgaaatccaggacggcatcgttgatgcgcaggaagcgatgtacctgacgcactcgggctacccttttgcgctggcgctgacgctggcatttagcgccaaagagagtttgtttaaggcgctctttccaaaggcaaatacttacatggggtttgagtgggccagagtcacagagttaacggaaaaaacaatcacgctggcgctttcgaacccggctggaggctatcctgagggtaaacgcttcatcctcatctggcagaataatgatacgagcgtgtttacgctgctaaaagcctga

SEQ ID NO: 146200 - DNA, 348 bp, Enterobacter cloacae
atgagccacgcgatagaatttatcgaaacatcactttttacccggcagttcaaaagtattgctacggatgatgaattaagggatctccaaaaggaactcattgcctggcctcataaaggcgatttgatccagcatacaggcgggctacgtaaaataagaatggctgttggctcaaagggaaaaagcggcggggccagagtcatctactttctggctactgaagaggtgatttttttcctcatggcctatccaaaaagcatgaaggacagcctgaccgatgtagagaaagccgaactcagaaaactcacgtctgttctcaccaatagcgcttccagttccgtcaattaa

SEQ ID NO: 146201 - DNA, 1188 bp, Enterobacter cloacae
atgaagatcaaagatattgaaatcataaatattggcggaatctctaatatttcactaactgaaatcaactctcaaattaatattatatgcggcgaaaatggagttggcaaaacaaatatcctagattcaattgcctcttgctttagcgaatatgacaggaacacaatcagtaaaaaatctggaagtattagtggaacaataaaaatcaatgccattcaggattcagaaccctcaccagtccatttccatgttaagattgacagctttgaacctagtgaatatgaaaaatacatacataaccaagcctaccaagaaaacaaacaccttctactttatttaaaaacgaacagaggaataaactatagaaaaatcgcatcaatcagttctgatccagatattacaaatcgcgcaagaaataacgcttcaggcattagcaatgaagatattaaagaatggctactcaacagaattttacacagcaaacataaaaaccacctatctaaaacacaactaaaaaacctcgagctatcaaaaacttgctttagcatattaaatcctttgtataaatacagtcgattggatacgaaaaacgaattattcgtagaaacaccgacaggagaaatatatttcgagtatctatcatcaggttttaaatctaccatttttattttacttggtataatcaaagagatcgattatagatttgagagcaacagaatagcagctgtagattatgatgggcttattctaattgatgaaattgaactgcacttgcatccagaatggcaggggcggatatgtaatattttaaaaattatttttccaaaggcacaatttttcattacaactcacagtccgcatgtcgtccagacagccgcctacggcgaagtcatagcacttgaaagaaatagtgatggcctaatttctcaaagacctctcccatcctcagaatatgggtaccaaggttggacaattgaagaaattctagacgacattatgggaatgccagatttaagaacgatgaaatataatgaaaccaaacgttcatttgatgatgcccttaatcgtgaggataagttaaaagctcaggaagcttatgaaaaactagataaaatgctacatcctcaatatccactgcgaccagtttttaaaatgcaattggataaaatcctaggtggtgaaaaatga

SEQ ID NO: 146202 - DNA, 720 bp, Enterobacter cloacae
atgataaaactacaaaggggtgaaaaaccagtttatttgacaaacgaaaaacaaaaagaattaacagaagcttttaaaaatgataataaaaagcaagtttggaaacacgaagaaatcggaaagtcgctattagagagcagttcatataaatgtgcatattgtgaatgcaaactgcaaactcaagattcatatatgcaagttgaacattttaaagataaagatagttaccctgacgacgttgtaaattgggataatttacttccttcatgttcacgctgcaatcgtaaaaaatggactttagatgttgttgccaagccaataataaatccatatattgataacccaaaatcacatttatgccaacaagctttcagattatatagcaaagatataaaaggggaaacaactataaccgaactatttcttaatgatgatgatcgtgtggtttaccctagatttttagcttcaaatgaaatagggaaacagttgacggaacttattagtgatacaaacgagttaaaaaaaataagaaatggtttaaacagattactgttagcttgccaagctaataaagcttattcagctttcattgcttatgctttacattcaaataatgattatacaatattaaaacagttgttaatcgataataatttttgggatgaggacctaattgagctagatcaaaactcagctaatatagcactggatccgagataa

SEQ ID NO: 146203 - DNA, 279 bp, Enterobacter cloacae
gtgaaatatcagctcgacacgcagatctatgatttcgactggagcctgacttatcactatctcggtacgcgttacgacactgactttggtgcttatccgtctgagaaagtaaaaatgggcggtgtcagcctgtgggatgtcgcagtttcgtatcctgtcacctcacatctcacagttcgtggtaaaatagccaacctgttcgataaagattacgagacagtttatggctaccaaactgcaggacgggaatacaccttgtctggcagctacaccttctaa

SEQ ID NO: 146204 - DNA, 924 bp, Enterobacter cloacae
atgaccgcgcaagatgtaatcaacgtgctcactattcttaaagctgataattcagtcagttttagcaagattcaacgcacgttaggaatgaatgtctcacagttggaaagtctcgttactgggttaactgcgatggggattgtgtataaatcatcattcacttcatacagccttactgagttcacctctaaacctgctgttagtgacggtgtaagaaaggcattcgaagatatcattaccaatcgcggtacttacctgtcagaagaactcctacaaaaggtaagtacaccatttatcccaatgatgacgcacgaatacaaaaatgccccagttaaagtgatgatcgtggggcaagaaactctgggaatggaaaacgctttcagtaccatcgtttcggttgatgactacattaatcagagaattgagttcttcaatgaattcaattttggtgaagacttaaggaatagccacttttggtacgcatttgatgaagtggtaaattattttaacctaccatccagaagacatgcttattggactaatctgcataagtttcaattaattgaaaatgaaggagatagtgtcagcatttccaaactgccttcaaaagatattatgtcaatgattcatatgcagcatgaattattcttggctgaaattaaagataccaggccagatatcatcatctacttcactggcgggcaaacatgggtgttagatcattacttaaacaatggtaaaaaattagcagttaaggcaatagatgaacgttcgcatctggggattatacagacagaatttttgcattgcccaatcgctgtatgtaccgaccatcctgccagaagaggatatactcaagccatcttagatcatagatctaacctactgaaatacgctgctgataaatttcttgcaagtcgataa

SEQ ID NO: 146205 - DNA, 186 bp, Enterobacter cloacae
atgcatggactcattgatgtgtatcgcgatgtttgtagttatgagattaacagggagcttccgctcctcgctcacagcggacactcaggttcaacagtccattacgttaagcttaccgttaagcttacggataatcattttatgatggcgtggagaacgggggattctgaaaacggtaagaagtga

SEQ ID NO: 146206 - DNA, 660 bp, Enterobacter cloacae
atggcgataccatacactgcaccagtgtttcgcgaagaggcatttaattgcccgcactgtgaggcttatgcaaagcaagagtggtttaccttaagctttcatagggggagctatggctacaatgcgtatatggatttaagtatttgctcccgctgtgaagaaaaagcatattggtatgatgagaaactaatagtccctcaaagctctacagtggaaatgcctaatccagacatgcctgatgactgcaagtccgactacatggaagctagaagcatcattaatctgtctcctaaaggcgctgctgcgctcctgcgcttaagtcttcaaaagctgatggtccatctcggtgagccggggaagcatatcgacacggacattaagtcccttgtagctaaagggctgtctccactggtccagcgagctgctgacatctgtcgtattgttggcaatcaggcggtacatccgggtgaaattaacattgatgacgaccctcagttggcgcatggtctctttaagctgctgaacattattgtcactgagcagattactcgaccgaaagaagtcgaagccatgtttaacagtatgccggaacgggcgcttaagggcattgaagaccgggaccggaaagcgagggaacagcaacaggccgctaacgagtag

SEQ ID NO: 146207 - DNA, 447 bp, Enterobacter cloacae
atgaaatccaacttctgctctgcaatggctttatcatcctttctcctcagcgcttcagcattttcaagcgagacacttccatcagataaagttgttattgattcagcatacgcttgcataggaatggctaagacctacggtggagatgcgcaccgcttcgatttcgaaaaaacaaaagaatatatttctgctgaagttgatgactgcgtaaaaacactttcatggacgcgatttgatgcagataaaggcaaggatgtagaacagcaaatacgagacaactggaacagaactgcctttgatgtaagcgatgagcaatacgccttttacgctaaattccatgaacttatgcaaaaaggcgctcacaaggcagctcacaatgatctcttcagaggccagatgactcaaaaaggcaaggacaaatcacagcaattcccttttacgaactga

SEQ ID NO: 146208 - DNA, 1875 bp, Enterobacter cloacae
atgattatcaatgagttggcctataaggtcacaattaaggccgatgagttcctgaacggcaagaaaaaggttgaagagggcgttaaggagcttcagggcgcagtagataaaagcttcggcgacattgacgaaacgtctaagcaaactggcaaggtaatcgtcaagactggcgatgacattcagcgctcaacgcggaaaacaggtaaagacctaaaagacgcgacgtttgatgttaagtcatttggttcagcggcagcttcttccttcaaaggcgcttatgtagccgcagccggattcctggggattggcgctgggctatatggcatcaagcaactcttcacctccacatcaaacgaaattgtccgtgcaagcaaccaggctaagtttttcggcaccgacgttaataagatgtttggtcttcgtcgcggatttcagcaggctgggcttaatggtgacgccttcattggtgcgtctggaagtgctcgcatggcgctggctaacatcgcagacccaacagtatttggcggactgacaggtgcagcgcagaacctgatggtgcttggcgctcgtacaggactgaatatcaacaaccttggcgacccaagcaaagcccttgctgagctctcccggtacgggaaaaatcactcacaagaaaacctgatgcaggtcatggcagcatctggtttcgacccgactgacgcagccaagattaaatctggtgagctgaagtcactcgtcgactctgagacgaagaagtcaaacatcactgcccagcaggtaaaagagcaggaggctcttgtagttaaaatgggtgaacttggtgcgcaggttgatcgcgtggcgcaaggtattgcgatggccttcaccccagcagtaatagatgcacttgaatccttcggtaagtggatagagggccatcaaggcgaaatcatcggattcttccgtgatgctggggataaaattaaagccttcactgaagctgtaggtggagcagaaaacgctctcaaaatacttgctggcatttacatcggtaaaaatgcagtaggtctggcaggtgcggcggggatgagtggcggaaaaggagccggtggaatattaggtaaacttggcctccttggagctagcgtattttttagcggggatattgcagatgcgacgactccaagctctgtaaaaggcctcagagacgaagataagccattcatctatcaaaagcactggcttgaacgacttcttggaatggattacgaagatgaaaacgctggcgtagcatccaatccatcaggtagaaccctatcggacaaaaataataaccctggcaatattagaggtaagtcaggggttggagggtttgccggatattcatcagagcaggagggatgggatgcaatgtccagccaactgatgagatattttaacggccaaactacgggcaaaagacttaaaacagttaaggacataatcagcacctgggctccatcatcagaaaatgacacttcctcatatatcaagcaggtttcatcttatctgggggtgggagcgaatgaggagctaaaccttgcagaccccaatgtgatggcaaagcttcgcacagctatggctcgacacgaaggttttggtaactggcaaaatggacttaagttgtcaggaagcaaccagtatcaaaaccagtattacctgcaacagcaatcgctcgctaatgcaagaatgcaaaacactgctggaaatatcgacaacagccaaagcagtaagactgttatagataaagttattgtaaatacgaacccgcagacagtagacgcacttacatctagcgtaaaactgcaatcgcagagagcagcaacatcgtcagccttcagcagtgctgttcagtaa

SEQ ID NO: 146209 - DNA, 591 bp, Enterobacter cloacae
atggcaaagctcaccgacaaacaagagctgtttgcccgtgagtacctgaaagacctcaatgccacacaggcagctatcagggcgggttacagcgagaagaccgccaaacaggttggatatgaaaacctcactaaacctcacgtcctggaactcgttgcagagttaaaagctcagagaatagaacagacaggaatagacgctgcttacgtgctgcgacgactgactgaaatcgatcagatggacgtgctggacatcctgcttgccaatggtgaactgaagccgattaaagactggccgaaggtgtggcgtacaacactgtcaggcatggatgttgtcgagatggcatccgcagatagcgccgctctactgaagaaaatcaaatggccagacaaggtgaagaaccttgaactgttaggcaagcacgtaaacgtccaggcattcaaagagcaggttacgagtgagctaactggcaaaaatggcggacctattcagtacaccgatatcaccgaagaagaattagatgaacgcttgaaggagcttggtcatggcagacatagatcacagctcgctgagaaacaggcagactcttga

SEQ ID NO: 146210 - DNA, 252 bp, Enterobacter cloacae
atgaacctggaaaacgcaatcaagtttcacttcgcgaagtctactcagacagaggaaggatatttcactcatccctgtcaaccaggaggtcaataccaacctcaatttgcaaccctgtggaaagaagatgggttggaatcattcatcaacctcgcccatgtaattaatattgaacaatccatcctataccgtgaaggcgatgacattattggccgtgatggtaattgggggatcacggtagtcccagcttaa

SEQ ID NO: 146211 - DNA, 186 bp, Enterobacter cloacae
atgtgcagcgtaactaacatccagcaagtcaaatggcagcgtcagcgcgatatgcataacgagcaggtgctgattggcaaagagcaggagcttgagcgcagccttgattatgtgcgcgagcagctgcgggaagtgcggaatcgtctcggtacgaataagccagaccatgatccggaggcggcttaa

SEQ ID NO: 146212 - DNA, 372 bp, Enterobacter cloacae
atgaatgaatataactttatccttccctggcctcccagcgtaaatacatactggcgacggcaaggaagcaggtattacatcagcaagaaaggtcagcagtaccgcaaagaagttatccagattatcaaaagcctcaatctcgacatcctcaccaaatcacgactccgcatcaaaatcatcgccgcagtgccagattcccggcgcagagatatcgacaacatcttgaaatgtctcctcgactcacttgtccacgcctcattcgcagaggacgacgagcagtttgatgatattcgcgtgattcgtgcagcaaaagtgaagggcggtcaggttgaaatcaagattacagaactggaggcaatatgtgcagcgtaa

SEQ ID NO: 146213 - DNA, 561 bp, Enterobacter cloacae
atgcttattggttacgtgagggtatcaacaaatgaccagaacaccgcattacagagaaatgcgctcgatagcgcaggatgtgaactgatttttgaagataaaataagcggcaagacatccgagaggccggggctcaaaaaggtactccgtatcttgtcggacggagacacgctggtggtctggaaactcgatcggctcggtagaagcatgcggcatcttgtcgttctggtggaggagctgcgagagcggggcattaattttcgaagcctgaccgacagcatagacacatctacgccgatgggccgattcttctttcatgttatgggggctttggcagaaatggaaagagagctcattgttgaacgcacccgggcgggattagcagctgcgcgagcaaaagggcggatcggtggtcgcaggcctaaattaacggatgagcaatgggcgcaggcagggagattgatcgcagcaggggaatctcgccagcgtgtggcaataatttacgacgtaggggtttcaacactctaccgaaaatttccggtaggcagtggtaagacataa

SEQ ID NO: 146214 - DNA, 435 bp, Enterobacter cloacae
gtgaacacatatttttatagcgctttacacaacagctttttccctcttgagcttaaagaggattatatcaatggcattggttggccagaggatgcagtcgaggtaacagagcatgtatacagagaatttacgggtgagccccctgaaggacaaaaaagagtagctgggaaaaatggattacctgaatgggaagacattccgcctccaacccatgaagaaattgtggcgcaagcggagattgaaaggctgagccgaactgatgctgcaaatgggtatatgaatggtaagcaatggcctggtaaggctgctatcgggagactcaaggggaatgacctgacgcaatataatttgtggctggattatctcgatgaactggaggccgttgacacctccagcgcacctaatatcgtgtggcctatatctccggctgtttag

SEQ ID NO: 146215 - DNA, 591 bp, Enterobacter cloacae
atgaaacctgttttcgatgaaaatggactggcaacagaacagggtgaaatccgatgctattactacgacgcggagacgtttgaatacatgggatggtctgacgaatatattaatattggtgtcagtatgccgggtgattctactgatattaacccaggtgatgaagtggctgggaaggtagctgtattccaaaatggcggatgggcgattaatgaagaccatcgtggtgaaacggtatattcaaccgctgacgcctcggcctcaacggtagattatatcggtccagttaaggatggttacaccagcgttgccccttcaggtccttaccagaaatgggatgggaaaaagtggatagcagatacagatgctcagcatgctgctgatgtaaaagcggcggataagcagaaagccgcgttactggttgaagcgcaggaaacaatcagtttctggcaaactgagctgcaactggggatcatcagtgaagaagacaaagccagcctgataggctggatgaactacattaaagctttgaaagccgtcaaaacatcgacggctcctgaaataacatggcctaaacagccggagatatag

SEQ ID NO: 146216 - DNA, 129 bp, Enterobacter cloacae
atgaatatttttcatttttttactgtcggtcttagcgtcaaaacggggctttttacattctacgagaaggcctccacggttatgcaagggtttcattgtgtgtttaaaatctctgaacaggcggcgtaa

SEQ ID NO: 146217 - DNA, 684 bp, Enterobacter cloacae
atgccactggcagagcgccgctacgacagactggcggtcaggctgtcgctgattatcagccgcctcgtggcgggtgaaacgctgaacatgcaaaagctcgcgaccgagtttgatgtgtcagtccgcaccctttacagggattttcgtgagcggctgatttatctggacctcgaatgtcatcagggctgctatcgcctgcggtcaggggccgggccgcagggcgagctggatgtcctgacttttgcccaccgtaccggcatcgccggtctctttccggggctggaccgtcggctggtgaacttgctgttaaactgcgagggtgctccctgcctgaccggagatgctgtttctgcgggctcgcccgcgaccccgctgtccttttaccggctggtacaggccattaccacttgccagcgtgtcacgctgctggctgacggaaaacgatgcgaaagattgtccccttatcggctgattgcgcagcagggccactggtacctgattgcggagcacaacgaccatccggcggtatttgcgctcggtgatattcaccttgtgcagccccttaccgagagtttcagacgtaacgagcgcctttaccgtctgacggaagatttaagttttatccgggcactgccgcattttggtgttgtcctgcagtcgcttaacagcctgtcttcaccctga

SEQ ID NO: 146218 - DNA, 3156 bp, Enterobacter cloacae
atgatgaagcgaaacctgaacaccagctatcggctggtatggaacgaggttctgggagcatttgttgttgtctcagagctggcaaaagccaaaggaaagcgcagtactgccgttctggcgctggcggttgccggactggtggcaagtcctgccgcactggctgacgatgcgccgggaaacacccgtacggtagcggccggtgaggtagtcaatggtgcggtgatcggcaatcacgactcacagatcgttttcggtaagacaaacaacacagtcatcaacacaggcctggagttcggtgctgataatgatgacaacagcggtggtcagtgggtacagacggggggcgtggcaaaccagaccaccattaataatagcgggctgcagggtgtactggctggcggcagcgccacagacaccacagtcaacagcggtggtggtcagagcgtgcatggtcaagcttcagataccacgcttgacggtggtacacagtgggtacacagcggcggtattacctccggcacgatcattaataaagacggggctcagctggtaaaagctggagcgcaggctaccggtagtgtggtgaataccggagcacagggtggtcccgatgcagagaacaacgacgggcagtgggttgccggtaccgcaactgataccaccattaataacgatggtcggcagactattgcgacaggaggccttgccaccggcacagtgattaaagcgggcggcgaccagagtgtgcacggttcggcaaatacgacccgcctggatggcggttatcagtacgtgcatgccggtgcatctgcaagtgacacggtaatcaatgcgggcggctggcaggtggtgaaaagcggtgcgacagccgacaacaccacagttaatgcggacggtaaactgcaggtgggtgccggaggcaacgccacgaacgttacccagaatgccgggggcgcgctggtgacgaacaccagtgccaccgtctccgggaccaacagtctgggtaacttcagtgttgatgccgcgaatgccagtgccactaatgtgctactggaaaatggcgggcgtcttgatgtactgggcaacggcagcgccgataccactacggtcaatcagggcggtattctggctgtagcgaccggtggtaaggcgcagaacatcgtgatgcatgacggcggtgtgctaattgccgataccggcgcaacggtcagtggaacgaacacctccggcgcattcggcattgacggtgcaaccggtaaggccagtaacctgcgtcttgataacggcagtcagttcactgtactgggtaatggcagtgcggataacaccaccgtcggggctggcagtacgctgaacgtggcacagggtggaacgctcaccggcaccacctcatttggcgacggtgcatcgctgacggggagcgccaccaacagcggacaactgcatttcagcacgggtaacggacagggtgcggccatcagcggttcggtaagcggtgaggggcagctactcaaggacggtgacggcaccctgacggtcagcaacggcacgctgtcccagtcacaggtaaacctgaatcagggtacgctggcgctgaacaatgccatcatcaacagcgacatcattgcgcagtccggtacgcaggtccgcctgaccggcaactcggtgctgaacggggcgattgacccgactgacgtcaccctcgacagcggtgccagctggaatattcagcgtggtgcagcggtgaaatcggtgctcgacaacctggacaatgccggaaccatcagttttgcacccgcacaggcaaacagtccgtttgtccctgaaaccctgacggtgacgaatctgacaggacgcaacggcaccattaatctgtccattcgtcttgatgacccgaccttcccgaccgacaggctggtcattgacggcgggcaggcaaccggtaaaacctggctgaatttcaccaataccggtgatgcagggctgggcctggcgacaaccggtaacggtatcaaagtggtggaggcgattaacggggccaccaccgaagccggggcttttgcgctgggccgcaaactgcaggccggggcatacaactacaccctgagtcacggcagtgccgatgaaaactggtatctctccagcgaagccggctaccgtgccgaagtggcactgtactcatctttgtttgcccagagcatggattatgaccgtgcgctggccgggacatacagccagcgcagcagtgcggtgaatgaccagggattctgggggcgtattcagggcgggcataccgggcatgacggtaacggcggcattgcccggggcgacaccccggaaagcagtggcagctatggctttattcagctcggcggagacctgttcaaacacgacaccggtacgctttcgctgaccagtggactctatggcgcggcaggccagtcgtcggtggatgtgaaaaacgatgaccgctctgcggcaggctccgtgcgtgacacggtgtacagcctcggcgggtatctgacagccgttcaggatgccagcgggctgtgggccgatgtggtggcacagggctcccgtcacagcctgaaggcaagctcagcggataaccgttttgaaactgacggcaccggctggctggcctctgtggaaaccggtctgccgtttaacatcagtcagggactggtgctggagccacagctgcagtacgtctggcagggcctgtctctggataacgggcatgacaacggcggttacgtgaactttggtgacggtagtgcgcagcatgtccgcgccgggcttcgtttcggcagttcgtctgaaatggacttcggtcagggtacctccacggttgcgggtttgactgacagcatgaagcacagcacaagcgaaatgccgatgaactggtgggtgcgtccgtcggttatccgcactttcagttcagacggcgatatgagcatgggcactgcgactgcaggcagcaatgtcagcttcaccccgtctcaggatggtacctcgcttgacctgcaggcgggtattgaagcgcgtgtccgccagaacgtgacgctgggtgtacagggcggttatacccgcagcgtcagcggcaacagtgctgctggctacaacggtcaggcaacgctgaaagtcgctttctga

SEQ ID NO: 146219 - DNA, 465 bp, Enterobacter cloacae
atgaccacacaaactgatacagcccactcgccgatgagtgattcacacatgtctaccctcattacggccagcctggtacccgatgaacagcgcctgggtttctggccgctgcacttcgggcgtatcccgcagtggatttttatcgagacccgtatctttggctggatggaccgcttctgtgaagactacagcggcggtatctggcatttccacatactcagcaacggtggcgcgtttatggcccccgaagctgacattgatgagaaatggaggctgctcaacaacatgaatggcaatggcgcagaaatgagtgcggaagccgcaggcattgccgtgtgtctgattgagtacagccatcacgcctgtcgtacggagtgcgatgccatgacagagcattatttccgactgcgtgattacgccctacagcaccctgaatcccatgccatttttgccatcattgattaa

SEQ ID NO: 146220 - DNA, 480 bp, Enterobacter cloacae
atggagaaacaactgactctctttacaccggaactgccattgacctcgctgcgcaccatcaaacgagccctgagtctgcttgaccagcacctgcgcgaaccgggtgtggcgtttacttccacgcaggctgctcgcgactggctcaggctgaagatgggaacccttgagcgcgaagagtttgtcgtgctgtacctcaataaccagaaccagctgcttgcccacgaaatgctttttaccggcaccctcagtcacactgaagttcatccccgcgaggtggtgaaacgcgccctgtactttaacgcggcagcagtgatatttgcccataaccacccatccggggaggtgaatccaagtcaggcagacaaagccattacccagcgactggtacaggcgttgatgctggtggagatccgggtgcccgaccacctgattgtcggcggcaggcagatattctccttcgccgaacatggtctgctgtga

SEQ ID NO: 146221 - DNA, 360 bp, Enterobacter cloacae
ttgtcgaataaaataccgcctgtaaaccacaatatcgccgaaccctggtgggggcttaaacgcgatatcacaccctgttttggcgctcgcctggtgcaggagggcaaccggctgcactatctcgccgaccgcgccagtatcaccgggcagttcagcgacgcggatttacgccatctggaccaggcatttccgctgctgctcaaacagcttgaactgatgctcaccagcggtgaactcaatccccgccatcagcacggcgtcacgctctacgcaaaagggctgacctgcaacgcggatacactcggcagttgcggatatgtctatatagcgatttacccgacacctgcaacaacagaataa

SEQ ID NO: 146222 - DNA, 378 bp, Enterobacter cloacae
atgcaaacacaacctgttcccccgacacaggaggcttcaccacgcccgtcaccagtggagatctggctccgccttttgagtcacctgctggaccgtcactacggtctgacgttaaacgacacgccattttgcaatgatggtgtgatccaggagcatatcgacgccggtatctcactgtgcgacgcggtgaattttatcgtggagaaatacgccctgatacgcaccgatcgtcacggtttcagcgcagaaacacagtccccactcatcagcagtattgatatccttcgcgcccgtaaggcctgtggactgatggcacgcaatggctacagactggtgaccgatatcaccaccggcaaatacagcgaggtgactcgatga

SEQ ID NO: 146223 - DNA, 492 bp, Enterobacter cloacae
atgaaactctccatgaccgtggaagccgatgccgtcactatgcaggccctcaacatggggcggatcgctgttgatatcgacggtattgaactggccgacctgattgatgtggtctgtgataacggttattcgcttcgcgttgctgacgaacctgggaggctggttgtggaagatccactcccgtctgccgcccggctgaacggcattcagtgcagtaccgcccatatctccgaagctgacaacaacctgctgttcactctttcgcatcagcatgaagactttggcgaaagcgaatggattacgtacaccggctccggctatttgttgcgtctggatgcgtggtcgtttccggtattacggcttaaacatctcggtctgtcgaaagcctgtcgtcgcctggtggtgacccttatgcgtcactactctgttggtattgttcaccttgatgcctttggtgaggtattgccgggctttgacattttcgactggtaa

SEQ ID NO: 146224 - DNA, 204 bp, Enterobacter cloacae
atgccggaattaaccaccgaagcggctctcaacattctgattggctggctgcaggacaacatcgattgtggcagcgaaattatcttcgataacgacgaagacaataccgattcagcagtgctgttaccctggattgaacgtacgcttcaggacgttcgcgatctccaccatcttcagcttttgcaacaggccagtacagattaa

SEQ ID NO: 146225 - DNA, 846 bp, Enterobacter cloacae
atgtcagaacttactctcaccggacccgaagtgttaaccggccacaccgacataatttgctccaccagcattgagcgcatcatcaccggacgtaatgccgcactggcgcagattgaagcgctcattcagcaactcgacgatatctcaatactgacccgcagtatcgggggaaaaaccgctctggactgggctatgaagcaggacttccgctgtggctgctggttgatagaaaaaagagaaacggcgatgaaagccattacacgcaatcttgatcgcggtatatggcgggatttaatgaaaaagtcgggcatgctttccatcatggacgcacaggcccgtgatcagtggtacaacagcctggaaaaggaggatattccggtggtcagcgaagcgaatatcctgagcacgtttgagcaactgcatctcaacaaaatagatgtcttcgaacgtggggtcatcaacgtcttcaaagggctatcgtgggattacaaaaccaatagtccctgcagctttggtaaaaagatcatcgtcaacaatctggtggcgcatagccgctggggctttagcttaaactggggctggcggcgggatcaattagcggacctggaacgaatgctgtttctgcttgatggtaaaccgatacccgacaaccgtggcgatgttactactcgattgatggagcatattcgggacaacccttcgaaggatatttacgaagatgatttcttcagtatccgttactttcagaagggaacagtacacatcacttttaaacggatcgacctgacagaaaagatgaatgatatcgtggcgaagcactatccggggatgctggcagcgagatga

SEQ ID NO: 146226 - DNA, 336 bp, Enterobacter cloacae
atgaccagcgcgcaggatcagaaactgcgagacgttctgcgccacgcccatcagcgccatgataatagccatccccagcgccgaacgcagcagcatgattttacgtcccttgcgatcggcaaggccgccccagaagggcgaggccatcgcggaaaagagaaacgtgatgctgaataccagaccggaccacatattgagcgcgctgtggcccgttacgccaagctgttcgacgtagagcggcaggaagggcatgaccaggctaaaggccgcgccggtaagaaaacagccaagccacgcaaccgcgaggttacgcttccagtttatgggggcatctga

SEQ ID NO: 146227 - DNA, 576 bp, Enterobacter cloacae
atgaatgcgctttcaggcataaaaaagcccgtcatgggaggcgggcaaagactacacacagcaatggatgattcagggggattaatatccaagccagaccagaacagcctgagcgtcataggattgtgtatcgcccatttcagccaggaactcggcttcacaggcaccatgacgacgaacttcaataagcgcacggcttttagtgatggtttcaccttcggcggattcgtaataagtcatgttcattgtcctctcagtggattagtaaaaggcccgaagcctttgattaattcactgcacgccccatcatcggggcgtttcaacttgcgtgacttatcagctcgtcgcggtgtggtcctctacgcttaccgtacgcatacggactcggcgcttacctcgatcccatcgggtgccatttcgttttgccaggagcacagcggcttacctgtcacgcggttctgtttgttaaagagcaatcacttcttgcgcttaaatctacaatttgagttgtattgtgtaaaccacaaatgtggtatttatgggtgtgaaaataccacgttattgatatttaaatga

SEQ ID NO: 146228 - DNA, 204 bp, Enterobacter cloacae
atggccgtaactaaaacgcataccggaacggttattacccgcaccggtgaaaagcaggtgcaactgcatcaaaacccgacaacgtgggtggctggcccaaaagagtattactacaaagatacaggccgccgcggcggtgcagtcggtgtccgtactcgtctggtgctaagcagcatccgtccgatcactaaaactgaggactga

SEQ ID NO: 146229 - DNA, 372 bp, Enterobacter cloacae
atggttatttgcgactactgcgggaataaagctgcactggttaccggacgcaagatttacccccatcgacccgatctttttcctctgcggttctggcactgcgaaccatgtaaagcatgggtgggctgccataaaaatagtgatgctcagccactcggcaggcttgcgaatgcagaattgcgattagcaaaaagtgcagcccacagagattttgacccgctctggaaatcgggcgaaatgacgcgaaaacaagcttatcagtggcttagtaaccaattaggcatcccctctgaaagttgccatatcgggatgtttgatgttgcaacatgccagcgcgtccagaccgtttgcgcttcaatgaattgtttctga

SEQ ID NO: 146230 - DNA, 597 bp, Enterobacter cloacae
atgaaatcaaatgaaagtcttattttcggagttggaaagttagatgtgcatcctgtttttgtggatgggaagaaaataagagcatatagagtttggcatgggatgcttaagagatgttatggggagggggtctgttacaggcctagctatgaaggatgtgttgttgatgaagagtggcatctttttagcgaatttaaaaagttttacgacgcgaaatacattcctgggtgtgagcttgataaggatctccttttccccggtaacaaagtttattccagtaaaacatgcatctttatcccgcaggcgctcaatagctttgttacctcaaggggtgctcggaggggtgattatcccattggcgtttgcctaaaaaaaggctcaacaaaatttcaggccgatataaaggttaatggtaagaacaagcatttaggtatgttcgaagacccataccttgcccatctcgcttggttcaatgaaaaaatgagtcttgcgcatggctataagagtctctgcgatcagttgcatccacagctccacagagggcttatcaagaagattgagtctctcaaagtgagccaaccacactgccaaaattaa

SEQ ID NO: 146231 - DNA, 654 bp, Enterobacter cloacae
atgagcactattaccaaagaatggctgcagcagaaaattgccggcatggaagccacccgcgatgaaatcccgttcggactaggcgaagatggaaccaacacgctggcggctctgcgtatcgcgctggaatcgctcgaagcggaggctgtgtgcgttatcgaccagtccaatcttgattatctcaatgctggctctgatgcagacgtatggcctgtatccagaacagaaatgggtgatgtgcttctgtatcgcacctcccctccagcgccggtatctgtgcctgatttgctcgagcagtttgctgaatttatggcggcagaatctattaagtctggtgattatccagatgggtggcagagtaaggcttcaaacgctgctcatgaatacgcgcaaaacatccgcgccgccatgcttcagggtaccgatgacaactctccggtgattccggatggttgggtggcttgcagtgagaggatgcctgaggaaggcagcaaggttatagttttccgacctcgtgccagtgagtcaaatgacccgccagtaaaaacggcaacatacaagggtgggcgtgagtattatcacggattcgactgttattgcgagccaacccactggatgccactgccagcagcaccgcagcaggaggtgaagtga

SEQ ID NO: 146232 - DNA, 345 bp, Enterobacter cloacae
atgagcaacaaatacgaagatctgattaaaaacgccaggatgaatgccgactgcggtgagcacatgtcgcccgcggaagttacgaccctgcttaatgtggttgaaaccacattcgcggcgctggctggggaagtgtacgacctgaaacatcctggcacatacctgccatcgaaacgcgaaactcctgctacggacgccttcctggctgaagtgcgggccagtgcgcttgagtattatgcaaacctgttcaaggacactgtgaatatggacgtaaaacacaaccaggaatttcacaaaggaaccctctacgttgctgaccagtttcgcaaaggagcctcccaatga

SEQ ID NO: 146233 - DNA, 321 bp, Enterobacter cloacae
atgtttgctactgatatctcactgaaatatggcactcatcagccagagacgattctggaaacaatgccgattgaagaagcctccgaaatcatcaaggagaagcttcgtgatgaagtgcgctcagaactcgaaggcgagtatgaggatcggatttactatgcagaggaagaggcttccgaatgggagagtcgcgctgatgactacgaatcagacgctacgcaactggcgatggccataagggatgctctcgatgctgagagtcttgatgatgcaaaaatcatcctggaaagggtcaagcgtgaccttgataactatttctga

SEQ ID NO: 146234 - DNA, 129 bp, Enterobacter cloacae
atggtaaaccagcagcagatcagagaggcccaacggctcgcgtcgtttgcggtgctccatcgcaatgctccggcgtgggaagaagcaaagcgcctttacgccgtcgccatcgggaggactcttcactga

SEQ ID NO: 146235 - DNA, 198 bp, Enterobacter cloacae
atggaaactttattcgcactcgttctgaccgtggcaatgaccaacggtgattatcaggacgtcattctcggcgtttacgacagccagcaggaatgcagccaggcatctactgagcagaaagtaacagctgaatgctggccggtagaaagcattctccgcaacggcgagttcccggcgaaatccatcgcgcagcactaa

SEQ ID NO: 146236 - DNA, 846 bp, Enterobacter cloacae
atggcaaacgaattaacaatcacggctagcgcgctgcaggaaaaaggcatcgacgtcgctacctggagcgcgctgaagaacagtatctatcctggcgccaaagacgaatcggtaatgatggcgctcgattactgccgtgcccgccagttggatccactactgaagcctgtccacctcgtgccgatgagcgtcaaagactcgagaacaggtaaaagtgaatggcgcgacgtcgtcatgccgggcatcgggctttaccgcattcaggcagaccgttctggcgattatgccggtgcccgcgaaccagagttcgggcccgacgtaactcagacgcttactggtgtcgaggtgaccttccctcagtggtgcaaatacaccgtctacaagcgcatgcccagtggagagatcgtcgagttcagcgccaaagaatactggattgagaactatgccaccggcggccgcgacaccacggcgccgaacgcgatgtggaaaaagcgcccatacggacagctggcgaaatgcgcagaagcccaggcgttgcgtaaggcttggcctgaaattggacagcagcctaccgccgaagaaatggaaggcaaatcactggacgttgatatccgtgacgtcacgccgcgcagcacaacggaagcacttccaccagcagcaagcgaagaaacgcttcaggcgatcaccgatctcttaacgaccctggataaagattgggagcaagacttcctcccactctgcagcgacatcttcaagcgaccaattcttgaggcgtcagacctcactgaagaagaggcacagaaagggttcaacttccttcagaaaaaagctaaggcggcagcatga

SEQ ID NO: 146237 - DNA, 681 bp, Enterobacter cloacae
atgacacccgaaattatcctgtcccgtaccggcattgacgtaaccaccatccaacagggcgatgaggcgtggcaccggctgcgcctcggcgtcattactgcctctgaagtgcacaacgtcatttccaagccgcgctccggtaccaaatggacgggcatgaagatgtcctacttccacaccctactcgccgaggtatgcaccggcgtcgcgccagaggttaacgccaaggcgctggcctggggcaagcagtacgaggaagacgcccgcaccctctttgagttcaccactgacgtgaaagtcacggagtctccgatcttgttccgtgacgagagcatgcgcaccgcgtgctcccctgacggcctttgcagtaacaatttcggccttgagctgaaatgcccgttcacctcccgcgacttcatgaaattccgcctcggcggattcgaagccattaagtccgagtacatggcccaggtgcagtacagcatgtgggttaccggaaaagacgcctggttctttgccaactacgacccacgcatgaagcgcgaaggcattcatcatgtcgtcgttgagcgggatccgcagtacatgtccgacttcaacgaaatggtgccggagttcattgagaagatggacgaagcgctggcggagatcggcttcacgtttggcgagcaatggaggtaa

SEQ ID NO: 146238 - DNA, 942 bp, Enterobacter cloacae; identical to SEQ ID NO: 82324

SEQ ID NO: 146239 - DNA, 939 bp, Enterobacter cloacae
atgaaacgacaggacctaattgatgaaatttcagaacagctcaaatcattcagtacacatgaaaccccgcttgagggattagatacccccgacaaaatcacaacgctcgccgcacagatactcgacagcaagcgtcgcattgagtacgtcggagccattggcagaaataagatatccccgctacggggaaatccccactgtgatatctttgatccgctacgggctgcgtggttgcatgtttatgaagggaatgtagatgaggcgtgctggcttattttcctgtctacccactttggcaaacatcttaagtacggttggcagttgtgcgccgacatttacggtggcctcggtggcgatgtatggacctgggagaaagtggttgcggaagtggacacctttcacgcctggtatgagggctgctatcgccagatgctggcagacggtcagaaaagaaggtttgggaaccacagaaagtacgaatccctcagaccggactgcaagcgcccccttccacgcgtcatcagctcatatgtagcgtgggtaggaaacgcaggtagtcatgaagcgcggtttgctgaagccaaagccgcatccagtagtcaggaagagtactttgatattctttaccggagcatgaaggcggttttgtcatttgggcgggctggaaggttcgactttctgacgatgctcatcaagttcggcattattgatgccaagccggggacgctgtatctgaacggggcaacaggacctctggatggcgcaaaccttctgttttacggtgaagcgagaaatgcggccaattataaagtattggacgatcttctggcgaggctcagcgccttcatggacatggggcagcttgaaatgcaaattcttgaagatgctctttgcaactggcagaaatcaccctctcgccacgtttactttggaggatga

SEQ ID NO: 146240 - DNA, 1083 bp, Enterobacter cloacae; identical to SEQ ID NO: 82326

SEQ ID NO: 146241 - DNA, 174 bp, Enterobacter cloacae
atggtgacacccaataggccccaccggcagtttaacccagaagcgctaaatgatcgttgtgtaatggacataacttacatccgaacccacgaaggctcgctgtatcttgccgtggttgttgacctgttcttgcgtaaaattatcggctggtcagtgcaagccaacatggcataa

SEQ ID NO: 146242 - DNA, 192 bp, Enterobacter cloacae
atgagcggtcgtgggaacggtcacgaaaacgcagttgcaggaaattttttccaactactaaaatacgaacggaagaaaaagatatacggaacgtgggaagaagctcacagtgataattatgattacatcgaaaatttttattacaccaagtattggtatggttcgagagatcagatgctcctaacggaataa

SEQ ID NO: 146243 - DNA, 1785 bp, Enterobacter cloacae
atggcatttttaaaagagaataaacgtaaaatagtgacgtcatcgtttaccaatacagatatagcaattaatattagcttgcaggataaatctataactgatggtcatggaacggcaaattttgaacgtttactctataaaaattgtccagttcttcctatgtcaggaaagcgtacctttgttccaattgatcaaccagaaattatttatgcagatagacaattactagttgtacgtatttgtaatgcaatacacggtttagatgtaaccgatcgaactaaagtaaatgtttttaatgaaacaatccgtttttttaaaatgacagacgcagaaaacattaagaatattttctgcattgacacaatatcaatgtatataaaaaatcttgttagctcacataatcaaggaagtaaagggaaaacattatctggacgtcaaaattctattaaagctttattaaaatctctggattacgagttatataaaaaatgtgaaggcatctttttttcttttccgccagatacgcagagtgtatctccttatactgatgatgaagtcaaagaccttttttttgcattgcaagccatatataattgttatgctgcacatatagataatggtactaagccaaaagtatttcctctttatgatttaaaaaatctagatggtaagtataaatatataaatagaacatcgacagaaagaacagtttcatatcgaaacagtgatactgtatggatatctgacttagttaggacggcctattttataacgtgtttctatacaggtgcaaatgcgtcatcgctattaaaattaaaattatctgactttagcgataatatatttaaagatcttaatagaaaaacgtataaactgagaacaaaaaaaggaaggcagtcagggagagtgaatgaaattgatgttggctttacaaaggaggctagagttttctttgaaagttggatttgcattagtaaaaaaataaataatgataaagatggttttttgtatcctaacccctcagttaataatagagcatatatgactgatagcggtatgaatatcttgaataaaacatttgttgatcttggtttacctgcattgagtagtcaacgttttagaaagacaaaagcctcattaattatgagagcaacagagagtgtattctttgtttctcagggactcaataattctgttgaaacagtagcaaaacattatgcagatggtaaccctgtcaccacggaattctcactggcttccgcactatatatcagagagcagactgctctgggaaaaccgttagataaggccatcactgagagtgcattcctgtaccacgatccgcttaaagagagcgaagccagcaagaaatttaaaaagttgaccaatggcttaagatgcggtggtgcatttaaagataaggcaataaaagtaaaagaagtactggttaaaaatggcttggctgaacacaatgatgaggtggcttgtcataaatttcttgagtgttttggatgcaagcatcacgctattgtcgcagaggttgatgatatatggcttttactctcattcaacgatgtgattctggagtctgtcacaaggccagcgattaactcccgcccgtcaaacttactgaacaaagtgaataatactattcaggtcattatagaacgaatgaaaagggagaacactgcggtatacaacgaagcctatgataaatacttggatggaatgcatcctctttggcaggatgccaatgatttagaattaattctgggtatttactga

SEQ ID NO: 146244 - DNA, 1875 bp, Enterobacter cloacae
atgaaagaaattctgaaatttattgatagtaataatatttatgatgatctgatcgtttcttttgacactgaaggcaatccatatagctactatggttctgataagtggtacttatggtcattaggctttaacgtttctttctccagattatctggtacgttcaagtcgacagtaaaatacttggttcacaaggtgatatcaaattatagcttaaagtcaaaaaaaagtgccattaaaaatatcattgagggtgctgttatttttgaaaagtgcatcactggatgtaatggagtatcatatgactttattgatgatgatgagggttttaggcggttattagttgaagccaaaagtaaaaacttaaaatttaaaacatggaagaataatcttgtttttttatctcatttgcataatgcagaagtaataaccagagagataaagagctacgaagaactagcattatatttatctgtgagtggtgcatcagtctcacaagcagtatgcattccagaatctattgcgtctaaatattatggtgaggcactgagcattattgaaacttattatccttatagaaatgaaatatcttcatgctatgatgattatgtgtctgagtatttagaatcatcaaaacgctataagtctaatatttctgcaagaagatacgcacttaagaatgttaaaaagctaccaaaaaatattgatattcaatttgactatagcggctcatggttatcctggctccgtggagcctgttataccgtgattgcggcatttactggctgtcgggatggtgagataaagtcttttgatattgattcctatcaagagaagaaatatgcaggtatgacagttcctgttttgcatggtcttgataccaaacctaatgcaggaggggtagcacgacacacctcatgggtgacgataccgagtgttaaaaaagctatcttactgctttgggatgcatttagctttgcgcgtgaaaagtggagagctaaagcggattcaatagtacatcctgatgaaagaaatgcttttcttgaaaaggtagacagcttatttgttacgcttccctatatgcgaggacatcgacctgaggctggaaaacaatcattagcccattctcttaacaccttcgttaaatccattggatatcgtgctacaaaggatgatgttcaagagttcgactcattaaatccctcaagaaaaggtgagcttaaaattggacaaatgttgaaggttcatccccatgcatttcgtaggacatttgctgtttatctggtgcgtaataagttggcttctctgctcgatattaagtatcaatttaagcatatgaatatagccatgacatcttggtatgccaatcaggcaaatatcgcttcttatgttgatatgatgattgataaagatctacaggatgaaatttcgggtgaaaaccagaactatatgacagatgttttttaccatatttataatgaagctgaaacattagctggtcatgaagggaaaagaattaaaaaccttagatctgagggtgatacgcgtatctacttaaatcgagaagaaattcgtaagcaagttcaggatggtcggctttcgatagttgaacaccctggaggatactgcactaacccagattgtgaccgaatttgtgatatgacgacttgccagtataaaattgtcacaaaatacaaggcaaaaacactcgttaatatcagagaaaagttaattataaaatataatgatattgaatctcttggactggatatgccgaatgttacctcgaaattattttacgaaatcagggcaattgagcaggttttatcagagcatcatcttgagtatgttgcttttaataaaaaggatacctattga

SEQ ID NO: 146245 - DNA, 474 bp, Enterobacter cloacae
atgaaccaaaggatcttatttagcagtagtaaaaaatttcgccatattctgagccagcttaaaaatcataaaatactacgtagtgaattgattaatatagcaattattgaatttcagctcactaataaacaggctgtagggctgattgatcgtggtatttatcagctaaagcagcaaggccttgtaaaggcgaatgggaagctcaaaaatattagttaccagttttcctttggtgtgataaaccatccattacttcatgtcgttaatgatgcaacgcttgtgctctcttctgaaaagaaaaaattagaaaaagaattggcgcagatccgctacgagctggaggcctatgaagagtttttggaaaaaataccgaaactgaagcttaaaataatgagattacaacaagataacgctgataagttaaatcagttaaatggcaagctacgagcaattaaccagctattatctctttaa

SEQ ID NO: 146246 - DNA, 432 bp, Enterobacter cloacae
atgatgatctcatatcaggaacttgttcgcaccttccttagactgttcatccagattattaaagaggcaaacgagttctgcactcagctcatcctcacaaaaaaagtaactcagcgggacaccaagctctctagccagttttttcagcatatctatatctgggatatgccgccccttttcgtaatgattcatacgtccgctagccgaaccttcatccataccagctctgatccccaagtccttttgggacaaaccggctttttttctggcctgcctgagtcgttctgggaaggggttattctgcaaagtcttttcatcatctggcgtctcggatgcttagattgtctaagtttctctcactcctgtatacttagcaatcctaagtttttggcctgtgagttttaccgatatgaaccaaaggatcttatttag

SEQ ID NO: 146247 - DNA, 1665 bp, Enterobacter cloacae
atggtcattatgaaaggcctctataaacgtaaagacaagtcccaattctatggtgttcgcagggtcatccccgcgaggctccgtcatctcatgggcgacaaagtagagctgaaagaatctcttggcacagccgactataacgaagcgctgtcaaaagctccggctgtatggttaagattcgaaaatgccattgctaaagccgaaaggcagctaaaagctgaactgtcattcaccgataaagatatcgagtcaatcgccaacctgtggacatcccatgtcatgccgcaggaggacctcatcaaagagcgatatctgattgacgattacgagtatggactgatccgaagccccggcatcgagcggatttgcgacatactggaagaacttgatagacaggaatccagcgaacaagccgggcacgtgaatgatgaagccctaagcaagttgatggctcttgagcttcaggaagcacaggaatggagcagcatcgaattgccgccattctggcgtaaccgccttgcccggcgactggctgaacgcagcaatgatttaacgaatgtgttcattttcagcctttaccccaaacgactcgcagaggccaaagggctaagttcgctaccagaagcaaaagcgccccaaaaaaccttcacccaattatttgaggcatacaaagagttcaaatgcccttccgatgctgaaaccatagataaaaaagctctggcacacgtcaaagattacgcagcagcagcggaccgctttgttgagataaacggcaatcctaaacttgacgacattaccgccgatcatattgttaaatttcgggatactttggcgaagtacccgaaaaatctgaccaagaaagaacgagcgttaacattgagccagaagctggccctacagaacaaagggcatctgacaccagaccgggtcagaaacatgctcaatcacctgtcgtcattcttcgaacacgctatatacgttaactggcttaaacacaatgtcgtgcgggatgtacgtaaacctgcccgcacagcccgcgacaatagcgataaaccttttacttcgcaggaactgaccctgatattttccggtcctgtattctccggacaggcagcaccttacgaagatatggattactgggttcccatcatcctttactacacaggttgtcgcgttgaagaagtggcccagctacacaagcgtgatattcagcatcgcgatggcgttttatgtatgaaattacaggaaaacgaaacgcagtccatcaagacaggcaagacacgctatgtcccagtaccgttgcatgttctagagctgggcttctctgagttcgtcagccgcaggaatggctttctgttttccgacaaagcccttgctgagcaaaagtactcaaccaatttcgctaaacgatttagccgttacatcagaaacaacggcattgagcgtgacgaaatatcaccaacgcacagtttccgccataccttcatcacgaactgccgaagagccggaattgcgatggacattcgcgatagcatcacaggccacatcagcccacagcaaaatgaaagcggtaattatggtgacaagccagtagaaacgaagctggcagctatcgagagtatcccaaagttaaatcttcaccgaatcaaggactggagccgctaa

SEQ ID NO: 146248 - DNA, 936 bp, Enterobacter cloacae
atgctaaaaattccagataatgactggcggatagttggcgggggccccaaaatttccgttgctttcttgcggaaagtgacgcctcaggcagccagatttactcaatgggtacagcggacacatgccagattgctcaaggctcccgaggatgtcctgtcgtgctgcacatccggccttattgatggtgaaattcccgacaaaaacggctggctttccgctggagatgcccttgcaatgctgacttacagcgttcatcccagccagaacgtgcctctcattgatgcgattgagcaaaaatcaggtctgacactgccagtgaggcccggtgaaagccgtcttgaggggcaatttgctgtcaaattacgcgatttgatagtcgaactaaaggaacagccgcatttcgtccactatgagcttatacagcaaaagcaaattgaccgttatcgggtggatttcttcctcaccgagcagtggtacaccgatatggcaaaaggaaaaaccgctaaacgccagttcattattgaatttgacgaggaagcccaccggacgacgcgttatcagctcaatgataaacggcgggatcggtggctgcggaaaaatctacccgacgtaaagctaatcagggtcagacacgaagagatggaagtatggctggaggctgtccgccagctaaagcgcttcgtcagtattgaggattgctatgcccactgcctgcgaatggcctgtatcagcctttctaaatcaacgctaaggataagcagcgagtcagcccgaaaagcctatgatgcagcccataacgaatgcagtttcctgctacaaagcccacggcagcctctacgtgagatgggtaaactgctggacaggctgacaatcccctttgataaacgcagggacatatacttccaacgtgcaaaattgagttcatacagcatttaa

SEQ ID NO: 146249 - DNA, 552 bp, Enterobacter cloacae
atggcaacaatcggctacgcccgcgtgtccaccaccgggcaaagtctggatacacagctcgaagccttgtccggttgcgagaagatattcagggaaaaaatcagtggggcgaaagatgaccgtccagagctacaggcaatgctcgagtttgttcgtgaaggtgacacagtacaggtaacgaaactggaccgtcttgcacgtaacacccgccatttgttggagatatcggaataccttcaagctaaaggcgtggcgttgaatattctcaacatcggcatcaatacggccacaccaaccggaaagctcatgctgaccatgattggggctattgctacgttcgaacgtgaaatgatgctggaacgtcaggccgagggaatagcactggcgaaaatcaaaggaaagtacaaaggcagaaaggctacggctcgcagcaaatctcaggaagttatcgagatgctggatcaagggctaagcaaacccgaaatatcccgtcagctaggaatcggtatcactagcatttaccggattgtgcgtaatcaatctgacaactaa

SEQ ID NO: 146250 - DNA, 555 bp, Enterobacter cloacae
atgcttattggctatgtacgtgtatcaacaaatgaccagaacacagcattacagcgtaatgcgctggaatgtgcaggatgtgagctgatttttgaagacaagataagcggcagaacctcagacagacctggacttaaacgagtactcagaacgctatctgaaggtgacaccctcgtggtctggaagcttgatcgcctcggacgcagcatgcgtcatctggttggactggtggaagaactacgcgagcgaggtatcaactttaaaagtctgactgacagcatagatacttcatcgccaatggggcgcttcttctttcatgttatgggggcattggccgagatggaacgtgaactgattgttgaacgtacacgtgcaggtttggctgctgcgcgagctgaggggcgcgtgggaggtcgaagacctaagttaacacctgaacagtgggcgcaggttggaagattgttagcggctggcgaaactcgtcagagggttgccctaatttatgacgtcggaatctcaaccctgtacaaacgattcccagcatctgacatataa

SEQ ID NO: 146251 - DNA, 144 bp, Enterobacter cloacae
atgcaacgcctcgtcgacatcgcgcccgcgcaaatcccgcagatctggtcgctgttaagccagatccccgatccggaagtgccggttgccgcgcgccaatcaaaacgcgacacattgacaactaacattggatcgcgtttgtga

SEQ ID NO: 146252 - DNA, 426 bp, Enterobacter cloacae
atgaacaaatatttatattcagaaggtgcattttacccctacatcgaaaaagcattgtatgaacaagccggtagttggcccgacgcaggggtagaggtagatgaacccgtccgtaacctgttttttgtttatcctgaaggtaaaacactcggtgctgatgataatggttacccggtttgggtcgatgtaccaccacctactcatgaggaagctgtgcagcaggccgaagagaaaaagcagcaactcattgatgaggcaaatgacttcatgaacaggaagcagtggcctggtaaagcagcgattggacgcctgaaaggggatgaattggcacagtatggtctttgcctggattatcttgatgcgctggaggcggtcgacacttccacggctccggtgattgattggccggaaaagccatcggcatag

SEQ ID NO: 146253 - DNA, 948 bp, Enterobacter cloacae
atgacacaagccaatgatgttctgtccaaacagatcagtgaattagcatacaagggccaatgggagcccctgttaaacgtactagaaagatacccctctctcatcaatgctgcctcggaaaaaggctatacacctttgcatcaggcggcgtggcatggtgctaaacgtcaggttattggcaaacttctcaggatgggggctgacaaaactctcgcaacgtataacaagctgcagacccccttagatattgctctcgaaaaaaatccgtcccgaaaagatctcctttatttgctgcaccctcaacccagaacactttcacagttgatgcgaaaaatgattgaggaccagcttattcattttcaaacttatgatgaaaatatggtgctttatgagcgactacttttcttattcaatgaatatgatgtatttgagcaggggcaagacgatagaaatcgattcctgtttgcattttctgcgctgacaggtattcagttaggtgaaattattgctgataataatcaagaagtacaaagggctgggttggatttaagattttggttcaatcaatttatgcctgttctccagaagcttgcggcacaaaaatacactatcccactggagaaaagctggatcaccgttgctgacttaatgtttcccgatgcggaaggctggggctatcgaggtgatccttcactgtggcgggaaatgcgccagactttgtcgcgagttcccgttcccgaaaaccgaactgagctcgaatcgattttactcaactcagcccagtctataatgaatgcgaccttttcaaccgagcatggggtgtttgtaaagcgctttagccacggtggaatgagtagtggctggatatcgtttgaattctggaccacaaatgcaattccgggcattttacaacgtgctgaatggcttagagagtcatggcgatattag

SEQ ID NO: 146254 - DNA, 3240 bp, Enterobacter cloacae
gtgttcaaaaaattgttaggtaaatttattaatgataataaagcagttcctgcttcacttgtgccgctttatgcaattaaggcggagggcttcgctttcccctttagtcttgccgacactcaggataactggcttatcacttcatgcctggaacaactccatgaagaggattatgtatcacactggtcggattgctggtttatcagttgggatgacttctatcgtattctgaataatgaagattatgccagcagtctggcaattttcagcttccctcaacagcgtaatctgaccgcccatcttgctgcgacagggagcatcagcgatgacacctttcgagttttcattgataaatggacccagcctgacgattatcgccccgttgagatcactatccagggggccagcttttcctcccaggaaggcacttttgtgctcagcgaagagaactggcagcttctggactcactacagcagctcagattacagcagcgacagacgtcgggtgaaacggtaaaccaaaccgggtgggcaaaaatacgtcgacaggcaaaaaaggcaggagcaaaactggatgattacctgtctaaaacgatagttatcaggcccgagtcactgcagttaaagttgcggaaatcactggtggcggatacccgggtactggaaattgagccggtttttgacgagcagcctgcaaagtggctgcagagtttcgatcgcacgcaacaggtacaagatcggtatcgcattttgggtgatgacggtgaattaagccacgtcattctttcacctgaagtcaaagatgtgcttacctctgttcatgccatcaccggtcgccgagttgccggtgatgatgcgctctcgtttgttcgcaacccgtacacctggattggcgaagaagccagccaggttcttgatcccgatgtatatgagcagaatctacaggatgcagggatctacttttatgattttcgtctggagcctcagtttgatgactcaatgcatattgagtctgtctcgctgatcctgagccccaggactgaacagcccgtgccagatgaaacatacgtgtttaaccgaccaattgaattggcagcgttgattactgagctggaacaaaagttagcggcgcatcttcctgctggtgtctggcagggctatgacctcgagctgtccagattcactcagaatgaattgcaagagtatcaggcattgctggaaggctggcagcaacaggctgcgggattgaatttttctcacgtactcgatctcaacaagtacagcgatagggtcatagggataggtgagtttgagaaaatcagttcaccgtatctggtcaaaagtgaaagtgaaaattggcttccagacaatctcgctaaggagatgtgtgaagtcatgttctcgggctgggacctggataatcatcagcattttcaggagctagaaacgcgtctggaagatgcaaaagcctctgatgctccagaagtcgctatgccctggaacgataaccttctaccacgagaagaagcagaggttttccacgaaaagtggaaaaagaaaatcgatgccgaaacaaaagataccgcgaatgctgagccggtaagtcgggctgtcctgctgatcgaacaaaatattgagcaggcactgtatgtcaaacagcggagaacctccttgctggaagcacatttggctgacgccgagcttccgatgattctcaaggactctattcagctacgtgagcatcagtgtaaaggcgttgcctggctccagcagttgtaccttaaatccccaaccgagacggcgggatgtttactggcagacgatatggggctggggaaaacgttacagattttaaccttcctcatttggcatcgtgagcgtttcccggatgctcctccctctctgattgttgctccggtgtcgttactcgacaactgggagcgtgaagtcggtaattttttcctgcgcgagcaggtgtcgattttaaagctttacggcaatgaactcagagagaaaaagtgcgctaaggagagtatccctttggcgttaaagaataaggggattaaaaacctgctgcaaaatgactgggttggagaggctcagatagtattgaccacatacgaaacgttacgcgatcaggaattttctttggctcgccaaccttggtccatcatggtttgcgatgaggcacagaaaattaaaaatccagcagccctaattacccagtctgctaaggcaattcaggcgcaattcaaagttgcgtgtactggaacacctgttgaaaatacgcttgtcgatctatggtgcttgtttgactttgtgcagccaggtcttttgggagcactgaataattttggcaaagatttcctgcggccgatcgagcagcagagtgatgataagatgcttgaatcgctacgaaaattgattgaaccccagactctgcgtcgaacaaaggaagaagtggcgaaagatcttccggaaaaaattgaagataaatcctgtaagcagctcagtatgctgccgttgcaacgggacctctacactcactcggtagtgagctggcagaatcaacaggaaatcagcgaaggtcttgatcaacgtggttcaggtatgctcggactactccaccgcctgaaactgatttgtgcatggccttattccgtgagtgctgatttacgcttacgtaacgatgccccgaaagtgaaatggcttttgaatacattaaataatattcgccagtcatcagatgataaggtcattgtctttactgaactgcgcgatattcaacgtgaattgcagcatctggtctcgcagcattttggattcaagccttttatcattaatggtgataccagcacgaaatccggaagtgaccaaaaccgtcagagcttgattgataactttcagtcatcgccggggtttaacgtcatcatcctgtcaacgatagccgttgggtttggtgtcaatgtacaaaaagcaaatcatgtcatccattttactcgctgttggaaccctgccaaagaagatcaggcaactgaccgggcttaccgcatagggcagcaaaaagatgtctacgtttactatccaactgtgcgtgatagtcagttaatgactttcgaagagaccctggatgaattactgaaccgtcgcagagctctggcaagagatatgctcaaagcttcaaccgatctcactgctgctgattttgaagcggtacttacccgggctaacactaattaa

SEQ ID NO: 146255 - DNA, 1794 bp, Enterobacter cloacae
atgacgtccgcgattgagaagctgaaatcacaccttcttccttaccgagaaaagagtgcggttccggttgtgggtcacccgtttacctatctacagcgtgtcatcagccaactcgaaaagaaggtagatgctcgcgcagtccagatggttccccctaaggagaaacgcagacaggcaatttcccgattgcgttcgggagaaacgccacagccatctgaatggaagatgatcttttttggcctcaatgacgttgcagaagatgatctgtttgatacagcactcattgatgatgcggcaaactttgccaaaatctcggctgaaattcagagcaaaattgcacagaaacgattaacgcgtagggaatggctggcgttatgtaccagctactttgggcatgtcagcgatacgcccgaagaaaatccgcagtggcttcagttacgcatgcagattgtgagcgggtttaaacagttaaaagagagttcgcctcgtctgttgtcatggatgacggtaatcgacacgtatggggatatttttaccgataaggcgggttttcttctcgggcaacagctcgggcgtggggaaataaccgatatctccgtgctggaaaaagtggcacagatcccccagaccagttggctatggcgcaaaattgttaaccatctggtgagcgagatttttcgtcagactgacgatgagtttgaacaaaaaattaatgaactgatcgcgttgagccgtcaactttctcgttttaaagataatatcctggccgctacacttacccgttattaccagtcaatttttaaacaccggactcaccttgaacttaagctgttagccctggagtattggggaaaccctcagttaaccagccgcaataaaggctggcaggttcatgtcgataacgcggtgctgcttatggtacaggggtggttcgctaaagatgatctgaaactgttctttgagttgcttaaaggtaaccgggatgtcgatcaggcgcgtctgttctactggctacgatatgctaatcagatgagttatacgcgaattgtgttgggtgaagatgctcagcgttcgaaagataccgattatgttgagtttcgggcaaaaaatgccggtcggttaagtcgtctacaaggtcccggttctcgcgacaacaatgccatgatcatgaggattgggaattatctttttgtcgagttttcgaaagtaggagccatgtactcttatcatatcgataatgcaccttttaatccggaaacaggtattctcgacattgattatgatcttaaagataagcgtaataaccggcgtaaagtacgtctgcgtttaccgcatttgtctccagtaacgcactattcgcttaaccgtattgaagggtggatgagccgctatgatgaagaacttcgtagactaggcattagctacgttgcggaagattccaatcagccatcagccactatcgatatctcccgttttaatgcagatcaaagcggaggcaggtccgtatcttctccggctaaatcagaagtcaatgaatcaaggtcaaacagagaagagcagatcaaaattattgcagcttctttaaaagccaaaaaagaagaccaaaattttacgactcgagaacagcaaatcagggaagtgattcggtctgtcgattgtaaagtgatggataaacgtggcatgggtggcgcaattcatatccagttcaacgaaccagatcatgaggctgccaaaaaattgttaagcctcggatttaagcctgtgctgggtaaatttacttactggagcaaatag

SEQ ID NO: 146256 - DNA, 738 bp, Enterobacter cloacae
atgtttaaccgggcattcaatggcaggcagcgtcgtagtgatgaagcagaaaaaccgttctggatttcctatgccgacctgatgacagccatgatggtgctatttttggtcgtcatggtggcatcgcttagctccgtcacgcagaggatccagcaggcagaagcaggcgaaaagtcccgtgggcatgatatcgcccgactgtgtgaaaaacttgaacttcaggcaaagaacctgaataaaacgatacatgtcgattgccacgataatcgtattagttttggcgaagcagggcgttttgagcataaccgcttttcgctcaccccagaagggcagcaggctctacaggatgtggtgccgctggtcctggatgcggcaaatagcgacgaaggtaagaaatggtttaaacagatcgttattgaggggtttactgacacggacggttcgtatctctacaacttgcatctctctcttcagcgctcggaatgggtgatgtgcagtctgctggatagcagaagtgcgttacagcaaagaattactgcagatcaacaaatacagattcgaaaattatttttggcgggtggcgtgtcgttcaacaatgcgaaagagagtaaagaagccagccgtcgtgtcgagttacgtatgcagttctttggcctgaaagataaaaaacaggacgagagtatggacgtcgtccctggtattagtcaggaaacctgccaactgggtgtagtgcaatga

SEQ ID NO: 146257 - DNA, 2556 bp, Enterobacter cloacae
atgttttcgctgacctcgttcctcgacacgttaacctctgttaatccagaaaatgtgccgaaatatgtcgctcttgttgtcgcggttctgttggtgtgcttcattgcccgctatgccattccttcttttgtgatttcagcccgctttaagaagaaagcgaaagaaattcaactgattgcaaaagataaaccggctcagcaactcgaaaagctggatgctttattttccggaaagttttttgcgcatccctggagtgaatttaaagagtcgctgcatcggcagtttgagttagacgatgacagcggtcagaagcggatccacagtattcgttctaccgctcctgcttcagcctggttctctgaacccttgctggtagagattccactctacacggaagcgtttaagcatttgcccggtatcctgactgggattgggataatcgggaccttctcaggactgatgatcggtttgcaccactttgaccccagcacgccagaacaagttagcgccagcgtagctaaccttttgcgtgatgtcctttacgcgtttttaggttccgcctttgccattgctttctccatcctggtcaccatgtttgaaaaatggcggctggcgagatgctataaaaatcttgagtcgttgacagccagcatcgaccagctttttgaaggtggcgtcggtgaagattacctttcgcagctcctatccagcaccaaagaaaacaccacacatgccaaacaactgaaagatggtctggtcagcgatttaagagagatgctgcagaacctggtggacagccaggtacgagaaaatcagaaactggcagagacgttgtcttccacctatcgggaatcaggccagcagattgcggagcaggttagcggcgctattgaaaccagtctgaaaagcccgttggacaaaattgcgggcgtggtgcaaaccgcctccggcgatcagagccatcgagtgcagtcgatgcttgagaacgtccttactgcttttatgaacaaaatggataacacgtttggtcagcagttcaccacgatgcaggagatgatgggccgttccgtggaggcgatccagagcatgcaaagcggtttctctaccctgctgcaggatatgcgtcaggctggggatgattcacgccagggcagcgcccaactgatctctcagttactcagcgaaatgaaaagcggccagcaagagatgcaggcaggtatgaatgacatgctgcgtagcctgcaggagtctgtagctcgcattggcgcagaaggtgaaggcgctggcgaacgcatggcccaacagctggaaaaaatctttgccgacagtgaagcgcgtgaaaaagcgatggcggaacagatgcgtgcctttattgaagccatccagtccagtgttcagcagggacaaaatgaaaccatggagaaaatggctgcctctgtggatacacttggcagccatatggcaaccttgttcgcacagctggaaaatggccagcagcagctcaatcagcagcaaaaccaggcgcaaaatctgttgatgagcaatatgagcaaaggtgttgaagatctgacgcaaaacctggccggtgtattcagtcaacttgagtccggacaaaaacagatgagccagactcaggaagagggacagcgcgctctgcacgaagagactcaacagctcttagcccgtagcgaagctcgtgaacaggcggccgccgaacaacagcaagattttatggctgctctgcaacaaactatgcactccggtcaggatgccctgcgtgagaaaatgaccagcggcatcgatcaattgggtagccaattgggaactctgtttgggcaactggaggaaggtcagaaatcccttagccagcagcagcaatcggctcagagtgctttgcaacaggaggctcagcgaatcatcggtcagcttgagagccaggttcaggcgttaatgcagatgctgcgtgagcagcaatccgcatcaggcgatttactgcaacgggtggcgcaaaacacaacgcgtcacctggaagaaattcagactggagccgataaaatgcgggtggctgccgatcgctttgaaacagctggtaatcgtgtcgccgaagctaatcatctgactgcagaagttctgaatggtacccagcaagcaggcaaaaccctttccagtgccagctctgagctgggcgcattgatcgccgattaccgcaacacccgtgaggtggtggcgaacgccatcagcgcattagaaacgctgatcaatagcagccatgatgagcaaacatcccgcagccggtttgttgaggatctgaagtcgtattccgagcgtctgcaacaatataaccgtgaagcccaggagttcctccacaacgttgctgacgtgatgggcaccagctttgagtccttcacctccggggtggaaagcggcctgaaccgttcgctccaggagatggatacgcaactgacaaaagcggcgggtgccttaagttcttctgttgaaatcatcggtgaaagcgtggatacgctggaaaccgtgctccgtagtcgtcgcgcgtaa

SEQ ID NO: 146258 - DNA, 1167 bp, Enterobacter cloacae
atggtgccgaagcttagatttgcggggttcaatgagccatggagtgaaacctcgctcggtaaaatatcttcatttattaccagcggttctcgtgattgggcacagtactatgctgacggcggagataaatttattcgcatgacaaatctcgtaagagatggaattacattaaacttgtcagatttaaaatttgttcgtttgcctgaaaattcgaatgaaggtaaacgcacagccttacagcatcatgatattttgatttctattaccgcggaactgggtaaactgggatgggttccagatgatttgggaactgcgtatattaatcaacatactgctttagttagacctaatttatctatagtttcgtccaagttcatcgcaaatcttttgtcgacgaaaaaatataataatatattaaatcagcagaatgattctggagctaagtctgggcttaatttaagcacaattaaaaattttggattttatgcaaccaataaaatagaacaaaccaaaatcgccgattttttgtcctctgttgacgaaaaaatcgtgctactgagcaagcagcacgacctgctgtgtcggtacaaaaaagggatgatgcagaagattttcagtcaggaattgcggtttaaggatgaatgcggcgaagatttcccagtatggcatcataaaaacctaggtgatatctgtagaataagaactggaaaactagatgctaatgcaatggttgttggtggaaaatatagattttatacatgcgcgagagaattttatcaaattgatgagtatgcatttgacactgaagccctattaatatcaggtaacggtgcgaatgttgggtacatacattattactcaggaaagtttaatgcttaccagagaacgtatgtactggacggtttcattcataatattgagtatgtgaaatattttcttgatatgtatttgaatgaaagaatttatggggaaaagaaagaaggaaataccccttatatcgttatggggactttggctgatatgcagatcaaattgccaatcattaaagaacaaaccaaaatcgccaacttcctctcctctctcgacgataaaattaccgtcaaaaaagcagaactggacaagctaataacctggaagcatggcctgctccagcaaatgtttgtataa

SEQ ID NO: 146259 - DNA, 1443 bp, Enterobacter cloacae
atgtcggtggtggtagcaagttgtaatttagcccagctgttatctggcgaggtgattacaccaacggaaggagaactaattacagggagcttagctattccagaataccagcgcccctattgttggggagagtcacaactggataagttgtggaaagactatcttcattataaaaaaaatcatcaagagaatgcctggtatcttggcagtctaatactgcataaagatccttccggaatattaaatattattgatggccagcaacgactaacctcattaacactgattaatgcgatattgaacccccaccaaatatcaaaatatgtaaataatgtaccctaccattctccacagtctcagcatcaaatccgaagcaattttcaatggttgctgaaaactcttaaacagtcatcagagccaacattttcagccactgacgtaaactttactctggtagtgactgattcagaagatgaggcatatcgattttttgagacgcagaataccggaggggttcgtcttacaggctctgatattataaaagcacatcatttacgtagtattgaacgccaacaacaaaatcattacgcccggcgctgggaaatattgggagatctcaaccctataattaactccttacttcggggaaggttttgtaatacgttgcgcaagcgtgatgtaccaagccatcgaaaacctttgcttgtgcgaagtgcggtagtaacagaatttggtgaaatgacaactataggaccagatattgcatatggacgctctgtaagtcatcgaacaaataagcaaagccagggccgccatttagttgaacaaacactagaaggttatgaattacggcaacccctcaatacagggattaatactattcactacctagcctactttcaggggattcaaaaccattttatgtctcctgagatggatccagaacttgccattacaccagagcatcaaaatttccttcaatgctaccaggaactaattatacctctcgaaggctgccaatacttaaaagagttgcttgatactgccttaatgttatacatcagccaatttggcgaaaaaaatttaaccacggcattaaagaaattatttatggtgatatattcaccacgggtgaccaatgaaaaaacagttaaagagtcaacattaaacacattattagatagggcccctgtactggactggattgctactagctatacccctgaaatgtgttttcaatggttgaataactatactttcgacattgacattgacattaagaatataggacctgatgataatagtgtcaaaaaacgatttatttaccaagtgttgcgttactttgatattaaagtaagtcatgacgcccccgcacaatcattggctaatgaatatcaatatactctgcaaaataaaataataaacttgtcacatcaggattga

SEQ ID NO: 146260 - DNA, 1944 bp, Enterobacter cloacae
atgacaaatctacaaaaagttaactctgaattgatgacattacaaaatatagcagacaagaattatcagtttgttatccctagctatcaacgaccgtatgtctggccagacagcgatgtactcaaactatttgaggatattgagaaagcctggcaagcaaaggagcggttatactttattggcactatattgaccgccgagcaaaaccccacagaaaacacccgaatccttgagttaattgatgggcagcaaagaaccaccacactggtactaattgctttggcatttcgtaaggctggtatcaaaactccgttaagcaatatagccgtactcggcaaacaaccacgcctgcagtttactatccgataccaggttcagaaccttttagggggacttgctggtttagaacagtatcaactcccttcagctaacgatataaagaatgatccctatctaactcatttagatgcagcattatctgttcttataaaaaaagtcgatgcattaaaacttcaagcaagtgaatttgctgattatatattcaaaaatgttcaatgggttaataactgcgtccctcggacaatggatttaaatctccttttttcgacaatgaacacggcgggtgttcagttggaagcatctgatattttaaaatcacggcttttaaaaaaaataaaatctaacaaaagtttttatgatgctatctggcaaacctgccagcacctggaaaatttttttgagagaaacgccaggcagactttcactgaagctgactgggattccatcacggatgaacaattggcagtcgtacccgctttgctacacgtatatgcaaaagaagaaactcactcagttgtagggatgaatattagcgaactattttctcaggtccatgaagagttcaaaacagaaaaacaggaattagctcttcaaaacaaagatggtgtgtactgccgttcaataatttcttttccactattgctgatccatgtctatcgaattcaccttgccagacatggacaacccgatatctctacccgactacataccgataagctgctagaaattttcactcatctctgctctgccgaagaacaagaaattaagagcttttttgagttgttgtggaaaactcgttatcagttcgaccgctgggtcgtcaagtggatggagcaagataaggaaaatgaagaacttcgcctaacatatgtatcacgtagccgctccggaaatcattggtatatcaatcgttctcagaaagagatcaatgcattaactctcttacagagtgtacgcctgtttactggtgagcgtagtgcgcaatactggctaactcccttcctcgggaggctattagaacaaccctgtgataacgaacaacaggttctagcccttttagaaaagattgacaacgagttgtctatggccgctgataatgaaacgcagaaaagtgtaagttttaaacaggcaaaattggaaagtgtgtcactgaaaaaatgggcagaaattcggatgtatttttctgaaaatcatggcacacgttttgaacattattggttccaaaagctagagtttcttctttggaaatcatatcaacccgagtggaaagataatcccaggtttaaaaaataccgtattactgcaaaaaattcggttgagcatgtttatccgcagcaagaagagtaccagcgctatttagataaagagatcctggatagctttggaaatcttgtgcttttaagccctggtgaaaattctgcttacagtaaccaagcagtcggtaagaaaaaaatcgattttgatgctaagccagtgtttgattcactgaagctcaaagcaatttttgagactcgccaggccgctgatgaagcatggggaaaagaacaaatatctcaacaccagcaagagatgttaaaggtgctagatgcacattatatcgagtag

SEQ ID NO: 146261 - DNA, 2208 bp, Enterobacter cloacae
atggattttcctgactatacttgcacaaattcgccatcaataccgctcaatttagaacagagtaaggcgctcacagcgatcaatgaatggttctgtgatagcacctgtccggtctttgcccttacaggcgcatacagcacaggaaaaagtaaagtgctgcaggcgctactgaagcaaatgccaaaaactataactactcagcgttatttggcgcctaatgctcgaattgccagactccacgttactggccagatagaagaagttaccagtatctatagctggctctacagccatcatccccaggatataaaagaagataagccgtggcacccggttagctgtcaggatcatgacgtttttaaagcaccacaagagtccttgttagtcattttcgatgcacatttgctcggtaatgatttctttgcttcagagactgcactttacggcagtggtcatattctcagtgatttattattgctgctgaaaggtgaaacccaggatactcttccgcaatccctacctaaaattttattacttggcgacccttatcagctaaggcgcggggccaaagagaaaagtctgttggaatgccagatattccaacagaatcagatacctttccgtaccgttgagttgaaatcacaagaccgtgatctggaatcactgaatgaacaactcgattttcagcgcgaattggttggccaactcgctgcacaaaaatttattcaattgcccatcagccaacagcagatgttccgtactatcaccaagggacaacaaacagctcagattgccgaagagcttatctctccgggcagcgagtgtatttatctctgtgcaactaacgaacgggctcaagcagtaaatttgggtatccgtggaaagtatttgcaggcacgagtgccgggcctgttagttgaaggggatcgtattgaaatttataacaaaacctttagttttgatcatgatggtgatgcgctgagtggacacatgccgctacatgctggacagttcgcaagagtaactcaagcagccagaggtttcttcagtaaaagcattacgcttaaaggccgagataaacccacgaccgttgaatttgcccacgttacactccaaagcaatgacaccttttccaccgtactctacctcccggagtttttgatttcgcttaaacctgaacttgatactgacaaactgctggcactacgaatttgggctcgagtagaggcagatgagcagcttaaggagtcgaaatcttccctggaagggatggataaaaaaagctcggaatacaaggaagcacgcgaagactatcaaaaaaaacacagtcagttgattctcaatagtaaatttacctacgccgctcgacttcgctacgcctgggcactcactgtgcatcgggctcagtcacatcagccatttaatagggtgattctggaagctagtactgcctacgatactgacaacccggctaccgatagttatttccgttggctttataccgctacaacacgaaccatgcatacgctggatatacttaactatcctacgcttaatccgctatcaaaaactgaatggcatttatcctctctcagaacagtaccattggttgtaaaacagcgttttcactttgctaaaaacagattacctacagagagtgagctaaacagagagctacccgcaggattcaacccgcaaacacctgagttatttgcactactgctggctataagtgacgctctttatcatagtgcgtggcgtatcagttcaatacaccagcatccctataaagagcgctatttccttaataacgaatgcggtgaagcaatactagacttcgattataacggtaaatttgaggtaactattgggaaatgccaggggctaagtggcaatgctcaactggaacaagagttaagacaactactcaatacaccagtagtctggctcgatgataacatccgtatagctatgcattttatcgataccttagttgccaaaaagggatggcgaataattgacatcgatgagaaaccatacaaggttttcgctattgcagagcattccacaggcaaaataaaactggatattaatataccttctgtgagcagtatttctcgaaaaggcgttatcagtaatatttatttgatccaagcagactctaaagctgtaagcgcacaatttaaggtggatttcatcgatggctga

SEQ ID NO: 146262 - DNA, 1407 bp, Enterobacter cloacae
atggctgagcaagtttcccaacaaatcaaccgcttgagaaaaagtggtgaactggatgcggcctgggaactaggttgtacaacagtgcagcaaaacccaagtgatagctttcttaaaggggctttcttctgggtatgttatgcatatttaaaagaagtacgggatactattaaagcgcgagccgcagcagggaaaagtgagtttacacctacgcgacaagaagccgaacgaatcgactttttattggactggataatctggcttgatttaccggacagtggtttcgagtatcgcagcctgctacttatctttcaggctaatttggagcacttccccaaattgatgctgctactggccaaacatgcgaaaaccctattcagtccggaagacaaacagccgtttattacggagaaaggcgaatctcctagcttgatgctgaaatttacccgcaagcttgcgaaaacctggagtagccagactacattgcgtcatctatctgtggatgacctgatcaatttgctgacactgacacgtcgtgaagttaaagatacccaacaattaatctggcttgattatgacgaagcacgatgccttattgttgccaaacgctacgaagaggcgcgaaaacgaatactgacagtactgcgtaaaaaacagaatgaagcctgggcgtggggggcactagcggccacttatcgccagaaagatcctcaagctgctattaccttgtttgctaaagctttgagttgcgcccacgatgatgctctggcgcttccgactctaaagggattcgctgcactgttagcagttgaaggtcttcataacgaagcatcaatctgtgtacaaagggctgttaattgttatctgcataacggttggcagataaaaactgatcttgaacaactactcaaccaaccctggtataatcctcaggtcaatactgagttactgaccccatttatactgctgcgttctcagagtgcgacagattatctttttggagagcgtgtccagaagctagctttagttcagaatatccatgcagggaatcgtggattccatgcttgggttagcagaagtcaaagcttgtccgttagaatgaaactttggtctgaagaatggtcactttcaccaggtgattacgttcaattaactatcaccgaagaggatcagtcagtcattgccgtcacaccggctacagcccaaccgcttgctgatgccggtgagatagaagatatactacacgtgacagataaaggttttgcttttgtcggtgatactttcatcccaaaacatcttgtacctgaaggaatggacggccaaaaggtacacgttgttcgtgttactgaactagataaaaccaagaatcgttatggttggcgagcattaaaagtaacttgttcctga

SEQ ID NO: 146263 - DNA, 318 bp, Enterobacter cloacae
atgacccacatcaactggggcctgcagcgggctatcacgccgcgcctgggagcccgtctggtgcaggagggtaaccgactgcactatctggctgacagggccagcatcaccggcaggttcagtgacaccgaatgccggaagctggatgaaacatgcccgcactttatccgccatatggagtcgatgctaaccaccggtgaactcagtccccaacacgcccactgcgtcaccctgtaccacaacggtttcacctgcgaagccgatactcttggcagttgcggctacgtatacatcgccatttaccccactcagagttaa

SEQ ID NO: 146264 - DNA, 141 bp, Enterobacter cloacae
atgagcccgccgtgcaaggcaagtgacgccgggcgggatagcgacgaggacctgcaggcagatactcagacgatggaatgtgtgcgggagttgaggacaaatatctatcgctggcaggcgtggtacaaggcaacggattag

SEQ ID NO: 146265 - DNA, 321 bp, Enterobacter cloacae
atgcgcattttatcttttgcattaataggagtaactctggcctactccacaatgacaaatgcttcggtatttggtggctctaatcttggatttagtggctatcctgagttttcagattcagaaccaacaccaccgtacaaccgggatgagtattcaatgggagcatataaaagggatgttgaaaggtatattcagaatgcgaaggactacacggaaaatgctaataacgacatgaagcgcatcagggaagctcaggacggtgcactagaaaaagcaaaccgagtcgttgaggaatataatagggccgcccgggggtattaa

SEQ ID NO: 146266 - DNA, 3141 bp, Enterobacter cloacae
atgactacaataaagaaccgtcgtttacgtccgcgtgcgcatcgttttgctcttgagtctcgccagctttttgatggagccgctctggctgaaaccgccatccatgaggcatcggcaagcgatctggtgcaccatgaaagcgccaccgaacccgcgaaggcgctggatattccccacgccgccacagccgacgccgcaagcgaaaaaccgggcagcgccgccagcgaagtctatgtaatagaccagcatatctccggctggcagtcgctggtggaccaggtgccgcagggcagccaggtggtgattatcgatgaaaacagctcgggtctgagccagcttgccgacgcgctgaaaggcgaaaccaatatttccgccattcatattctgagccacggcgcgtccgacaccattacgcttggcaccgatgtgctgacggcggacaacctctcggcgtggtcttcacagctcagcgctatcggcgcaagccttagcgacagcggcgagatcctgctttacggctgcgacgtctccgcccaggataacgcctttatcacccgcttcgccgaagtgactcaggcggacgtggcggcctccagcgacatgaccggcagcgcggcgctttccggcgactgggtgctggaaaaccataccggcagcattgaagcgaaaaccttcgcctttgattacgacggtctgctggccgggccggaagtcaccgcgccggaaaaaggcatcaccgtcgccgagccgagcagccttaacgccgcaggcgccgataccgccacgctcagcggctggcaggtcagcaccacggacgccagcgaaaccgtcaccgtcacggtgagcctgagcaacagcgccatcggcaaactcagcgacagccagaccagcaacgcttcgctgaccatgaccggcactgccagcgaagcgcaggcctggcttaacagcatcacctttacctccgctgacgtcgagcttggcaacaccgccgccagcggcaagctggacgtcacggttcgcgacagcgcgggcgtcagcaccagcaaatccatcgatgtgaccgtgaccccgtcgaacgacccggtaagcgtggccgacgccacccagaacgtgccggagatcgaatcgggcggcagcgtcatcaccaccgtgacccttaacgccatcgatgcggaagtaacggcgggcacccagcagcccgtgcagattgtctatggtctgaccgacctgccgcagtatggctatctgacgctgaacggcgaccggatgggcgtcggctctatctttacccagcaggatttgatcgacggcaaggtgaagtatgtccacaccgccacgggcgcagaccagaacgccgccgacggctttacggcggtcatcaacgacggcgcgacgccgaaggcgcagtccgataccgtccacgtcacgctgaacattaccccgcagaaccaggcgccgacccttagcggcagcggcgtggtctttgaaggccagcccaacaatgcggtcaacaccggcaacgtcggccagtatatagaggcggacggcggcggcgatccgggcgacacaacgctgactctcaccattaccgccctgccgacccacggcacgctctggtttaacggcgtcgccgtcaccgtcggccagacctttgactatgccgatcgcaatctgctgacctatgctaacgacggcagtgaaaaccagggcaccgacagctttggcgtacgcgtcaccgaccagggcggcggcaccggcgtgccggccagcaccgacggcaccattaccctgaccgtgcgcccggtggatgacgacccgactctggacaacgtaacgctgcacgcgcaggtggacgatctggcgaacgccgtcacccttacgtctgcgatgatcggcgcaagcgacgtggattccaccgataaccacctcagctttatcgttgacgacagcaagctcacccacggttacctgacgctggacggctaccgcctgcaaaacggcggcaccttcaccatgcaggatatcgtcgacggcaaagtgcagtacgtgcagtacgccagcgccagcgcgtcgggtgacaccgacagcttcaactttgtggtggtggacaacaccgctgcgctgcgctggaacgccgacggcacgacctacagccgcatcggcggggtgtacacgccgggcaccgaaacgctgaccagctttacctttaccatcggccttgcggtggtcacgggcggcggtcccggcacgatcccggatcgcgtcaccaccatcaccaaccgcgactccacctgggcgggcgtggacttcacctccggcaacgcccgcggcgaagtagaagaaggcggcaccctcgtgctgaacggcaccagcggcgacttctcaagcgtgccgggcctgagctacaccgccacgggcgtggacgcctcgcaggtggtctataccttcctcggtttctcgaacggcgcaagaggcggcgagctgcaaaaaaatgtcggcggcagctgggtgacgctcggcgaatatgccacctttacgcaggccgacctcgacagcggcaatattcgcttccagcacgacggcggagagacctttgtctacgccgcggcgttctctgtctcggcgggtctgaccacgctcgatgccaacggcaacccggtgaccgatatctggacgccgacgctgaacatctacgtcacgccagtgaacgatctgccggtggtgaccggctcctcctccaccgtcatcgccgaaggcgaaaccgcttacctgaccaccggccagatagcgataagcgacccggacgacgccaacagcggcaacgggctggaagagagcgcgacgatcaaagacggcagcgccagcgccaacaattacgcctataacaacgacgcgaccggcgccaacgccctgacgttcaccatcaaaacgctgccggacggcggcacgctgcaatactacaacggctcgcagtgggttgacgttaccgtcggccagacgctcaacgcctcgctgctaccgccagcgcctcgaccaccgggctgcgcttcgtcagcgacggctcggaagtgcgctccaccacctttaccgtatcggccaccgaccgctggggcgccacctccgccagcgacgcgacggtga

SEQ ID NO: 146267 - DNA, 10242 bp, Enterobacter cloacae
gtgaaaatccagataactaacgtcaacgacgcgccgcagatcgccaaagacccgacccaggccgacccgacggtgaccgcaggctcgccgaacctgattggcggcacgccagtcaacaacccgctgtacgtcaccgaaggaagctatggccagataaccagcgccatgctgcaagcctatgattccgacagcagctcaatgcaggtgcagtacaccatcaccggcgcgccgacccacggcaccctagcctattccaaagatggtgtgaacttcagccgcatcggcaaaggctcctccttcacccagcaggatgtggcgaacgggtacatttactacctgaacgacggcaccgaaggcagcggcaacagcgaacccgccaccccggacgataagttcaccttcacgatttctgacggcgacaaagagcagaccggcaacgcgttctggatctacacccgcccgaccgacgacgcgccggaagtgaccgcgccgtcgggcatcaagaacatcgccagcgccacggcgacgagcaacgccctgccgggcttctcggtcaaagatggggatctgacagacggcgtgaccgatggcgagagcgattatttgcaggtgaccgtgcgtctgctgcatgcggacggcagcgccttcgtggccagcgaatacagcgacgtgaccctgggttacgcgaccggcagcggcgcgacgatctctaccgcccacggcggccagcacgactatctggtcttgagcggcacccgcgcccaggtgaacgcggcgctggcgggcctgacggtgaccttcagaaccgaccgcaacgccacctatcaggtgcagactatcgccgatgaccgcctgcgcgacgcaagcggcacgctgacggcaggcgctaacggcggcacgctgaaccagcccgcgacgcctggcagaggcgcggcggccaccgccgtcgacgccaccgagtacaactggtacagcgcctccgtaccggaaaaaagcggcaacctgagcgcggcgtccgtcaccattcgcgcctcggaaatcaacgatccgggcacgctgaccgtgaccaacctggaccgtaccgtttatgaagatcaggcaagctttatcggcggcaatatcgtggtgcaggacaccgaatccgccgccttcggcacgccggtgaccgtcaccatcaccgcgccgtccggcaccctcggcatcggcggcgcggacgtgaacaccagcgccaccgccagcgccgccggcagccagccggttacgatttccggcgacaactccggcacgctgacgctgaccggtcgcgccagcgacattgaagcgctgctgaacgacgcggcgctcggcctcacctggcagagcggcgccaacgtcaaccacgacctgaacggcgcagcggcgggcgatgtcaccatcaccctgcatctggacgacggcgactcgcatatcggcgacaccgtgcaggccgacccggccgaccagacgctgaacctcaccattgtgccggtgaacgacgcgccggttgtctctgcaacgggcggtacggtttacctcaacagcgatccggcggtagtcgacggcaccaaagtcggcggctttgtgatttccgacccggattacaccgacggcggcaatatcgccgacggcgaaaccgattttatgcaggtgacggtgcgcatcaccgacgccagcggcgtgccgctgaccgccgcgcagtacagtaacgccggcgtatccgacatcaccattagctccggcaacacaacgtccggcgtgacgattgacagcgtctataacggcagcgagtccgcactggtgatccgcggcacgctgagccaggtgaacgcgtacctggcggcgctgaccgtctccatgaccggctccaccctgtcgaacgccgataacgcctggcgtgtggaagtgattgccgacgatcgcctgcgcgacgcctctggcaacctgacaagcgccaacagcgccaacggcggccagaacgatgccgtcaccggcgtcgcggcggtgccgaccacggctatcgacccttacggcgcgctgccttccggcctgagccagaacgtcagtaccgcatggcgcagcgtcttcccaagcgacgtcaacgatccggcgaccatcacggtgacggacaagtcagtcaacgaaggctcaacgaccgtcgccctgcccgccattaccgtggcggacccggacgccgacagcgccagcctgacggtgacggtcactctgccgggcggctttacctttaaaacgattggcgggacgggcggcaccgttgatgcgggcggcgtcaacaccaccagcttcacacttaccggcacgctttcgcagatcaacagccgcctcgctaacctgacggtgaacctgccgaccaacgcgggcgtcaccgccgccgactggaacggcacctttaacgtcaccgtagtggtgaacgataacgccaaccacggcagccgcccgaccacgcttaccggcgacagcaataacccgaacgcgaacccgggcgacatcagctacgccgatgacacctccgccgcgctggtcaccacccgtacctttagcgtgaccgtgaaaccgtcgaacgatgccccggtcgtgctgggcggcgctacccagacgctggccccggtgagcgaagacaccagcgccgcagcgattaccggcgacaccattgccaacctgtttgccggtaacttctcggacccgaacgatcaggtcaacaatgcgtccattacggcaaccggcggcaccagcgctgacagtttctggggcgtggctatcactaacctgtcagtcaacagcgcgcagggcgaatggcaatactccaccgatggcggcacgacctgggctgccattggcagccgcaccgacgccaacgccctgctgctggatgcaacggccaaagtccgctttgtacctgccgctgacttcttcgggacgcctgctgccttgaaagtacgtctggtggaaaccaacaacaacggcgacaccaccgcaacgacagggtcgctgaccagcggccagactgtatcaacggcaaccaacggcagtagttcacgctatagcgcagcgatggtcaccctctcaaccagcgtcactaacgtcaacgaccgtccgacgattagcgcgacgccgctgaccatgcaggaagatacgccagttggcaaaacgctgacctctattcttggcagctacagcgacgccgccgacaaccagacgggaattgctggcggcggcaacgccagcggcgctatcggctatgtggcgatcgtcggcaacaccaccgacgcaagcctcggccactgggagtactctaccaacggcacgacctggactgcgcttggcacaagctacagcgaaaccaacgcgctggtgctgctcgcctcgacccagctgcgctttgtgccgctggccgactacaacggcgcggtgccgggcggcctgacggtgcgcgtctccgacagcaccagttccgccgataccggcgtcagcgccgcgggcagcacgcaggatctgcaaagcgccttcaacagcggccagaccagccactggagcacggcgcagagcatcagcatgagcattacagcggtggcggacgcggtgagcgacaccgccgccacccattcgggcgaggcgaaaaccatcgacgtgctgggcaacgacagcttcagcaacagcgataaagcgatcacggcggtcacccagggcgtttatggttccgtggttatcgacaacggcaaggtgatttatacccctaacaccacgagctacgtcggcagcgatacgttcacctataccgtcaccagcggcggcgtgaccgaaaccgcgacggtcacgattcagatgaataacgccgccccggtcacccagggtgaaaacgtcagcacgccggaagatacgacgctgaccagctccgccgcgcaaaacctgctgctgaacgattccgaccctgatggcgatacgctgagcattcttaactactccgtcagcggcgtcggcacggtatttaccgcaggccagaccgccgacctcaccgggtatggcaaactgaccatcaacgccgacggcagctatacttttgtcccggtcgccgactggaacggtacggtgccgacggtgacctaccgggtggttgatggccgcaccaacggcgcgaccacggcgcagttgaagataaccgtcacgccggtaaaagacgcctttgacgacagcctgacgacccacgcgggtacgccggtgaccatcgacgttttcgccaacgataaattcagcaacggcgataaagcgattaccggcaagaccaacggcgcttacggtacggttagcatcagcaacggccaggtgatttacacgccgaccagcggctatgtcggcaccgataccttcacctataccgtcaccagcggcggcaaaaccgaaaccgcgacggtcaccctcactctggtcaacgacgcgccgcaggtcggcctggctaaaaccggcagcacggcggaagacacaacgcttaccaacggcgaaaatctgctgacgggcgccagcgacctgaacggcgacgcgctgacggtgaaatcgtttacggtgggcaataccacctgggccgccggccagaccgccacgcttgcgggctacggcgcgctgaccctcaacgccgacggcagctatacctttgttccggtcgccgactggaacggcaacgtgccgcaggtgacctacaccatcaccgacggtcgcaccaacggcgacgtcacctcgaggctcgatatctccgttacgccggtgcaggatgcgtttaacgacagccagaccggccacgggcgcgacccgctggtgattgatgtctttaataacgacagcttcgccaacagcgacaaagccattaccgccaccaccaacggcgcgcacggtacggtgaccgtcagcaacggcaaggtggtttacaccctgaacgacggctatgtcggcaccgatagtttcacttataccgttaccagcggcggcaaaaccgaaaccgcgaacgtcaccgtaacgttaacgaacggtgcgccgaccggggttgtcggcaaaaccgccagcacagcggaagaccagacgctgaccagcacggctttgcagaatctgctgaacggcgccagcgacccggacggcgatacgctgaaagtcagcgcatttacggtgggcgcaacgacgtgggccgcaggccagaccgcgacgcttgcgggctatggcgcactgaccatcaacgccgacggcagctatacctttgttccggtcgccgactggaacggcagcgtgccgcaggtcacttatgaggtcaccgacgggcgcgacaacggcgtgcaaaccgccgccctcgatattaccgtcacgccggtgcaggacgcccatgacgacagccggacagcccatgcgggcgccccggtcacggtcgatgtcctgaccaacgacggcttcaccaacggcgacaaagcgattaccggcgtcaccgacggcgcgcacggtacggttagcatcagcaacggccaggtggtttacaccccgaccagcggctacgtcggcaacgacagcttcacctataccgtcaccagcggcggtatcgaggagaccgccacggtttatctgacgttgaccaacagcgcgccgacgctgccccactggacagcgattaacggtgaagactcgccgatcggtatccctggccttttattagataccagcagcgacgccgacggcgacaccctgacggtgaccgattttaccgtcaacggtaccacctggcaggcaggcgagacggccaatctggcggggtacggaagcctgactattacttctgacggcagcgtgacgtttattccggtggctgactggaacggcaacgtaccggtggtgacctacacggcaacggacggccgggataacggcagcgtcacatcgacgctcaccattcagtacaatgcgatccctgacgccgttgacgacaacgccaccacccacgcgggcgtggcgaaagtcatcgacgtgctggcgaacgacagattcagcaacagcgacaaagccgttaccgccgtcacccagggcaataacggctcggtggcgattgaaaacggcaaggtgcgctataccccgaacgcgggctttaacggcactgacagctttacctataccgtcaccagcggcggcgtaacggaaaccgcgaccgttaatgtcaccatcgccaacattgcgccggtggcgcacgatgattttacgtggactgcggaagacactaccctgacgcgcagcgccgccaccgggttgctggctaacgacagcgatgatgacaatgatgctcttgccatcacgcagttcagtaccggtacgcagatttacgcggcgggccagaccgcgacgcttgcaggcatgggcgacctgaccattaacgccgacggcagctatacctttgtgccagtcgccgactggaacggcgccgtgcagccgatcctttaccaggtaagcgacggcaacggcggatttagcgtggcgacgctcttacttaccgtcaacccgatcgcggatgcggtcaacgacagcgtcagcacccatgccgatgtgccggtggtgatcgacgcgctcgacaacgacagcttcagcaacagcgaccagacgattaccggcgtcaccgctgccgcccacggcacggtgacgattgagaacaacacgctcgtctaccgcccgaacgcgggctatgtcggcagcgacaccttcgactacaccgtcaccagcggcggcaaaaccgaaaccgcgaccgttaccgtggacgtcaccaacgtggcgccgcgtctgaccagcgtaccgacgatttccacgccggaagacaccacgcttaacagcactgcggcgcagaacctgctgactaacgcccacgatgacgatggcgacgccctcgccgtgacggagtttaccgtcggcggcacccgctacctcgcgggcgacaccgcgacgctggcaggctatggcgatttgacgatccgcgccgacggcagcttcacctttgtgccagtggccgactggaacggcgtgccgcctgccgcgacctacaccatcagcgacggcaaagacggcggcgtctccaccgccacgctcgcctttagcgtaacgccggtggcggacgcgaaggacgatacggccagcacccatgcgggtgttgcggtcactatcgatgcgctgcataacgacagtttcagcaatgccgacaaagcgattatcgatgtggatcagggccagcacggctcggtgaccattgaaaacggccagctggtttatcgtcctgtggcaggctatgtcggccaggataccttcacctacaccgtggagagcggcggcgttcgcgaaaccgccaacgtcaccgtcaccctgaccaacagcgtgccggtcgcaacgggcgagacagtggcttcgccggaagattacgaggcgcgcggcgacctgctgctcaacgaccgtgacgcggacggcgatccgctgtttatcgcgggcttcaccgtcggcggccagactgctcagccgggcgacaccgtccagctggcgggcgtcggcgcgctgaccgttaaccgcgacggcagctaccgcttcacgccagtcgccgactggaacggcacggcgccagtagtaacctacacggtcagcgacggcaacgacggcggcaccgctaccgcgacgctcgccatcaccgtcaccccggtagcggacgtgaaagatgacagcgccaccacccacgcaggcgtgccggtgacgattgatgcgatcggcaacgaccgcttcgttaacccggaccaggccattaccggcgtgacccagggcgcgcacggctccgtcgctattgaaaacgggcagctggtttatacgccaaacgcgggctacgtcggccaggacaccttcacctataccgtcaccagcggcggcgtcaccgaaaccgccgccgtgagcgtcgtgatgaccaataccgtgccggtggccgacggtgaaatcgtcaccacgccggaagacaccgctattggcggcgaactgctgaccaacgaccgcgacccggacggcgacccgctgcacattgcgggctttaccgtcggcggccagactgctcagccgggcgacaccgtccagctggcgggcgtcggcgcgctgaccgttaaccgcgacggcagctaccgcttcacgccagtcgccgactggaacggcacggcgccggtggtgacctatacggtcagcgacggcaacgacggcggcaccgctaccgcgttgctcgttatcaccgttacgccggtcgtggatgtgaaagatgaccgcgccaccacccatgcaggcgacccggtcaccgttgacgcgctcggcaacgacagcttcagtaacgccgaccgcgctattaccggcgtcaccaacggcgcgcacggcacggtgaccattgaaaacggcaaggtggtctaccagccgaatacgggttatgtcggccaggataccttcacctataccgtcaccagcggcggcgtcaccgaaaccgcccaggtcacgcttgaggtcaccaacaccccgccggtcgcggtggcggataaagcgagcaccctgccggaaacgccggtcagcggcaatctgctgaccaacgaccgcgacgcggacagcgacccgctgcacgtggcggagatcaccgtcggcggcgcgacctacgcgccgggggacatcattacgatcccgggccagggcacgctggtggttaaccgcgacggcagctatctgtttaccccggcaagcggctggtccggctttacgccagtgttgaactataccctgagcgacggcaacgacggcggcaccgccacgggcgaactgcgcctgctggtgaaccccgtagccgaggcgtgggtgaaagaggcaggtctggtcgatacggccagcggcgcgcaaaccaccacgggcgcgatggccgtactgtcgctggagccggtggaaagcctgaccattggcggccagaccctgacgcttgcgcagctccaggcgctgagcgcccaggcgccagtggatatcgcaacgccggacggcgtgctgtcgctcaccggtttccaggtggacggcgaaggccgcgcgacgctgcaataccgcttcacgctgacccaggcggttaaccagccgggcgaatccaccacccgcgaagagattcggttctccgtcaacggccagcagacccgcgcgccgggcctgctgcgcgtcaatattctcaacgacgcgccggtcgcggcagcggacgacaacagcatcgaccaggatcgcggccagcaggcggcgtcgggcaacgtctttagcaacgacgctatcggcgcagacggcgccgcggcgggcggcccggtgagcgcgatttcctccgtgaacctcaaccgcgcgggcgcggtcggcggcgtaagcctgggcgagttcggcgccctgacgctcgacgcccgcggcaactacagctatgtgctgaaccgcagcaacagccgcgtggcgtcgctggacgccaacgccaccctgagcgaggtgttcacttacaccattaccgacgccgacggcaataccagccaggcgcagctgaccatcgttattcacggcgtgacgccgccgcagtcggtacgcacaggcgatcagcacttcccgagctactacaccaactacgagctgtcgctcgatcagccgtattcgccgggtctgtttatcctgcccgccatctacggcgtgtacagcgaccagttctctcgcaaggtggagctgaaccgcaaaattaccgagctgggccgcggcatgaatgacaacggcacgccggtgctggaagacggcattctctttacccgctgggtaaacaccacgctgcaacgcagcgtggtgaacaccttcgccgccaccggtatcggttcgcagctgctgggcgatcacttcagccacttctcgctgaataaatccgtacagcctgcgcccgtgctggaaaacgcgccggaacgtccgccgcttaacgagcgcatcaacgaaagaaccaccgtgcagcaggagcgcggcgagaaaacccctgatgcgaagcaggctcacgccgccgcgccgggcgtggtgatcgtgccgcaagccgccgccggaccaggcgcgccgtcactggcggcgcaggtcgacgcgctggcccgtaaccgcgtcgccgcgccggaaccggtcaccgtgggaggcgccacaccgcatcgttaa

SEQ ID NO: 146268 - DNA, 1920 bp, Enterobacter cloacae
atgatgacgactttaactgccgtaaccccgactgccgtacgttctgcgcctctgctcgcccctgtcgccgcactggtttccgcgctgctgttaagcggttgcggcaccattaaacctgaaccgctgacccaggatgaaatcggcgcgcgcgtcagcgccgaccgcgccgccatgtaccgcgaccagcagccggtctctggtccgctgaccctgtcagacgccatggcccgcgcgctgaaatacaacctcgactaccgcctgaagatgatggaaaccgccctgtcgcgcggcatcctggatatctcccagcaggatatgctgccgaagttgatgaccgatgccggctaccgctggcgcgacaacgattccggcggcaccagcgtcggtatcgaagaccgggtcgtcagcctgcgtccgtccacctctgaagagcgcgagcacctgctggccgacgccaccttctcctgggacgtgctcgatttcggcatgagctactaccgcgcgaagcagcaggcggataacgtcaacatcgccgaagagcgtcgccgcaaggtattgcagaatattgtccaggaggtgcgcgacgcgtactggcgcgcgctgggcgcacagcgtctgctgagcgaagcgcagccgctggccgaagagatccagaccgcgcttgagaaaacccgcgaagcggagcgcgcaggcattctgccgccggtcgagggcctggagtaccagcgcgccctgctcgacgcggtggcgctgctgaaccagaagcgccaggagatgcagatggcgaaaagcgagctggccgccctgctgaacctgccgtccaccaccgacttcaccttacaggacgtcgccaatccggcgctttccggcgtgccaagccagcttgatacgcttgagcagatggcgctggaacgccgcccagagctgcgtgaagaagattacaaaacccgcatcgacgtgctggaaactaaacgccagatcgcctcgctgttcccgaacctgaatctgttcggcggcatcagctacgactccaacagctacctctacaacaacagctgggtgcagggcggcgtgggcgtttccatgaacctgttcaagctgctgagcgcgccggccatcagccgcaccaacgacgcgcgcctggccaccgacaatgcccgccgtatggcgctgagcatggcggtgctgactcaggtgcgcgtctcggttgagcgctacaagctcgcggtgtacgactaccagatagcccaggagtccgcccgcgtcgaccagcgtctggcgagcatctcccgcgccggttccgacaactcgctctcaagcgacctggaatccctgcgcacccaggcgcgctccatcgtctcccgcttccaggaagccgcctcctacgcgcaggcgcagtccgcctatggccgcgtgctgaactcggtaggcatcgacctgctgccggaaaaggtgaccagcagcgatctgccgaccctgtcgcgtgaaatcaaccagagcctggtggcgggcgagaagcaggtcttcacccagagcgccgacgcggtagtttcccgccatccggtcagcgtcaccctgggccgcctgccagcgggcgtcaacaagagcgcgatttatcagtcggtcacccatgtgctggccgccaaccagctggtgcagggcaacggcgccgacagcgtgaaactgcaaatgaacctcaaccttgaacgcgcgtcaggctcgcagcgcggcgtgtgggaaatggcggtctataacgcccagggcgcgcaggtcgcctaccagaaatacaccagctatctgccgaatgacgtcaacacccgttcggtcagcgcgctggcagaagccgccgcgctctccgtggtgtccgacctgcataaagcggcaggcgacaccggcgtgatgacggcaagtaacccttaa

SEQ ID NO: 146269 - DNA, 882 bp, Enterobacter cloacae
atgaacaacgtgaacgaaggctggcgcagcgtccgcgcgctcatgccgctgacgggcctggcgctgtgcgccagcgccttcgccgccgacccaacccccgctgcggcgggggcagtcgcaacgccggatgcggccgttgccgcagcgcctgagagcgcgcctgacgccaccgccgacaacggcgccgcgccggtgcgttttctggtgatggccaaccaggaaagcccgctatcaagcgtggtggccgggcgcgtgtcgcaggtcaacgttgagctgggcgatacggtcaaggcaggcaaactgctggtgacgctggactgtagcgagctgaaagcccgtcgcgacgcggcagacgccgagtacagcgccgcgcagatcaaatatgaagcgaaggcgaaattgcagggtctgcattccgcaggcgcgctggaggttggccttgccgccgccgacgtgaaccgcacccgcagccagatcaaaatctttgaagcgcagctggcgcagtgccgctttaccgcgccgttcgacggccgcgtggcgcgtatttacgtcaaagagggccagggcgtcggcgcaggcgcgcaggttatcgatcttgtaagcaacggcacccgcaaggcgcgcctcaacgtgccgtcaggctggaccacctggcttgcgcccggcgcgcagcttgacgcggtggtgggtgaaaccggcaagcattacccgatgaccgtcacccacatcagcggccgcgtggacgccgtgagccagacgattgagattgaagcggaatttggcagcgacgcccaggacgtactgcccggcatgagcggccgcgcgacgccagtctgcccgaaagcggcggcgcagtgccagagcgggacgaccaactcgtga

SEQ ID NO: 146270 - DNA, 1350 bp, Enterobacter cloacae
gtgagcatcgccctgttctattctctcgcggcgcgcgtgaaagcggcgcgcagccccgaagagctgggttttgtgatgtgtaacgatacccgctcgctggtggagtatcgccaggcggcgctgctcgccgtttccgccaccgggcgcgcccagcttgcggcgcactccggcctgagcgacaccgaccgcaataccccctacgcgctgtggcttgccgccgttgcctgcgacatcgcgccgcgctgcgccgcgctgccggaaaccgcccgcgtgatgccgctgtcgccggaaatgctgagcgagtcgctggcgcgcgagtgggacgaatggctgccgggccacgtctgggtgctggcgctgaccggcccggacggcaagctgcacgccctgctgctgctggcccgcgataccccgtggccgacgcagcttggcgtcgaaagccccgaatacgccctgctccagctggcgaacctgtacggctacgcctggtgggcgctggtggcgcggccttctcgcctgcaacggctgctgcccgccacggtgcgccgacgcgcgggtctcgtgttgctgcttctgctgctggttatgctgatcccgattcgggaatacacgctggtgcccgccgaggtaatttcgcttaacagcgaagtgatcgccgcgccgagcgacggggtgattcaccagatgaaggtgccgccgaacacgccggtcgtggccggacaggtgctggcggagctggatgatacgactctaaaaaaccgtctcgccattgctcaggcggagctggcgaccgccaccgtcaatatgcatcaggcgtctcagcaggcgattgaagacccgaacgcccgtgcggaactggctctgaccgaaggcaaatggcgcgagcaaaaggtgcaggttgcctcgttgcagcgcgagctggagaagctgtcgatccgcgcccgcagcagcggcgtgtttgtctacaccgacccggacgactgggcgggccgtccggtacagaccggcgagcgcatcggcctgctggcggacccgacgaagctcggcgtgcgcgcctgggcgcctgcggcggaatccaccaacctgaacccgcacgcggcgatgaccgtatttcttaaggtcgccccgctgcacccgctgaccgcgcggctggattacgccggttacgagacggtggaagcgccgaacggcgtcgcgagctacctgctgcgcggcaccgtaaccgacccgtccagcgccgcccgtatcggcttgcagggcacggcccgcgtctccggcgactggagcctgctcggttatctgattttccgtcgtccgctggcgacgctgcgcgcctggtgtggattctga

SEQ ID NO: 146271 - DNA, 2133 bp, Enterobacter cloacae
atgcaaacagccgcgacgctcccgcctgcgggcgggacagctcttgcgcagccgcagccgctgccgccgctgcgcgacgagctaaaaattcacccggcgggcaacaaccgcgacggctcgcccgcctggcatctggccgacccggtgcgcaacctctatttccgcctgggctggctggagctggagatgctgcgccgctggccgctcggcgcgccgcaggcgattgccgacagcatcagccaggagaccaccatgacggtggacgaacaggatgtgttgcagttcctgggctttttacagcagcaacagctgctgcgccgcggcgcgttcaaagcgcgcggctcgctctggcggcgtattctgcacggctacctgtttatccgcctgccgctggtgcgcccggagaaagccctgcgccgcatgctgccgtgggtggagtggcttttcagcgcgccgtttctactgctgaccgccgtcgccgcgctggcaggcgtcgttctggccgcgcgccagtgggataacgtcgaggccgcgctgcacggcgccctgagctggaacggggcgctggccttcgcggtggcgctgatcctctccaaatgctggcacgaactggggcacgcctttatggcgacccgctacggcgtacgcgtcggccatatgggggtggcgctgctggtgatgtggccgatggcctacaccgataccggagagagctggaagctgtcgcagtcccgccaccggctctccatcgccagcgcgggcattatggccgagctgatgctggcggcctgggcgacgctgttctggagcttcgcgccggaaggcaacgttaaaggcgcgctgttctttctcgccaccaccgcctgggtgctgacggtggcggtgaacgccagcccgtttatgcgctttgacggctactttattctcagcgatacgctggactaccctggcctgcacgaacgggcgggcaactgggcgaagcgctggctgcgctggcacctgctggggcttgaggatccgatcccggataacgtctcgcccgcctttgcccgcttcctcacccttttcgccttcgccacctgggtttaccggctactgctgttcgtcggcatcgcgctggtggtctacaacgccttttttaaggcgctcgggctggtgctgttttttattgagatagtcacttttgtggtgcaaccgatgtttcgcgaactcaaaatctggcgcgcgcgccgccgggaaatcgctccggcgcgcctgctgcgccttgtcgccgtcgcactcgcgctggggctttcggtctttctgccctggtccgggcaggtctccctgcacggcgtgatggaggcgggcgtggcgcagccggtttacacgccctatgccgcccagcttgacaaggtgctggtgcaggaaggccagcaggtcaaggcgggccagaagctgtttgaactggtggcccccgtcccggcggacgagcaggataaggcgctggcgctaagccaggcgtggcagaccagcgcccgcggcgcgatggcgctcgataaaaacggcgcggcgaagcaggtggtcgccgaccagatggcgcgccagtacgccattcaacagcgggccagcgccgttgagcttcagcggctccagctggtggcgctggaggatggcgtggtgcatgacgttgagcagaccctgcgccccggcagttgggtctcgcctggcacccgcatcgcaagcgtgatcgacacccaccgctggcgcgtgaaggcgctggtcagcgaaaccgacctggcccgcctgcgcgacggcgcgacggcgcgggtttatcagcagggccgctggcagccgctcgcaggtgcggtagtgaccatcgaccacgacgccatccgccgtctgcctaatctgatgctggcgcagagtcacggcggcccggtggcgctgaacccggttgcgcccgccaacgaactccgtcccgccgccgtctggtaccgggtagtgatcgaaggcatctccgccgcgccggtcagcaaagagcaactggtacgtgttgacgtggcgagtgaccgccagagcctggctcacggctgggtcaacagcgttatgctgatgcttatccagcaaactggctttggtaaagagggttag

SEQ ID NO: 146272 - DNA, 1659 bp, Enterobacter cloacae
atggctacgcaaccaaccaatctccctgttccaagtgaatcacctcgcgacctgaaattcaacgctggtaaatttgacgaatacgttacatcgatggggtggacctacactgatcgctttggcgtgaagcattacaccattgagggaatgaactatctttctcagcaggcaatggccgcgtacggttacgtgattcttacagggaagacgtttactaccggcgcgaccatcaacaaccctaacgaagtgctgctcaacactgccgacggcgaatattacaaatggaccggttcgtttgcttctggtgggaaggtcgtacctgctaactcaacgccagcaggaaccggtggcatcggacctggtgcgtggattggcgttggtgacgcatcattaagggctgcgcttgctactcctggcggcgtcaatctggtgaatggtgcggccaagcaatctgatttggacgctactaatcaaactataaataaacgaaactatcctagctttaaaagttgttatgagttggcagctactcgtttagctaaaggattggctataactgctgattgtcgtggtgattcaactatgtatggtgttgtatcaggcggttctgggcaggatatacaacgacctactgtaactctgacaacaacgctgcaaaatctattcggtgttgcatgtacaattaacaacttcggtatatctggttcaactctacgggggatgatttcaggtacggatggtgcgtctcctacatttttggattctttaaatacatccacggcacacgttatatattgtaatcacggaattaacgatagtcagcttgatttaagcattgatcaattccgtgttgatttaataactttcgtaagtgctgttcgtggcgttaataaaataccagtgctctgtactccaaatataaaccctgcaacaactcttgatacaggtggtggtctaattaccgaaactaaatctaaaaggcttgagcgatacgtaaatgttatacgcgatgtcgcacgatcgatgaaagttgatcttgtagaccagtattactattttcagaaaacaaccaggatgtattcacctattgaattggtgccagatggcgcgcacccatcaagtgatgcttatgcgatggctggtcgtaatatggctataccttttgtaaatgctaaacctttatgtaaggctggtgataaacaaggtttcagcaatgcaacttactttgataatattggctcttcaaaacagtatcgcactgactatcttcctttccggcgctttggtggtgttatcgtaggaactcgtggcgctactaatacgggtattaacttagctgtgcttttagacaatccaaccgatgacactgttttagcactttacggaactcagtggaactctggaacaagatcaacattatacgataatggaatccaaactaatcaatatgctggtactatagagcagggaaacagcaacctagcaactattaactgggagggaatccatgtaccggtgagatgtaaattgtttgcaggtttacactgcatgggcatgctgtctaatacttcaatgggtggaaccgggacagattttgcattagccggttacggtttaattccccgagtagaagcgacggtatcaaatgggctttgttga

SEQ ID NO: 146273 - DNA, 2484 bp, Enterobacter cloacae
atgccggtaatcgagattcagcgcgttccggggatgccgaaggaccgggcgattgttaaaagcggcacggtattttcagaatggcttgagcaggaaagttttcaccgcgatattcgcatcaacgttaacggcaaagaactgcaaccagatgatgagctggagtttgcacttcaggacgacgaccgggtaataattttcgaccagccgaagagcggcggtcttgtcggcacgttgctaaaccctcttgagcacctgaatccgatcaagttcacccaaaaggtgttgtcttcgctgatgccgaagccaaacacgaacgccggcggtgggaacaataagacctcacctaataacagcctgaaggggcagactaacatcgcgcgcaatggcgaggcgaagccggacaatttcggccaggtccgctctttccctgatctggctcaggagtcgctctttgaatacatcagcaacctgaaatacatcactgagctgatggtgtttggcctggggaagtacgatgtaacgtctgttcgtttctcggagtcgaatcttggttctatggccggtgctagctacaccatttaccagccaggtgatgtcataccggtggtgaatgagggatatcagttcgacgacgtcgacgggcaggaagtgccaggcctgaatgaaagtggcgatttcccgatcgagacggcgacggcaaacactgtcatcagtggcgtttatgctggcggccagatagcgatgaaaatccttaaacaggctgacttcgactacttcgccgatttgacttttccgcacccggtaacgttcaccattaacgtgacgtatccgatcaccggcggaacccgcactgaagacgtcacgctttccggtagactcatcagttttgctgagacgaacgacggcgccgttgttaacccgaaatattactacacgttcactttcgacaacctgaatggcccatccattccgatccaggatgcgactatcaacacgacgaagttcattttgaacgataacgccgcgctgatcgtcggtccgttcttctcgccgataccatcaagccagctgtggctgcatacccagtccgggctcggcggtaacagcgaaacgaactgggtggtcaacatctggaaggtcgacaatgacaacaacctgatacccggaactgagcagacgtttacgtaccggcagactacgcctcacgactacatgtcggagacgtttaaccggactgacaaactcaccccggcgggcgggtttgggcgctatgcgatcaccttccagaggacggataacagcagcgacgcgagcaagttgcaggtcgaagagattcatgcggtaaacgtcaggactaacgtcgttcacgctgaagattctctggtaatggtgaaggtccgggctaccgagaacgccacaagcgggcgcgacaggaagtacaacgctctgatcacccgccacgtcatcagctacaacatgacgacgcagcaggtagactacacgctcaggccatcgcgcaagtttgcagatattgcgctgtttaactggctggtagtagggaagcagccggaatcgagcattgatatttacggtctgtaccagatacaggctcaaatagacgctatcgacccgcgcctggggtatttcgatttcacctttgacgatgaggatgtgtcgctcggttcgcgcatggagactatctgcgatgccgccagcgtgtcggtttacgacgacaacggcgtgctgtcattcacccgagacagcaaaaagacatctgcggccacaatattcaaccgatcaaatacaaagccagatggttattcgctttcttacgacatgacgctcccgggcggttatgacggtgtagaggtgcagttccgcaacccggacaccaataagcaggactttgtacggtaccggatatccggaaattccataattgaaggatcgccggccaaagcgaaaaagttcgaaatgctttacgtcagaaataggttccaggcggcggagcgcgcgcttagggaatgcaggcggcttatccactcccgcatgaccatgcaggtaacggcaatggctgacggagagtgggtaaacattggtgatatggttcaggtgccagacacatacgacaccaaccagcaggcaggttatatcgtgtcgcgggtcgggaatgacttcgagacgaatgagcgcatcaacttctccggaaccatgtttgtgcaggtcacggattcatccggcgccaccacagcgagataccctgcgtctccgcgtgctgatactgcgttcggctttaccgctgctatcccgaatatcgatctcaacctgtttgatggggtcgacgtccagtcaccttcacggtacgtcatcgccacctcacaggagcttgatgcagggcagtggactatcacggccaagcagccagacggaaagggcagtaccgcattaaccctcgctgagtatagcgatctgatttaccaataa

SEQ ID NO: 146274 - DNA, 213 bp, Enterobacter cloacae
atgctcgaaggttataatatctatgacaatgatgaggcaactatcaaaatgaatcgcttaatagcggtcagggcggctttggaaattgcaaaggcatccgtagttgcgccaacagcctctgtttattgccgcacaggcgagcatctcgaggccgtctcgggacaaatagaaagtcttgcgtcagcaatccaaaaagccgtagaaaataaataa

SEQ ID NO: 146275 - DNA, 807 bp, Enterobacter cloacae
gtgaccatctcattaaatatgctgtctggcgtgcctttcctgcgcgcaggctacaacaaattgctcgaccttgaaaaagtctcgggcggcagcgcagaagggttcctgaagaatgccagtcgccagctcgggatcgcgttcgacaaagaaaccaacattgcaaacctgacaaaggcagccacagacgctggctacaaagacctgggagaagcgcttaacgacaaagtcgccaagatgaaccgtggcacggatgctgccctggtaatgcaggctggcacgccgtcggtgctttccgttgcagctgccgatccatccccgacttgggcagtggccgccaacgagtttgcatcttcaattcaatgcccgttcaccatactgtttggtcagcagacggggcgccttgcctccgatgaggacaaaacagactgggctaagcgctgtaacggccgccgttggggattccagtcgacgattgtagagagcgttcttgagcgcttctggaccgtaggcgtcattgacccgccatcatccggagaggtaacgctggcatggtctgatctgctcgcgcctagcgagaaagagaagattgccaacatgcaggcaatggctgtcgtggcgaaagatacccagcaggcatacggcacaccggcggtcgatgaaaatgaaatccgcgcagtcggtgagttggagcctcgcaaggtcgttcagccacctaaccctgatgtaaagcaaaccgataaggatccgctgacagatgatgatgacagcgcaaaccagaatcgggacgccaatcgtaccgcgcaataa

SEQ ID NO: 146276 - DNA, 420 bp, Enterobacter cloacae
atgtccgtaaaagaaatgtgcgacgaaatggggctttctaataaaacggtttatacccaccgtaaggaaggcgtgctgaaattacgcttaattaagcggtggctaaacgattcgcacaatttcagcgcggaaagacgtatcaagcggcgcagccaaaatacggattttacggataaagaatcagaaatttttaatgcattatataaaaaagagatcttccccgcttatcagatcattaccgatcgtgacaaaaagggcgtaggctttgagatactgatccgctggaataaaaacggtaaaattgtcaagccggccagttttctcacggatatttcaaatcatgaagtatggttgaaaataacggcgttagtcatccatgccgccgtgtcagggattaataagtataatggaaaatactaa

SEQ ID NO: 146277 - DNA, 786 bp, Enterobacter cloacae
atgttttcagcgatctatcgctaccgtggctttattattgacagcgtcaaacgggactttcagtcacgttaccagactagcttcttaggcgcggcatggctgatcttacagccgatcgccatgatttccgtatatacattaatcttttctgagttaatgcgtgcccgcctggcgggcatggacggcccttttgcctacagtatctacctctgttccggggtgttaacctgggggctgtttacggaaacgctcaatagtctggtcaacgtttttctgaccaacgccaacattcttaaaaagcttagctttccgcggatctgtttaccaatcatcgtcactgcttcggcgttcattaacttcctgatcatttttggtctgttcgtgctgtttctgatcgttacgggcaatttcccgggcatgattttctttgaaatcattccggtgctgatcgttcagatgctgttcaccctcggcctcgggatcatcctcggggtgctgaacgtttttgtccgcgacgtcgggcagttcgtgaatatcctgctgcagttttggttctggtttacgcccattgtctacgtgtccaaaacgctgccggagtgggtctctggtctgctggcgtataacccgatggcgaccattatcggttcataccagaacgtgatgctctatcaccagagccctaactggctggcgctgtttccggtcacggtgctgtccgtcattctgtttttatttgcctggcgtttatttaaaaaacatgccgctgatattgtggacgagatttaa

SEQ ID NO: 146278 - DNA, 1296 bp, Enterobacter cloacae
atgagtatcaaagttcagcacgtcggcaaggcgtataaatattatccatcaaaatggaaccgggtcattgagaaacttctgccgggcgataagccgcggcacagcaagaaatgggtattgaaagatatcaatttcagtattgaacccggtgaagcggtcggcattgttggggtgaacggcgcaggtaaaagtacgttactgaagctgctgactggcaccactcagccgaccaaaggcagcattgagatccaggggcgtgtcgctgcgctgctggagctgggcatgggattccatcctgactttaccggtcggcagaacgtgtatatgtccgggctgatgatgggcctgagccgggaagagattgagcgcttaatgccggagatcgaagcctttgcggatatcggtgactacattgaagagcccgtgcgcatctactccagcgggatgcaaatgcgcctggcgtttgccgtggccacggcttcccgcccggatattctgatcgtcgatgaggcgctctcagtcggtgactcccgttttcaggcgaagtgctacgctcgaattgcggattttaaaaagcagggcaccacgctgctgctggtctcccatagcgccggtgatatagtcaaacactgcgaccgcgccattttcctcaaaaatggtgatatctgcatggacggcaccgcccgcgatgtgactaaccgttatctggatgaactgtttggcaaaaccgacaaaaacagcacgcccaaaagcgaaacggcaaccttgtcagccagcggcgaaagccagatgtcgctcgatgagattgaggatgtgtaccatacgcggccaggctatcgtccggaagaatatcgttgggggcagggaggggcgaaaatcattgattatcacatccaaagcgccggtatagattttcctccatcgctgacgggcaatcagtataccgatttcctgatgaaagtcgtgtttgattatgactttgattgcgtggtgccgggcattctgattaagaccctcgatggtctattcctctacggaactaactccttcctcgcttctgaagggcgggagaatatctcggtttcccgtggcgatgttcgggtctttaaatttagccttccggtggatttaaacagtggcgattacttgctgtcgtttggtatctctgctggcaacccgcagacggatatgacgccgctggacagacgttacgactccattattttacatgtggccaagagcatggatttctggggtatcatcgatcttaagtcgtcctttactagctaccaatga

SEQ ID NO: 146279 - DNA, 2127 bp, Enterobacter cloacae
atgactaaaaacttaaaaacgctggttagcgaattacctgagatttatcaaacaatttttggccatcccgagtgggatggcgacgctgctcgcgattgtaatcaacgtctcgatttaattaccgaacagtacgacaacttatcccgtgtgctgggccgccagcttaaagttctcgatctaggctgcgctcagggttttttcagcctgagtctggcaagcaaaggcgcgactatcgtcggtattgatttccagcaggaaaatattaacgtgtgccgagcgctggctgaagaaaaccccggctttgccgctgatttccgggtaggcagaattgaagaggtgatcgatgcgctggaggagggcgagtttgatctggccattggcttaagcgtgtttcaccatattgttcatcttcatggtatcgatgaagtaaaacgtctgctctcgcgcttggccgatgtcacccaggcggtgatcctcgagctggcggtaaaagaagagccgctctactggggcgtttctcagccggacgatccgcgtgaactgattgagcagtgcgcgttttatagactaattggtgagtttgatactcatttatcacaagtgccgcgtccgatgtacctggtcagcaaccatcgggtgctgctcaacgattttaatcagccgtttcagcactggcaaaatcagccctatgccggggccggcctggcgcataagcgcagccgtcgctacttctttggcgaagattatgtgtgtaaatttttctattacgacatgccccacaacaccctgatggcggaagagagtcagcgtaataaaaacgaactgcataatgaaatgtgttttctggcacaaccccctacgggctttgacacgccggcattactagcccacggcgaaaatgcccagtctggttggctggtgatggaaaaactcccgggtagcttgctgagcgatatgctggtggccggggaagagatcgatcgtgaaaaaatcattggcaccttgctccgttccttagcggtgctggagaagcaagggttatggcatgacgatgtgcgcccgtggaacgtgatggtcgatgcacggcagcatgcccgcttaatcgactttggttctatcgtcaccacgccacaggactgcagctggccggcaaaccttgtccagtcgttcttcgtgtttgtgaatgaactgtttgctgaaaacaaaaactggactggtttctggcgctcggcgcccgtgcatcctttcaacctgcctcagccgtggtcaaactggctgtatgcggtctggcaggagccggttggcagctggaactttgcccttctgttggcgctgttcgacaaaaaagagaaactgccgtcggctgaacagcagcgaggggcgacggagcagtggattatcgctcaggagacggtgctgctggagctccagtctcgagtgcgtaatgaaagtgccagctcggaggctatgcgtggagaaatccatgctcttgagcagcagatcgttcagctgcaggctgaacaggatgcgttagtggaaaaggctgtgctgccagtgtccgtcagccatgagctgagctggctgactgagaatatggagcagctgaccgcgctgctggggtcggcaaaagcgcaatcacaggctgaaattgagcccgagctgcctctggaaaccgctgagctactccagcgactggaaaccgctaaccgggagattcaccatttaaataacgaaaaccagcagcttcgccaggaaattgaaaaaatccatcgcagccgctcctggagaatgaccaagggttatcgttatctgggattgcagatccatttgctaagacagtacggtttcgtgcagcgttgtaaacattttattaagcgtgtcctgcggtttgttttctcgtttatgagaaaacatccgaaggtaaaacatactgcggtaaatgggttacataagctaggcctatatcagtcggcctaccgtttgtatcgtcgtatgaatccgcagccgtacagccagtatcaggctgatgcgcaaattttatcgcagactgagctgcaagtgatgcatccggagcttttacctcccgtggtttatgaaatttatctcaaactaacgaaaaataaataa

SEQ ID NO: 146280 - DNA, 2523 bp, Enterobacter cloacae
ttgcacattttgattgatgtccagggttaccagtcggaaagtaaattccgcggtatcggtcgcagtaccctggccatgagccgcgcaattattgaaaatgctggtgagcatcgcgtcagtattctgatcaatggtatgtactccattgagaatattaatgatgtcaaaatggcctatcgggacctgcttacggatgaggatatgttcatcttctctgccgtcgcgccaacggcctactgcaatatcgataaccacggccgcagcaaagccgcccaggcggcccgcgatatcgctatcgccaatatcgcgcctgatattgtctatgttattagcttcttcgaaggtcatggagatagttataccgtgtctatcccagcggacgacgtgccgtggaagacggtatgcgtgtgccacgatctgatcccgctgttaaataaagagcgttatctcggcgacccgaatttccgcgagttttatatgaacaagctggcggagtttgagcgggcggacgcgattttcgctatttcgcaatcggcggcccaggaagtgatcgaatataccgacatccccagcgatcgagtgctgaacatctcctcggcggtgggagaagactttgcggtgattgattattccgctgagcatattcagtctttaaaagacaaatacagactgccggatgaatttatcttaacgctggcgatgattgagccacggaaaaacatcgaagcgcttattcatgcttacagcatgctgcctgctgaattgcagcagcgctatccgatggtgctggcgtataaggtgcatccggaggatttggagcgtattctgcgtctagcggaaagctatggcctatcccgcagccagcttatctttactggcttcctgaccgacgacgatctaattgcgctgtacaacctatgcaaactgtttgtgttcccgtcgctgcatgaaggtttcggcctgccgccgctggaagcgatgcgctgcggggctgcgaccctgggttcaaatattaccagcttgccggaagtcattggctgggaagatgccatgttcaatccgcatgacgtgcaggatattcgccgggtcatggagaaggcgctgaccgatgaggcgttttaccgtgagctgaaggcgcatgctctcactcagtcggccaaattctcctgggccaacaccgcccatctggcgatcgatggtttcacccgcctgcttcagtcgtccaaagaggtggatgccgggcagacggaaggcgtgactacctcgcgcatccagacgatgcagaaaattgatgcgctgagcgaagtcgaccgtctaggtctggcgtgggctgttgcgcgcaatggttataaacagcatacccgcaagctgttggtggacatttcggttctggctaagcatgacgctaagaccgggatccagcgcgtttcgcgcagtattcttagcgaattactgaaatccggagtaccaggttacgaggtttccgctgtctactacacccctggcgagtgttatcgctacgcgaaccaatatctgtccagtaatttccctggtgaatatggtgccgacgagccggtcctgttcagcaaagacgatattctgatcgccaccgacctgaccgcgcatctcttcccggaggtggtgacacaaattgattgcatgcgcgccgcaggcgcattcgcctgctttgtggtgcatgatattctgccattacgccgcccggagtggagtatcgaaggtattcagcgtgaattcccgatctggctgtcttgcctcgcagagcatgccgaccgactgatctgcgtctcagccagcgtcgccgaggatgtgaaagcgtggattgcggaaaacagccattgggtgaaaccgaatccgctgctgactgtcagcaacttccatctgggggccgaccttgatgccagcgtaccgtccaccggcatgccggataatgcacaggcgcttttagccacgatggccgcggcgccatcatttatcatggtcggtaccatggagccgcgcaaaggtcatgtccagacgctggccgcctttgaggaactatggtgcgagggcaaaaactacaacttgtttattgtcggtaaacagggctggaacgttgacagtttgtgcgaaaaattacgccatcatccccagctgaacaaaaagctgttttggctgcaaaatatcagcgacgagtttttggtcgagctatatgcgcgttcacgtgcgctgatctttgcctcgcagggggagggctttggcctgccattgattgaagcagcgcagaaaaagctaccggtgattatccgcgatatcccggtgtttaaagagattgctcaggaacatgcgtggtatttctccggggaagcgccggccgacatagctaaggccgtcgaagactggttagccttgtatgagcaaaacgctcatcctcgttccgaaaatatcaactggttaacttggaagcagagtgcggaacttctcctgaaaaatctgccgattatcgcgccagccgcgaagcaataa

SEQ ID NO: 146281 - DNA, 1146 bp, Enterobacter cloacae
atgaaaattatttttgctactgagccaattaaatacccattaacgggcatcggtcggtattccctggagctggttaagcggctggcggtcgcccgcgaaattgaagaattaaagctatttcacggtgcgtcgtttatcgaacagatccctttggtggagaataaaagcgataccaaagccagcaatcatggtcgtctgtcggcgtttctacgccgacagacgctgttgattgaggcttatcgcttgctgcatccgcggcgccaggcgtgggcattgcgcgactataaggattatatctaccatggccccaatttttatctgccgcataaactggaacgcgccgtgaccacgtttcatgacatatccatttttacctgcccggaatatcatccaaaagatcgggttcgctatatggagaagtccctgcatgagagtctggattcggcaaagctgatcctgaccgtttctgatttctcgcgcagtgaaattatccgcttgttcaactatccggaggagcggatcgtaaccaccaagctagcctgcagcagtgactatatcccacgcagcccggcagagtgtctgccggtactgcagaaatatcagctggcgtggcaggcctacgcgctatatatcggcactatggagccacgtaaaaatatccgaggcctgctgcatgcctatcagctgctaccgatggagatccgcatgcgctatccgctaatccttagcggctatcgcggctgggaagacgatgtgctgtggcagttagtcgagcgcggtactcgggaaggctggatccgttacctcggatatgttccggatgaagacctgccgtatctgtacgcagcggccagagtctttgtttatccctccttctacgagggattcggtttacctattcttgaagcgatgtcttgcggtgtgccggtagtatgctccaatgtcacctctttgcctgaggttgttggcgatgccggcctcgttgccgatcctaatgatatagacgcgattagcgcgcaaattttgcagagcctgcaagatgatagctggcgggaaatcgccaccgcgcgcggtcttgctcaggcgaaacagttttcgtgggagaactgtgcgacccagaccattaacgcctataaattactctaa

SEQ ID NO: 146282 - DNA, 1122 bp, Enterobacter cloacae
ttgagagttctacacgtctataagacttactatcccgatacctacggcggtattgagcaggtcatttatcagctaagtcagggctgcgcccgccggggaatcgcagccgatgttttcacttttagcccggacaaagatacaggccctgtcgcttacgaagatcatcgggtcatttataataaacagctttttgaaattgcctccacgccgttttcgctgaaagcgttaaagcgttttaagctgattaaagatgactacgatatcatcaactaccattttccgtttccctttatggatatgctgcatctttcggcgcggcctgacgccaggactgtggtgacctatcactctgatatagtgaaacaaaaacggttaatgaagctgtaccagccgctgcaggagcgatttctcagcggcgtagattgcattgttgcctcgtcgcccaattacgtggcttccagccagaccctgaaaaaatatctggataaaacggtggtgatcccttttggtctggagcagcatgacgtgcagcacgatccgcagcgggtggcgcactggcgggaaaccgtcggcgataactttttcctcttcgtcggcgctttccgctactacaaagggctgcgcattctgctggatgccgccgagcgtagccggctgccggtggtgatcgtcgggggcgggccgctggaggcggaagtacggcgtgaggcgcagcagcgcggactgagcaatgtggtgtttaccggcatgctcaacgacgaagataaatacattctcttccagctctgccggggcgtggtcttcccctcgcatctgcgctcagaggcgtttggcattacgttactggaaggcgcgcgcttcgccaggccattgatctcctgcgagatcggcaccgggacctcgttcattaaccaggacaaagtgaatggctgcgtgatcccgccaaatgacagccaggcgctggtggaggcgatgaatgagctgtggcataacgatgaaaccgccagccgctatggcgaaaactcgcgtagtcgcttcgaagagatgtttaccgccgaccatatgattgacgcgtacattaatctttatacgtcgttactccatgagaaaccaggctcttga

SEQ ID NO: 146283 - DNA, 195 bp, Enterobacter cloacae
atgcgcctatttaatccgatcacgatgacagaggtcattcatggtttccacgatactggaggtgctattcaactccctgaggataactggtttttcacgatgcgggaaataccagagggaatgcgacttgacgtcaatgaaaaaggtgagccatctcttatggaaattaaatctgatatctctggcaacgaataa

SEQ ID NO: 146284 - DNA, 276 bp, Enterobacter cloacae; identical to SEQ ID NO: 82548

SEQ ID NO: 146285 - DNA, 993 bp, Enterobacter cloacae
atggacttagtcatgtccttattacaaaagggattattagaaaaggcattagaccttgccatttctgaatcattcttcaatgcaacgtcgcctgatggtataaagaatgctttaaaagctggctatgatattaatgctgttcataataacggagacaatgccctttttagctgcagaaccctggaagccatggattgcctgctaagttatggaattaatatacaccatatcaacggacatgggcaaaatgcgctctttcatcaaaaaaacccagaaatactgaagaaactgattggactgggtttagacacctcgcatacggatactaatggctacacatgcatttttgaacattacaggaatgctgaaggactgacagaattaattaatgctggttgtgatataaatcacatcgataaaaaaggaagaaatattctcttcctgcccctctccccggaagttttatccgtagcaatagatgctggatgcaatgtcaatcaaattgatcattcagggaaagggtttattgacaatgtatatgattatgaattacatgatatcattctctcgcatattgatagatttgacagaagaacgctgcatgtagatttttgtaatctcgactcagcctttttcttgtattacctttctgaacatggattcaaaatagaacttaataaagaccatttcaccattaacagttacattggtgattataaagaaatcttatccatacttgatttcatcagtgaaattcatgatattcacttctataaatacaaaggcggccctctctataaagatatcgacaagcgaattgtaaagtggatgataagaaataagctcttggttgatttatcaaaaataaataaacacaaggattacgaagaaattaatttatacaaaatccgtcgcgaacagaaagaaatctccaagcatttaaaacctgctaaaagtatatctgtaacagttaaaaatggcggaagattgtga

SEQ ID NO: 146286 - DNA, 2598 bp, Enterobacter cloacae
atgtctgaattagcacaagaatcaatcggaaccaatgacttcgaaaagtggctgaatgaacgtagtaactggcttcaaacggcagcaaaacagcttatcgagaataaacgtttaccaaatgaggtcgaactcactgagctggttcgactctgcaaactggaagcagctaaacaaaatgaccctgggttcttgaaggttgcacctggctcattctcagcagggttgctacagcgaattgtacgtattgaagaagtaagccaagtatttggtgttaatgccatcaaaccaggggcgtccttaccattcggagctggtagtttagctgttatatatgggcagaatggctcagggaaaagtagtttttctcgtctgctcaaacaactctgtggctcacgttcaagggacgaaatccgcccgaatgttttcagcagcgaagagcatacatgcagtgctcaatgtcgaatcaccattgatggtaaacccgtagaaatcaattggcaggcgggggctgccccacatccgatgctcaagtatgcccaagtatttgactcgaaaactgcgactcaatatatgggacgcactgaatcaagctacgaaccgagcagcatgcgttttatatctttgctcattcagatctcaggaatggtttctgaacaattaagtcgagagaaggaaaagcttgtccgtgctcttccacttttcccaagtgatcttacagagaccgccgaaaatacttggttctactctcttaaagcatcaacctccgctgagaaaattgaatcgttttgccaatatgggaatgatttggaagatgagcgtatcaaaggtgaagctctgttagcagagaaagacatcaagggacgcctgattgcaattagtaaggaagagattgcctcagaaaacattaagcaggccatgaggttattgaaggaaggtcttgcggatgggaaagccgaggaattgtttaaggcaaaagaattggctgttgcagcaagaaaggctgccaatatagttgcacagcaggcattcgcaacagcccctctacaaggcgttggtgaaacggcttggaagctaatgtgggatcaagcgcgaaactactctattgttcatgcttaccatagccgcgaatttcccgttactactggaggtgcgtattgtgtgctctgccagcagaaacttacggaggaaggctcagctcgactcaaaagttttgaggctttcgttacggctggtttagagaccacggcaaaaactgcggaagccactagcgctgaactcattgcgaaggtcgttcagttaccttcaatagaggattggattgcacggctggctcaattgaaatttgatgagacctttgctcgtgcctgttatgaaactttgaaagcaaggcgctcacagtttgaggcatgtaccgccgttggttctatcatcgcattcgattgggcgcttattgatcaggcagttgaaaaacgtgctatcgacttaattgctgagaagattagtttgatgcaattgcaacaagatgggcaacgccagcaacttgaaaaacgcattaagcaactcaaggcactgcaatggttatgtcaaaacaaaatggcaattctcgccgagcgtgagcgcttggttgcagtggatttgctagataaagctgtgagactaacggccagcaattccttgacaactaagcgtaccgaactagggagaactgagcttgatgctggatatcagagccgttttgatgcggagttaaaggtacttggtgggcgacgtttgccggtagtgccgcagagcaaagctcaaggtaaaggagtaataacttttgggcttacccttgtcggggcacgagctggcttcactcctgatgtaatactcagtgaaggagaagcccgcattgttgcattagcggcattcttggccgatacgactggttcgaatcagttagcccccttcatctttgatgaccctatttcgtcattagatcaagacttcgaagagcgggttgtagctaggcttgtcgagttagcgaagaccagacaggtcataatcttcacacaccgcctttcgcttgtttccatcattgatgctgtaattaaaaagcacagtgagaatccggctaatgagaaaattaaccataccgtgcagtcgcttagacgattagataaaatttcgggaatcttggcgcaacacagcttgcgggatgccaagcctgaaaagtcgcttaatatgattagggatcatgtcatccctaagctcaaaaagcatcaagccgatgcagatgccgatgtttatgatcttacggcaaaaagtgcatgcagtgattttcggataatcttggaacgaatagtagaatttgtccttttaaatgatgtgattgtccggttcagacgtgatgtcaatactaaagggaagctgcggggtatcaccaaggtaatagcagaagactgtgatcttattgacgcgctgatgaccaagtattcagtttacgagcactctcaatccgatgagctgcctctggttccggttgaactcgatgaattcgaaaaagatgtattggagctcattgcatggataaatgagtttaaaactcgaatcggctga

SEQ ID NO: 146287 - DNA, 471 bp, Enterobacter cloacae
atgaccccaacggtctcttcgcttattagtgcaggtacaatgtatctaattctctactggatttttgactcaaggttatggaagtggaagttaatatcaaaaataataaatgtcccggacctgtcgggagagtgggattgtgaagggcgcggcgaaaacaaggaaggagacgttttttcatggcatgctaaaattaatatattccagtcatgggataaagttcatatacggttgcaaacctcacagtcaggttccgacagcatagctgcctccattatatatgatggagaaataggttatcggttagtttacaactacaggaatgatccgagaataaacgaaaaagagttaagtccgcatatgggatttgcagaattaatttttgataaaagcctgacaactgctgatggcgagtattttaatggcagaggtcggaatacctttgggacaatgaagctaaggaagttataa

SEQ ID NO: 146288 - DNA, 984 bp, Enterobacter cloacae
atgacagccttagcaaaaaaagcagggctttctttgagaatgatcgttgattatgagaaagattattgcctatatgagccatctgagcaaactatagcttcatttgtagatgttttaaaatatcctgccgattttttcttcggtgaagatattgaatcaattgatccttctacagtatcttttcgttctctgaagaaaatgacatctgcacaggaaggtgcagcaattggtgcaggtcaactcggattgattgttagtgactattttgaacagtattttaaattaccagaactcaacctaattgatttaagaggcgaaacacctgaatcagctgcacgagcacttcgtgattactggaaacttggcagtaaaagcatttttaacatggttcatttgttagaaatgaatgggattaaagtattttcattatcagaaaatacagcggaagttgatgcttattcgttttggaaagcaggaaaggcatatgtatttctgaacaaccaaaaaactgctgaacgaagtagatttgatgcagctcatgaactggggcatttggttctgcataaacatggaacacctcaaggcaaggatattgaaattgaggctaatgaatttgcttcagcgtttttaatgccaaaagagaatattctagctgcaaaaatgcgcaatccatctttagatgccgtgcttcaacttcgtcataactggaaagtatctacctttgctcttatttaccgtatgaggcaagcgggagcattaactacttggcaatataataatcttgtaagagaagcttctgcacgtgggtttagattgagagaggatcaagtaatggagcgagaaagatctatgatcattgactcattactcgacgccctagctgatgatggtataaccttaccggtgatttctcgccagctaaatatccctgtaggggagctttctaatctgttgttcagatttggtttgattcaaagtatctga

SEQ ID NO: 146289 - DNA, 669 bp, Enterobacter cloacae
atgaacaatcaaatgcagcgtaaggtagtttttggtgatgaggcaattgccaatgtttctaaatatgggattagcgagtatgcacttcaagcagctatagaagatggtcttctggagatcagacaaagtactgatctagatgctaaaacagatccggggtctcgtgcttggggagcggttattcgtggcttgcgccgtgaattgcttactgatagtgaagaatggagcttttcatttgttagcgggttaaacctgactcataacaaggataaagggttaaatattctcgttatgagtggcgacaagtacactggtcttttagatgggaatcccaagagcaaaaaccctaaaggggctgctactgaagttctggtcggtgaaaactttgaattgtttaatcctgaaaaagggatttctcccattgtcgcatcagaacctgttgattcgatgatcaactttgttctcctttactttttcgattatggtaataaagaagtgcgctatgaattatccattcccgatggaatgagcaattctgctggtaaaacgcgaatagcttcatggaaggaacgatacattttcgaagcgattccgtttgttaataaagttatccctcttaaagaagagtttaacgaaacccctgcgttcacagttattagaaacgagtag

SEQ ID NO: 146290 - DNA, 201 bp, Enterobacter cloacae
atgttgagtttaaagcctaaagaacatgaaatgcttctcaagcgtggtgagcacattgacgaatcggacctgatcaaagcacctgtttgtgatggcacaagagaagagcgtttacagtctcttctagagtggcaacgtcaggttgcaaaaacagttcttggtgaagagcaagaggctacccctcaccttttttataaataa

SEQ ID NO: 146291 - DNA, 504 bp, Enterobacter cloacae
atgcctgctatcgtttattatcatcctgattttattagtggtaattatagaggagagaaattttgtgatttctcactcttgactaatgatcttacttctaattgcgaagctggtcttttaacactatttgttcttgatgtagaagatggaaaacttcttcgagggaaaaataagccgtcttggactgatactaatggtgatgaaatatcaatccttataggatataaagcaggcggtcattggcattatcatattggaccatatgatcctaactcaacatctacccaagccaagatccgtgatttaaatatatctggggcaacatctgcagcagttattcattacagatggtatgaccctacaactaagaaaaagctaataatactatcttttggtccgaaacaccgtaaatttcccaaaaccagagagttgcctaatcatttgacttctcggggtgggcttatcagctttggtaaactaatcaaagctataactgataaatga

SEQ ID NO: 146292 - DNA, 2646 bp, Enterobacter cloacae
atgaaaatgaaacatatcgcgtggtttaagcgatctcgtattctgcccgaaggcagcgcacacatatcagccacagtcaacgattggggaggagaaaactatttacgttcggaactgttttctacccctcagttggaacgctttggaaaaaaactggctcgtacgcacaaattgtctccggaaatactaccgtactaccttcttaaacgactaactgacaatgaaacgataattacgcgatgttgctatctactcaatgcaggaaaaaaaacgagtatcatgcccgcaggtgagtggctgctggacaactattacctgattgaagagcagattcgcatggtacgccagcacttaccgaaaagctttggtaagggtcttccgctactagcctacccgcatagatgtcccagaatttatgacttagcctcagaggccatagcgcatggcgacggacgctgggacaccagcagtcttaccagttatatttccgcctatcaagaggtgacacctctgacgttgggggagatatgggctttgccaggaatgctgcgtctagcgctgattgaaaacctgcgtcgtgtgagcaacgaagtgacccaagcccagcaggagcgaaatcttgcagatatgtggataacgcggatttttgattgtgcagagaatgctcccgccgacctaattatgattgttgccgatatggcgcgtactcaccctccgctgagcagtgcctttgtcgctgaaatggttcgtcgtctgcagggacatggcaatgctcttgcactccctctgaattggattgaacaacgtcttgcagagcaaggtgttacaactgagatcctgattcatcgcttcaatcagcagcttgccgccagccagctttccgtcagtaacagtatttcgggtttacgtctgctgaatgaaacgaactggtctgattttgcagagaccatcagcgtagtcgagcaaacattacgccttgacccagctggtatatatcctcacatgcacttcgacacccgagatcattatcgccatgtgattgaaacgcttgccagggatgcgatcttaagtgagccggaagttgcaaaccgtgtgatggcaatgtcttgcgaaccgagtctagatcctgagcaccgacatatcggttattttctgcttgggggtggaaggccacaacttgaaaaactgttgtcagctgaaaggtctctattgaaacggctgcggcagagtatgaataaatcgccccttctgtcatggcttggtagcctgagtcttttgaccacggccgcttcagctaccatattgtatgaaactgcactacagggtatattctggctgctcatccccctagcactcccccttattgttgccattagtcaactcgccagcgatatgcttagcgaagcaacgacacgctttcgtattcccaggcctctgccgcggatggacttttcaagtgggataccagttgaatatgccacaatggttgcgatcccttgcatgctgacaagctatgaaagcctctgcaaacttctcttccgcctggaagtctgcagccttggcaatcaggatgaaaatctctgctttgcacttcttaccgattttccggattcatcaactgaggataccgaggaaaacactgtccttttaaggcaagcgattgctgagatgcagagacttaatcggcgcaaccctagcggccgatctcgattttatctactgcaccgccagccggagtggaacgattcgcagagaatctggatgggatatgaacgcaagcggggcaaactagctcttcttaacagctggttacgccaaccgggaacccagttttcgagcgttgcagaccttccctcgcaggctttgcccggacggattaaatatgtcatcactcttgacagtgatacgctcctgcctcgtgatacagcccataaactggtggccacaatggcgcatccgctgaacaaaccagtatatgatccaacgttccaacgagtcgttaaagggtacggaattttacagccaggcttagcagaggaaatgcctctttacggtcaggggcgctacgccgccatgcgcagcagcgtcccgggtaataatccctattcgatgatgtcttcagatatatatcaggatcttttcggcgagggatcgttcgtaggcaaaggtatctatgacgtagatatttttgtccagtccactgccaacgcctgtccggaaaatctcgtactcagtcacgacctgctggaaggatgttacgcccgctctggtctgctgagcaacgttttactttacgaacaatatccaactaattatctctcagacgtcgcacgtcgtacgcgctggatccgaggagattggcaactgctcaattggctgagggttcgggtcagaaaagctgacggaagtagggaaaaaaatccattgtccatcctttctcgctggaagttattggataatctccgacgcagcctggtagcgccgtcgatcatgctgcttgtatttagcacgctgctctggctccccaaccctttatactggtttagcgtgctaacgctaatatggtttcttcctgcggcgcttagcatagcatgggatctcgttcataaaccgcaccgccgtcctgacctgctccccgttgattag

SEQ ID NO: 146293 - DNA, 573 bp, Enterobacter cloacae
ttgaacgacttaatgattgacctcgaatcgatgggaaaaaagccaaacgcgccgatcgtgtcaattggtgccgtcttttttaaccctcttacaggtgaacttggccaagaattctatatggccgtctcgcttgaaagcgcaatggatcagggtgcggtaccggacggagatactattctttggtggctcaaacaaagctcggaagcgcgctcagctatttgtgttgatgatgcgctgcctatcactgatgcactgtcggaactgagccatttcattcaccggcacgcagataatccaaaatacatgaaggtctggggtaacggtgccacctttgacaatgtcattctgcgtggagcttacgaacgcgccggccgcatttgcccttgggccttttggaacgatcacgatgtgcgcactattgttacgctcggtcgcagtgtcggtttcgatccgaagcatgacatgccttttattggcgatgtgcacaatgccctagctgatgcgcgacaccaggcaaaatatgtgtcagcaatttggcataaactgatccctaccaccagcgacaaattttaa

SEQ ID NO: 146294 - DNA, 207 bp, Enterobacter cloacae
atgctgagcctcgattgtgttcccatctcaacttattgcaaagagactggcgaaacccctgatgccattaataagcgcatacagcgcggtgtgtggcgtgaaggggttcaagtgctaaaggtcgaaggcgttaaggaaagatggattgatcttagtgaggttgcaaaatgggcacgacagaatcgcctaaactcccgcgcggcgtaa

SEQ ID NO: 146295 - DNA, 1167 bp, Enterobacter cloacae
atgggcacgacagaatcgcctaaactcccgcgcggcgtaaccatcaggaaacatcttaatggtgaaaccatcaatattaccttcacttataaaggggttaaatgccgtgagcctctttctaatctggacgtaacccccaaaaatatcaaatacgccgagcgcacactcggcgaaatctataacaagatagaaagggggacgtttgtctatgcggaatactttccccgttcagcccggttgaaaattttcggcaacgctgccgcgggcaaaacggtgaggatgtacctagatgagtatctagtgatctgcgaaacgaggaagttatcaccttcgacaattggcgggtacaagaaatgccgaagtgctttgtcttcacttcatatgtttcccgcaagtgagttaaccccagcagcattgaagacatggatccagagccagaaaacgacattgaagaccatccgaaaccaactttcgttcctgcgttctgcactggatgaggcagtgacagatggtgtgcttcagataaacccagtatcactggtaactgcttcaaggtaccaaagtgataaatcagaagcagaaagtagttatgtggtagacccgttgtcgccagcagaagtcgacgcattgctctcagccgctggaaataagcaatgggagaatcttttccggttcgctatacaaaccgggctgcgtagctctgagttgtgtgctctgcgttggcgtgatatcgactttttatcgaggacagcacacgttcaaaacgccagtgtagttggcgtcatcaaaggaacaaaaacaaaagctggtactaggaaagtagaactgactgaagaggcattgaaggctttggccagccagaaattgttcacttttatgaagggtgaaacgatattcgaagacccaaaaagcaacaaaccttgggccagtgctgacgcaattagaaaaaaagcatgggttccaatattgcgtaaggcaggtattcgttacagaaatccgtatcagactagacatacattcgccaccagtcatatcagcaggggggttaaccttttctggcttgcaggtcagatgggccacaagggcccagagatgttgtttagacactacggcacatatctgaaggaatacgatggacaaacaactcgcaaggagataaaaagataa

SEQ ID NO: 146296 - DNA, 1734 bp, Enterobacter cloacae
atggcgaatcaaattactaagattagaaaaatacaagttaccaaatttagggggctaaagaatattaacattgagtttggtaatagactcacagtaatttgtggaaagaacggcacatccaaatcaacaattcttggtattatcgctcaaatatttagtttttcacgagacctgtcaaaaaagccggtaactaaccttaatgcttataaaaccctaacaaataagccttttaaatcagcatttaaagaacatttcagattgtcagagcaattcgatgtttcaggctctatggatgttggtatcacattgtatgacgcaaccgttaataaaaacttagataaattatctctaggtttatatgagtcgaaggatagaaccaaagcaagagctgtagtccggggtaacgatggtatcgcaggtagaaaccaaagtagaaacgttactcatccagtaatatttttaagcctagctaggctattaccaattactttaagaaatgattattctaccagagatgtacaatacataactgataatagagaagaaataaaaaccatgaataatcaacttcttttgaaaaacaatggaagctctgttactgctacaaaaggaactattgattcaatggttgtccacggtgacaattatgatcatgaatcagtttctgtaggtgaagacaacgttggtcagattattcaagcaattttctcttttaaaaggctaagtgaaacttatcctgattatcatggaggcatacttcttattgatgaagcagacgctggattattcccagcagctcaagtagagttaattaaaattttagcaaaagctgcgaaaagctacgatctgcaaatcataatgacttctcactcaccccttatcattgaagatatttatcaccgctcgctccaagatgacaaagcattcaagacaatatatctcacagatactttcggggacatccagacaaaaaataatttatcctgggctgaaattaacgccgatttacatgttgagacagtgcgaatcactaatgatataagtttacctaaagccaatgtctattttgaagataaagaaggatatgatttcttcaagcaaattattgtggacagaaaaatcaacaaaattttaaatccactcggaaatattaatataagctgttcagcaatccttgatttaatggcacgaaaaatacctgaattcactacaaaaagtttaattgtattagatggcgatgtggaaagcgataatagtgataacgcaaagaaagcgaagcgagagcgtaatttgtgcttattacctcatactttacctcctgaccaaatgatttttgaatttatgtataacttaccacctgatgacatattttgggaaaataaggataggttcacaaaaaccgtatttagacgcataggttcagatataattgctaatctcagattaggggatatgccaataaacttaaaagaagcaatagaagcatatcaagggaataataaaaacattgcaggccgggtaagaaccatgtttaaagacttcgcccatacaaatgaatttaggggcctagttgaaggtccagtgaaatataatccatatagatattgggcgaaaaagcacccattaaaaactgaaaattataagcagaaacttatcaaaagccttaaatataccatggttaatgggcatggtgtagactctgcattgattggtacttaccttgaagataactaa

SEQ ID NO: 146297 - DNA, 867 bp, Enterobacter cloacae
atgcgtttcaataccccacttcgctatccgggcggcaaaggaaagttatcaaacttcatgcttaatgtcattgagttgaataaactttcacctatccattatgctgaaccgtatgctggtggggctggccttgccttgaaattgcttgatcttaaagttgcagagaagattatccttaatgacttaaacatctctgtttatgctttttggtattcagttcttaatcatgcagatactctttgttcaatgatagaaaacacagctgttaatatggatgagtggtataaacagaaggatgtaataaataacacaaataaacatgatctcctgacaataggattctccacctttttccttaatagaacgaatcgctccggaatattaaaaggaggagttattggtggaaaaaaccaagacggagagtggaagttagatgcaagatacaacaaaaatgatttgatttctcgcatacaaaatattcatgctgaaagagagcggattgaattgtttaatcttgacgctatagaattcatcgatactgtagttaccaagttacctaaaaactccctaacttatttagatcctccctactacgtcaaaggaaaagggttgtatattaatcattacgaccacaaagaccatgttgaagtggcaaaagtagttcaatctgacataaaaactccatgggttgtgtcttatgacaatacacctgaaattcgagatatgtataaaacacagtctttgatgtatggaataaattatagcgctcaagatcggtataaaggctcagaggctatgttcttcagtgatcaactgaaaattcctttgacagagcatccaactaaaatgaaagcgccaaaaaaatag

SEQ ID NO: 146298 - DNA, 468 bp, Enterobacter cloacae
atgcagtttaagcgccaaggtcgccgggttcaggtgctcgcctaccgggggtatgacaaggaaaaacgccgcgccatcgtcaagatgatggggtctattgacgtatattcttacgagctgtcagacggcctagttgagaatctgacagacgaagaaagaatagagctacagtcatacatcgaaacagaaagacaggcagaagaaaagcgaatccgactgtattccgccaagtctgccgccagtcgtatttttgaggttgccgacacgatcaaggccggggactttgagccgtccgaggcatgggcggcggatacctgggcggcaatcgaggcgctgaccaaggccatgcgcaaggcgggctacccgaagccccgcaaagcgccccagaaagccgcagacgcgccgatgccgggtcaggctgggttaccctttggggatgcgccagaaacgccagaaagcgcctcctga

SEQ ID NO: 146299 - DNA, 855 bp, Enterobacter cloacae
gtgagcaagcatgacctgacccacgcccggcacgacccggcgcattgtctggcccccggcctattccgcagcctcaagcgtggcgagcgcaagcgcggcaagctggacgtggtgcatgactacggcgacggtaagcgcatcgagttcagcggcccggagccgctgggcgctgatgacttgcgcatcctgcaaggacttgtggcaatggctgggccgggtggccttgtgctgtcacctgaaccgcagaccgaggccgggcagcaactccggctgttccttgagccgaaatgggaagccttccagcaggatgcgatggtggtcaagggcagctatcgagcacttgcccgcgaaattggctacgccaaccccgacgacactaagccggttcgggagtgcatcgagcggctttggaaggtgtccatcatcgcgcaaaacggcaggaagcggcagggcttccgcctgctgtccgagtacgccagcgacgagcaggacggcaagctgtatgtggccttgaatcccttgattgcccgcgccgtcatgggtggcggtcagcatgtccgcatcagcatggacgaggtgcgggcgctacagaccgacccggcgcggctgatgcatcagcgcctatgcggctggatcgaccccggcaaggccgggcgggtggaactggacacgctttgcggctacgtctggccggaggaagccaacccggaagccatgaagaagcggcgccagacggcccgcaaggcactggccgagcttgccgccatcggctggacggtgagcgagtacgccaagggtaaatgggaggtcaaacggcccgccacccccacggtaactctccccgccccgatctga

SEQ ID NO: 146300 - DNA, 864 bp, Enterobacter cloacae
atggctatcaacattatgaaggcgttccagcaggaaccgccacaactggatttcatctggccgggctttctggctggcaccgtgggcgcactggtggcccccggcgcgaccggcaagagcttctgggcgctggaagctgctatgtccattgcttgcagcgtggcaggcggtgacgtggtgaacctcaagccgcagcacaccgggcgcgtggtctatctggccggggaagatcccgaacccgccctgatccggcgcgttcacgccatcggccagcacctcaaccagtcggcccgcgaagccatcgccgacaacctgaccctagagccgatcatgggcaagcgcctgaacgtcatggacgagcggcaccttgcccgcgtggtggagttctgcgccgatgcccggctgatcgtgctggacaccctgagccgcattcacagcctcgacgagaacagcaacggcgacatggcgcggcttgtcgccacgctggaacacgtcgcggccagcaccggggcgtctgtcctgtacctgcaccacgtcagcaagggcagcgcccgcgaaggccagaccgaccagcagcaggcggcgcggggcgcttcggccttgatcgacaatgcccgctggtgcggcttcgttgccaagatgaccgaggacgaggccaagcgcctgagcgaccgcgcctatgaccggcagcccatcggcaacgaccggcgcgggttcttcgtgcgcttcggcgtgagcaagcagaactacgacgctaccccgcttgaccagtggtacgagcgccgagacggcggcgtcctgctgcctgtggaactgctggaagtgccgaacggcaagaaggggggcagccgtgagcaagcatga

SEQ ID NO: 146301 - DNA, 951 bp, Enterobacter cloacae
gtgaagcgcgaagggcgacacctgtccgtcaaggctggcggtgatgaggcgtaccgcgtgacccggcagcaggacgggcgctggctctggtgcgaccgctacggcaacgacggcggggacaatatcgaccttgtgcgcgagatcgaacccggcaccggctacgccgaggccgtctatcggctttcaggtgcgccgacagtccggcagcaaccgcgcccgagcgagccgaagcgccaaccgccgcagctaccggcgcaagggcttgcagcccgcgagcatggccgcgactacctcaagggccggggcatcagcccggacaccatcgagcacgccgagaaggcgggcatggtgcgctatgcagacggtggcgtgctgttcgtcggctacgaccgtacaggcaccgcgcagaacgccacacgccgcgccattgcccccgctgatccggtgcagaagcgcgacctacgcggcagcgacaagatctatccgccgatcctgccgggcgacccggcaaaggtctggatcgtggaaggtggcccggatgcgctagccctgcacgacatcgccaagcgcagcggccagcagccgcccaccgtcatcgtgtcaggcggcgcgaacgtgcgcagcttcttggagcgtgacgacgtgcaagcgatcctgaagcgggccgagcgcgtcaccgtggccggggaaaacgaaaagaaccccgaggcgcaggccaaggccgacgccgggcaccagaaacaggcgcagcgggtggccgaaatcaccgggcgcgaggtgcgccaatggacgcccaagcctgagcagggcaaggacttggccgacataaacgcccgtcaggtggccgagatcgagcgcaagcgacaggcagagatcgaggccgagagggcacgaaaccgcgagctttcacggaagagccgggggtatgatggccccagcttcggcagataa

SEQ ID NO: 146302 - DNA, 684 bp, Enterobacter cloacae
atgacgaagctagagaccgtgcgggccttgaacgattcaggcccacagttgcagatcgtggagagcgtcaggacgttgcagcagtccctgagcctgatgcacgaggacttgaagcgcctaccggtcgcagtctcgaccgagacggcgcagaccttggaaccgctggcccgactccagcaggacgtgacgcaggttctggaagcctacgacaaggtgacggccattcagcgcaagacgctggacgagctgacgcagcagatgagcgtgagcgcggcgaaggcgttcgagcagaaggccggggagctggacaagaccatctccgacctgtccaacagcctgtcagggctggaaacgagcatcagcagcatgaaggagaccgcggagcaggtggtggccttgccgggcaatctggtgagcgcacagcagaatatggcgcaagccgccatcaaactgaccgaggcagcgaacaagacgcgcccgcgcctttggcggcaggcgctggggctgattctggccggggccgtgggcgcgatgctggtagcgactgggcaagtcgctttaaacaggctagtgctgccaagcgacgtgcagcagacggcggattgggccaacgcgatttggaacaaggccacgcccaaggagcgcgagttgctggaacagatcgtcaatcggcccgcgaactag

SEQ ID NO: 146303 - DNA, 234 bp, Enterobacter cloacae
atgctcaagctcttgggtcgcctcgatggcgcggcgggcttcccactggcccagccaaactttcccgtccagccctacccggcttgccacgatgtggatgtgatccttgtccgtgtcctggtggcgcactgccacccacggcgtattggtctggtcaaagcccatgcgctgcatgaagtcagccgtcacggcttcccacttctcggcgctcaggcgctcaccgggaggcagtga

SEQ ID NO: 146304 - DNA, 432 bp, Enterobacter cloacae
atgaacactgacgaatccaagcgccgccgccgtgggcctgcgccgctcgacgccacggacaagcgcgggcataccgtttctgtgcgcctcaacgaggccgagcttgcgcggctggattcgcagcgtgacgcggtgcagatgcagcggggcgagtacctacgcgccgccgctctgcatcgcctgccgcccaccatcccggcagcgaaccgggaacagtgggcagagttggcccgcacagcggccaacctgaaccagatcgcccggcacctgaacgaagggcagcggggcgacggggagcgcatcggcaaggcgctgggcttgcagttgagcgccgagcttgccaactgcctgcgattgctggtgctggtgcgcggcgacttgataggcgtcaagcacgactcggaggacgtggaagatgaaagcgaaggttag

SEQ ID NO: 146305 - DNA, 2856 bp, Enterobacter cloacae
ttgtttaccgcctacgcaaagaatggcggctctatcaatgtgaaccaagggattttgagcagtaacggaaacctagcccatactgtgaatctggttggcggcaacctgaacatgactggcggcgttattaacgctgccgggactaacagctatggtgttaatggttcaaatgaagcacaagcatcaattaaagatctgacaattaatgcgagtggcggagggggagggggcgtaacactctcagcaggcaagcttgttgcaagcaatgtaaatattgtcgcttctggtgcggggagtcagggaatatcattagcctattctacatttggaactgcaaatgctgaactcgataacgttgatattaaacttcttggcgcgggtactaaagcagggattatgctgggcaatggtacagtaacagggcagaaagttacgattacctcatcagatgataaccgagggatcgacgtttacaatgcagggggggcaaatataggaaccctgatgctcaccgacagcaaaataaccagtgaacatggtgatgctgtttatatccttggtggtaatgtcactcttaaaaacactgaaatcgaaacaaacgacggtcagggtgttaatgtcaatcgctacagtaccttcaatatggatggggggagtatttcttccacgggtgattacgccgacgggatctgggttggcggggaagatgcggttgttaacgtagataaagccactataacaactaaaggcgtaaatgctcacgccgtagacgcacaattcggcaccacaaacctcaaggatttgttattaacgtctaccggcaaattcagttcagggatctacagttcctctcaggtaaatggtgaaaacctgattatcaacaccgaaggggtgaatgcccatggaatcaacgcctcattaggtggcgtggtcgatatcaaaaacgtcgaactcagtaccaaaggtgccaacgcggtggggctgctatctaacgcaggttcaacgattaaggcagataacctccagttgatgacctcatctaatgatgcgcacgcgctgtgggtccgcagcggtacagccaacatcagtaattcaaccttaaccactaccggtacaaacagctggggcatcgtggctacggcggcatctgctggcgctggcagctccattagcatggataacgttagactggatgcgcaaaaaagcactgcaattgagactttaggtgcgccattggatctaaatcttcaaaacggcacgcaagtgacggggggcaatggaatcctgcttgatagtcttgcaggtaataccactgatccgctgtacagcggcaatgtaagcctaaaggctacgggcgatgtcgttttaacaggagatattcggaccagcacggctaatttggtggatgttgctttagcaaaaaattctagtcttacaggtaaaatttctgccattcgctcattgtcgttagatagtagcagcctttggaacatgacaggagattcgtcatttggcaatttaagtcaagacggtattgttaattttacccataccggaagcgcttttagcaccctgactttagacaatctcagcggtaagggcggattcaatatgaataccgacctggccagtatggtaggcgaccttatcgtagtaaaaggcgatactagcggtagtcatgctttggatattgttaacagcggccgcgaaccggtacaggacaatcgcgctcttacggtggtggcaactcaaggcggtgacgctcaatttacgctgaatggaggtgcggttgatgctggtacgtatgaatacgggcttgaacatcgcggtaatgactgggtgctagcgcagaagcagagtagcccgccaagtccggatccaaatccagcgcctaagccagatccaactccgaaaccggaaccaaaacctgtttcaaaccctattttgacaccaactgcaaaatcggctctaaacatgttcaacgctcttccagcagcatggtatggcgagttatcaacgctgcgccagcgtatgggcgaagttcgagaaggttatggtagcggtggtgcttggattcgccttattggtaatgaaagccacgttcagccacgtgatgattcaacctataaacaaacccagtcaggttttactgttggtattgacagtccacacgagttggaaaatggacaaaatttgacaggtcttttgatgggctacagtcagagcaaaatggatctggataataatagcaatggaacaattaacagcttctttgtaggtggatatagcacatggctgcttcaagatggctggtacattgacactgttgccaaagcaaacaactttagcagtcatgcagaagttcgtatgagtaatggagtgagaactaaaggtggttttaatactccagggtttggtctgtcgttagaaggtggtcgccaaatcaagttggatgatggctggttcgttgaaccatcgcttcagttgtcagcactatggattgatgctgctgcatacgattacagcaacggtctacatactgaaagcaaaagttcttctgctcagcaggcggggatgaatggtgtattgggacgcactcttgaattggataatggtatgaaactacagccgtggattcgtgctgcagtcattcaggagttctctgaccataatacagtccgcataaatggtaatcacttcaataatgatatgtctggaactcggactgaatacggtgcaggtttatctgcacaaattactccgtttgtacaaatatacgcagatgcgagttattcttacagcgataaatccgagtcacctctgagggggagcttgggttcccgctggactttttaa

SEQ ID NO: 146306 - DNA, 639 bp, Enterobacter cloacae
atgtatgatatcaacaaggtggcagttaacgctcaatgcatggatcgcattcaagagcttttttcatctttaaaattatttaccggaataaaaaatggcaaagagtcacaaagattctgccttgataaggatgggcgtaggatatgttttttattatacagcggaacctgtctagtgaaaagaaaccaagactcgttggtattatcaacaattacggcacccgggtttattggcctgcatgatatctttcatgcgaaatcagatgtgattatttcaacagttggtgatattcaatatggtatggctttagttgatgaattattcagctatattggcaaaaatctattatgggaaaacatggcatatatgctaatgatttcatcaacacgttttatcgaatatcaatatgaaaatgttggcatcagtaattatgagttgatatgcaattttctaacatctcttaataatgagagtttcgagataagagcaactactactgctttggaatatattcaggacaggacttcactttctcgaagtggaataatgaaaacattatcttcacttaggaagggaggttatattgttattaaaaaagggctcttaattaagataaatttgcttccaaagaaattctaa

SEQ ID NO: 146307 - DNA, 636 bp, Enterobacter cloacae
atgaaaactccaatacctgtttcgaatcttaaacctactgaatacattcaggatattttgaatattttagaaatccattaccccgttaaaaatgcaccagctaaaacacgatttaaagcaattaaaaacggtaagccaatgtgtttctttttatttagcggctcatgcgtagtttcccgcgcggaagatacattagtcatctcaactttaaatgcgccaaatattattggcataaatgaaattattccctttaaacttgactttatcatcgaggcaagtacagatattaaatacctccaggttccattagatgaatttctaacttttactgaagcgaatcttctttggaaaagtgtttcttttgttttaatgtacgtatcctcaagattgtatgaaaatcttagaaattataccggattatctacctacaaaattatctgtaatcagttgtatgcactgaataatgaaagcttcgatgtcagagctactacacctgcagtggtgtatatccaaagaagaacttttttattccgtagcggtattatgaaaattttgtcagatctaaacgcagggggttatatttccatcaataagggcttgttgattaaaatcaatatgttgccggagaagtattga

SEQ ID NO: 146308 - DNA, 3240 bp, Enterobacter cloacae
atggcaaagatgaccgaatccgatattgaagtaatggcgattgaacacctgcgagggatgggctatgaatatgtttacggcccggacattgaacccagtggaatcaatacattacgtagttatcagcaggttatccttgaagataaggtgcgtactgccctacaacgcctgaatcctcacctcagtgaacaaaagtgtgaggaagccttgaaacagatgatgcagatcagcacaactgaactaatggcaaacaatctggcctttcatcgcctgttgaccgaaggaatcaatatcgaagtcagcaaggatggtaatacacaaggagagctggcctgcctgatcgactttaacgatcccactaataatgaatttctggtcattaatcagctcaccatcaaagaaggcaaccatacccgccgaccggaccttattttattcatcaacggtctgccattagtcgttattgaactaaaaaatgctactgacgaaaacgctacggtatcgggcgcttataaccagattaaaacctatcagaaacaaatacccagcctgtttacctacaatgcgtttaatgttatttcagacgggctggaagccaaaacggggacggtttctgccgatttcagtcgttatatgacgtggaaaactgctaacggtaaaacgcaagccaccagtacccaaccacagcttgaagttttattacaggggttgcttaatcctgtaacactgctggatatgatccgccactttatcgtgtttgaggccagcaaacatgaagacagcaaagggattatcagtatccgtactgttaaaaaaatggcggcttatcaccagtactacgcggtcaatgcagcagttctttccactattcgtgcctcagcggtgaatgcggactccccctctgccgaagtggcactgcgccagcagggacgtaacagtaaagatcttgttaatgcgcaaaaaaccggagatcgtaaagcgggcgtagtctggcatactcagggttccggtaaatcgctttcgatggtgttttataccgggaaaattgtgctggcgctggataatccgacagttgttgtgattactgaccgtaacgacttagatgatcagctattcggtacgttctcttccgcgacccagctacttcgtcagacaccaaaacaggccaacaaccgggaagaactcaaagactatttgcgtgtcgcctctggcggtgttgtgtttaccactattcaaaaattccagcctgatgacggcggcaatatctatgagctactatcagacagaaccaatattgtcgttatcgcagatgaagcacaccgttcccagtacggtttcggcgccaaagaagttgacgtgaaggacggcgaaggcaacgtaacaggtaaacgcaccgtttacggctttgccaaatatatgcgtgatgccttgcccaatgcgacctatctgggctttaccggaacccccatagaaaaaacggacgtaaacacacctgctgtttttggtaactacgttgatatctacgatatctcacaggccgtagaagacggtgcaaccgtgcgtatcttctatgaaagccgtcttgccaaaattgccatcagtgacgaaggtcgccagctcattgaagacttcgacgatgagtttaacgaggacgaactgacacttactcagaaagaacgttctaaatgggcgagaatcgaagggctgattggcagttcaaaacgtattaaagccattgcggcggatatggttcagcactttgaacagcgcttaaaatctaatgccgatcatggcaagggcatgattgtcaccatgtctcgtcgtattgctgctgaactttataaagaaatcatagaattaagacctgaatggcacagcgatgatctaaatgatggcgtgattaaagtcgtcatgacctcttctgctgctgacggaccagaaatcgctaaacaccacaccacaaaaaaagaacgtcaggttctggctaaccgcatgaaggatgacgacgacaagctgaaactggtgatagtgcgtgatatgtggttaaccggcttcgacgctcccagcatgcatacgctgtatatcgacaaaccaatgaaaggccacaacctcatgcaggcgattgcccgtgtgaaccgtgtgtataaagataagataggcggtctggttgttgactatctaggcattgcctctgatttaaaagaagccctctccttttactctgatgcaggtggacgtggagaacctgctgaggttcaggaagaagccgtaacgctcatgcaggaaaagctggaaatcctggaaggcatgatgcatggctacgattacaaagcttactttactgcaacgacttcacagcgcctgacgattatccttgaatcagaaaaccacattttagggctggataacggcaaagggaaaatgcgtttccttgccgccgttgctgccatgtcccaggcatttgccctggcaacgcctcatgataaagcaatggaagcagcacccgaagtcgccttcttccaggcggtgaaggctcgtctgaataaatttactgaaaactcagacggatcagaagaagaacacaatgacagtctcgaagtgcgggtaaaacagactatcgatcaagctttggtcacggataaagttgttgatatctttgacgcagcaggaatacagaagccggatatctctgtactatctgatgagtttctccaggaaatgaaggattatcagcacagaaatattgcgctggaaacgcttaaaaaactgctttctgatgagatcaaggttcgctcgaaccagagtattacgcagggtaaaaaactgatcgatatgctgacctctgcaatcaatggctaccagaacaaggtactgaccgctgcggaagtgatcgatgaactgatcaaacttgctaaaacaattcatgaatctgacagccttgccagtcagttaaatctcagcacctatgaatatgctttctactcagcagttgcagataacgacagtgcacgcgagttaatggaaaaggaaaagctgcgtgaattggcagtcgtactgacggaagctatccgcaacaatgtcagtctggactggacagtgaaagaggcggcaagagcgaaaattcgtgtggttgtaaaacgtctgctcaaaaaatatggttatccacccgatatgtccttgctcgccacagagaccattttgaagcaggctgaacttttagctggagaattaggaaaatga

SEQ ID NO: 146309 - DNA, 1209 bp, Enterobacter cloacae
atgacctgcttattcgcaccttccttagatgaagttgttgaatatttcattgattacaggggaaaaactcctgataaaaaagattcaggtataccactcatcacggccaaaattgtcaaagatgggcgcttaaacactgctactgaatttatttcggtcgaggattatccactttggatgacccgcggctatccagaagtcaacgatgttgttttaaccacagaggctccactgggtgaagttgcattaatcaagaataaaaatgtcgcccttgctcaacgaattattaccctaagagggtataaaaacatccttgataataaatttctaaaatactggttgcaatcagaacaaggccagtatgaactggaatcacgagcttcgggtacaaccgttttcgggattaaatcatcgatccttaaaaagattccaatatttctaccaccttataatgagcaagttactataagttctatattgcactgtattgatgaaaaaatagacctgctccatcgccagaataaaacactggaatctatggctgaaaccctatttaggcagtggtttatagaagaagcacaagaagattggaaaacatacaaacttagtgatgtttctgatatatttataggaagaacacctccaagaaaagaaactcattggttctctaaagatcctaaagatatcaagtggctatcaattaaagatatggctgaatctggaatttacagaatgagcacagcagaatatttaccactaactacgattgaaaaatttaagatacccatgataccagaaaatacagtcattttaagtttcaaaatgactgtaggtagagttggaatcacatcagaaagcatggtttcgaatgaagcaatagcacaatttagaataaagaaaatcataacaaaagaatttttgtattgttttttaaaggcatttaattatgacgcacttggaacaacttcaacaattgttacttctatcaattcatcattgattagatcaatggagttttgcattcctaatgatagcgatcacagaattagtaattttacatccatcacgtcccccctattcataaaaaccatgaaaaatcaagaacaaatacgttcactctctaatctccgcaacaccctacttcccaagctaatgagcggtgaagtacaggttcagtatgcagaagaggcaatcgcatcagtagcataa

SEQ ID NO: 146310 - DNA, 432 bp, Enterobacter cloacae
atgcatgagcattcatcggccatcgaatggagctggttctccatgttctcgcctgaacttagcaagcgcttcttgggtgctgtgataaagctcaacggtttggcgctgtatgacggacatagcattcgcatcaagagtgccgttttccatgtggctaaggatctggtggtaacggaatacaaaggaatcagggctgacaacagcaacttttccagactctgcgactttgcggtgatggttccattcctcaagtgcaagagtgagcgccaattcccgcgttttcgcctctatcccggcgatacggtctttttccgccctgatccggtcggcttcgcgttgtttattaccgtttatcaggttgaaccatccggcgataccagcactaagaacaccgctggataccacgctaattccgatcgtgatccagtctga

SEQ ID NO: 146311 - DNA, 270 bp, Enterobacter cloacae
gtgggtaacaacaatgtgcaacgagcaaatatcaagtatgacggggagacattaactgtatcgccgctaacgttgaaggcggccgaatatcttgtgaaggagatatctccctacgaccgaaaacccattattgccatagacaaccagggtactggcagtgtggcatcggtgaccgtcggtgtgcgctacgattcgccgtggatgaattttgttatgcctaaattcattgcgatgaccgtggtcagtaatgaggaccacggatatgcatga

SEQ ID NO: 146312 - DNA, 510 bp, Enterobacter cloacae
ttgtttaatgtttacgcggcgaacagcaccagctgcctgcgcgatggacaacacattcccgtcggcatcaaaagcagtcaggaagtcggcccagtcctccagccattcagcaatttctttctggcccagtcgatcgccgttaacctggagcagggctcggtatggcgctgtctttttgagggtgatcgaagcgacgttatcggcatgaccagggttagccagagtaccgatattgaagacggaacgcgcagtcatattgtcagcatcgatgaagcaacgtgcaggttcgacgtcgttggcgtagccagcagcataacgcacaaaatcaggaatgctggttgtggtcatgtcgccgcggaaacgaaaacgctccaggtcgaaacgctcgaggctttctacgtttacgccattagggagcagggcggtagggcatgccgtttctttaactgcagtaaggtggtaaccggaaagaaccaggtctttaacctgttgcagggcattaccgtctaa

SEQ ID NO: 146313 - DNA, 1014 bp, Enterobacter cloacae
atgatggcaaaaattaattctgtgttgtttatctgccccaatttttttgattataaaaaattgatagaagaggagttaagcaaacatttcgataaagtccatagcttttctgacaggcctgtatgttcatcaatttccaaagccctttttaaatataactttccaatctatgcttccagactctcagaaaaatattgcagggatatttatgattctgtagtcaatgatttatcttccatatctgaagttataataataaaaggaacttgtattacttcttctttcttacaaaaactccgaagtagtaatcataacattaatataacgacttacacctgggattctatatccaatattaaaacgtttattacactttcaaaattatctaactatacttatacttttgatttgaaagatagtcaaaaatataaaataccatacttacctctattttataattcatgtcatcatgatgaacaacatgatcacgataaaaaaataatattcgactattgcttcattggtagctatcatggtgatcgtgtaaatgtgctttctcgttttttaggtcctaaaaaaacaatcaagtcttatgttaagatatatttccaaagtcgattgcagtacattttttattacctcttaaatcccgcattgcgttcttgtccaaaagaatgggtaacttttaaaccaatctcaagaaaaaaactagaagaaattactgctgtaagtcatcatactattgatatccatcatcagaaacaaacgggtctgacgatgcgtacatgggaaacactccaaagtaatagccagctcgtgacaactaacccaacagtgctggcacatattaatagccataatgttacggttattgatcgagatacagggcttgagtggtctaccgagcaatgtgataaatatattaaaaatcttattagtgaagatgaacgtgttaaaatttcaggatgtttatctttatctgaatgggttgatgcgttgttaacaaagggttga

SEQ ID NO: 146314 - DNA, 1110 bp, Enterobacter cloacae
atgaaaatctcaaaggtatctgacgaacatttttctaattacaacatgttgccgaatggtaatgaagaaattgacctttttgacttgattagagttttatgggcagcaaaaataaaaattgttggggtgattctattttttgcttgtattggctttcttgtttctcttgttttgccacaaaaatggactagttctgctgtggttactcctgctgagtctgttcaatggagtgaattaaataaggagctttccaagcttcatgttctgggagtggattttgatatcaatcgtgatagcgcatttgctctgtttattaagaaatttcagtccgttaattcgttgaatgagtatatgagatcatctccttatgttatggagatgattaaaaagaagaacattagcgctctcgaactgcatcgtgcaattgttgggttgagtgaaaatatgaagtcggttgatgataatgccagtaagaaaaacgacaagtcatcattgtatgtatcatggactctgagttttactgctccaacaagtaaagaagctcacgatgtgttgtctgggtatattaattatgtttcttcccttgttgtaagggatttgatggaagatataagaaataaactagaagttaaaactaatgttgaaaaagaaattcttgcactggatgagataaaaattagaaaccagctgaatgcagatattcgacgcctcaattattcactggaggttgctaatgcggctggaataaaaaaacctgtatacagcaatggtcagattatgaaggatgatccagattttcctgtggctctcggttctgatggtatagcaactaaattgaacatcaaaaaatcaatcaaggatgtttcggaattgagtggggagttgcgaaatcgtcaatatgttgtgaatcaattggttgtggcgaaagtgggggatgttgattttatgccgtttcagtatcaattgagcccaacgttaccggtcagaaaggatgggccaagtaatgccataattgtaattctttcttctgtcattggagggatgcttgcatgtggctatatacttttacgtcatgccatggaggccagaaagatgagtgtgattgagtaa

SEQ ID NO: 146315 - DNA, 843 bp, Enterobacter cloacae
atgcacatcatgtacatagatgaggctggatgcccgggtgcactacccagtccaacaagccccgtccaaccaatctttttaatatccgcactaatcattgactcatcaaacctttataaaataaccaaagaaattctcaacctaaaaaggaatatttacaagccaacgcttaagtttgaagaaaggctaaagatatcaaaggatgaattaaagggcagtgatttaaaaaaagacctgagatactcaggaggcaaatacaaatacaaacaagcaaaaagaagggcaaaaagatttattgatgaacttttaaaaatcctagaaaaatataatgtaaggattttgtctcgcatatatataaaaacgccaggtggcattttcgatggcctatccgtctatacatcagccgttcagtgcttatacgctgactttaataattttctatctgaaaaagacagccagggctttgtcatagctgacaacagaaccctgccgcttaacgaggctctttcacactctttgttcacagagaagaataaactatccggggataaatatccattagtctgtgagatgcctacattcggtcaaagccacaaccacataatgcttcagatgacagatatagtttcttcagcattggttatgccaatttcatctcatagttactgcacaggtcatgttttcagtgatcatgttaatgcagataacctaacaataaaaaacgactacgcaaataaaattaaaagtcttttttatagatatatgaaagatggaagaatgaaaggcgggctaacagtgaatgacaaaataatgaaaaaaagctcatcccacttctttaaatag

SEQ ID NO: 146316 - DNA, 303 bp, Enterobacter cloacae
atgaaaatgaatgattcagggaacattttcacgcagttcttcgcgtgggtagcagctctggcgtcagccattggttttaccactcaggatatggtgttcatgttctttggcgccgctggtctgcttatctcgtttgcctcctatgtcaatggtcgcgtggatgcccaccgcaggcgtagagaggacgagaagcgaacaaaaatggtcaatgactacctgaaaggcgttggtgataaaccccttcacgaacgtcctgcggctgcaagcgtggtcgttgaggcattacaaaaggaaggtgagtga

SEQ ID NO: 146317 - DNA, 1548 bp, Enterobacter cloacae
atggccagaaaacctaaagaaatcaaaacagacccgttagaggtcatcctgtggaaagcggcggacaagctgcgaaaaaacattgatgcagccgagtacaagcatgtcgtacttggcctcattttcctaaagtatatttctgattcttttgaatcgcattacgaactgctgaaagctggcgaaggtgaatttgcaggagccgatccggaagacaaagacgaatacaccgcctataacgtgttttttgttcctgaactggcgcgatggagttacctgatatctaaggccaagctaccggaaatcggtaagctggttgatgatgcgatggaacttatcgaagcgggtaacccacagctaaaaggtgtgttgccgaaagtctatgctcgccagaatcttgatgccacagtgctgggcgaactgtttgatctgattggcaacattgcactaggcgatgccaaagcgcgttctgctgacgttttaggccacgtattcgaatacttccttggtgaatttgcactggcagaaggcaaacaaggcggtcagttctatacgccaaaatccattgttagcctgctggttaacatgctggaaccctacaaaggccgtgtctttgatccctgctgtggttctggtggtatgttcgtccagtctgaaaaatttgttgaagctcatcagggcaatattgacgatatttcgatttacggtcaggaatcaaaccagacaacctggcgtctggcaaaaatgaacctggctattcggggcattaactcagaacacgtccggtggaacagtgaaggttcattccttaatgacgctcataaagatttaaagtctgattttatcattgctaacccaccgtttaacgtttccgactggtcaggtgagcaactacgtggtgatgctcgctggcaatacggtatccctcctgccggcaatgctaactttgcctggatgcaacacttcctgtatcacctgtcgccaaaaggtcaggctggcgttgtactggcaaaaggggcattaacctctaaaagttcaggcgaaggtgatatccgtgcggcgctggttaaagatgccaatgtgattgactgtatcgttaacttacctgcaaaactgtttctgaacacccagatccctgccgcattatggtttatgcgtcgtgatcgtggaaacagcagcctgtatcgtgatcgtagtaaagaaattctgtttattgatgcacgtaatcttggtcatttgatcaaccgtcgtaccaaggtactttccgacgacgatatcaagaccattgccgatacctatcataactggcgtaacaaaggtggcgactacgaagatgtggctggtttctgtgcatctgtcgatatcaatgaagtcgctaaacttgattatgtgctgactcctggccgttatgttggccttgctgatgaagaagacgatttcgactttaaagagcggtttacggctcttaaagctgagtttgaggcacaactcgaagaagaagcgcgtctgaataaggttatcgctgaaaatctggcgaaggtggtgttatga

SEQ ID NO: 146318 - DNA, 1479 bp, Enterobacter cloacae
atgaacttccgatatgatataaatggtctaagagccttcgctgttattgctgttgtgatcttccatttcaacccatcctggctcagcggaggatttgctggcgtcgatgtgttcttcgctatatccggttatttaatgaccaggattatagtaggaagatatgatgccggaaaactctccgtctggggtttttatttagatcgtggtcgaagaatcatcccggcgctggcgtttctctgcgcaggattgctcatctacggtgtttttaaattatccccgatagggctcatgcaactcgccaagcacgttataggtagcctgcttttcatatcgaatggagtttactggctcgagtccggttactttgatgcatcctcgcatactaaatggctgttacatacctggtctctttcggttgaatggcagttctatctgctgtatccgttcatcattctgggtattgttaaagccgtcggtcgaaaaaatttagggacaggattattgatcgcctgtgccatttcctatctgatttcagctctaacccccgcagcacatcaaagttcagctttttatctcatccatgcgcgcgcctgggaaatgatagctggcggccttgtctgcctgttcccgccatcattatcagccaaacgagctcgttttacagaagcatctggctttatcctggtgatcgcttcatatatctggatgagcgaacgtgttgcatggcctggttttcttgccattgttccagtgttaggtgcatgcatgatactgtccgcaaacaggcaaaattccctgctgacgaacaatcgcatttgccagttcctgggaaccacatcgtattcaatctatctgtggcactggccagttgtggtttacatgctgcagaacgagatagctggtattcccgctgcgctaacagggatcgttgtatcagtcgtgcttggatggctctcttatttctttattgagaaccgccttcgcggagataaaaacaaaaggtttaatcataactttgttcgccgtcacgcgttgctggcatccttctgcgttgtgatgatttctggtgcttcggtttatgaaagtgaagggctgccatcacgttatgacgggaaaattaatgatcttacccagattaaaaatgtatactccttctttggaatacctgacgtctggcgaaacggagtatgtcactcatcaccaattgagatgagccagcagcagcgactcgaaaagtgcacagagaacggggacaacaaaatattcctgtggggagactcatacgcaggcgctctttatccaggtctcgttgcacttcagaagagtgatcatcacaaattttctatcgagcagtttactgatggaaatggtgcgcctttcttccgtaacgccaccctggctgataataaaaaagacatgattaccgtcaaccaggagaagcttgatatcgttgcagcgatgaagcctcagcgcgggtaa

SEQ ID NO: 146319 - DNA, 924 bp, Enterobacter cloacae
atgtggggagcaaccccatttaacttgacaaaacaatcagattataacgcgccaaaaatactcggccaggctttaggtgaagtttattcaggaaagataaatgttgtaaataatggcatatctggaacaactctttcacagtttgtttcaggtgatgacgggtctggtagctcgataaatacaaaggcagctttaaaacctgatgcgatatatttaaattatggtataaatgacatgattaaaaacataccattacgagaatattcagacaatttaaggaaggtcgttaaaaaattcaatgagaatggagttgcagttgtttttgtaacaccaaacattatggggttgcattattttggtaacattgagcgttctgctagattaaaattatacgcagaagagatgaggtctgttgcttctgaatcgatgtcacaatgcatagaccaatttgaattcacttatcttgactcttctatgtttggcatcaaagatgttgtgccagatggtgaccatctgtctgattataactataaacagtttggttataatatggctatggcttttttgaatccttgttatctagaaaaaggttttgagagtaagttaaactctatatctatcggctctaaatcacctatgacagtcattgaaaaaaatggtggttattcaattttattaagtggtaatgggacaaaacgcggttatataccggtaatttcaaatcaaaaatttaatgttttagcatcaacgaaagatgttttatctgaagtttattgtgcagttaatgatgtttatatgtgtaaatcaaagtcaggaattattatattagatataaacaataacaaacttagaaatggactcaaaatggtatcaatttcatcaaatgcagatttgattatatcatcaatagttgggactgcgtaa

SEQ ID NO: 146320 - DNA, 864 bp, Enterobacter cloacae
atgaacaattctgaaggtttgaagtcgtttcaccaatcgctttctggtctgccacagtgggtatcagagcggcttctgcagcaaattaaccagttaactaactacgagccagtgatcggcattatgggtaaaaccggtgttgggaagagcagtctgtgcaatgccctgtttgccggagatatatcaccggtcagcgatgtggcggcctgtacacgtgagccactgcgctttcgcctgcaagtcggcgaccgctatataacgctgatggatctgcccggcgtgggcgaaagtggcgctcgcgataccgagtatgctgcgctgtaccgcgaacagcttcctcgcctcgacctggtactgtggctgattaaggccgatgaccgggcgctgacggtggatgaacatttttatcatcaggtgattggagaggtataccggcataaggtgctgtttgttatcagccagtcggataaggccgaacctaccagcggtgggggacagttgtccacggcgcagaagcagaatatcagccgcaaaatctgcctgctgcatgagctgttccagcccgtccatccggtgtgtgctgtgtcggtccgtctacaatgggggcttaaggtgatggccgagcggatgattaagtgcctgccacgtgaggccaccagcccggtggtgtcgcaactccatccttcctttcgcacgacggtagtccgggaacaggctcgtagcgattttggtgaaaccgtcggggccgtactcgatagcatcagtgcctttcccctgatacccgccccggtgcgggccgtcattcaggccgtgcgcaccacggtggtgtcagtggcccgcgccgtctgggatttcttcttctga

SEQ ID NO: 146321 - DNA, 189 bp, Enterobacter cloacae
atgacaaaacaggaatcagccacactgaacatggcaaaatttatccgggcgcagtcgctgctgctgctcgaaaaactcgacgtgctcgatcttgatgacgaggcagccgactgtgagcgaatgcacgaacaggcagaagcgctttatcagaagctgagcgcacgcttcggtatacaggacggcgaataa

SEQ ID NO: 146322 - DNA, 405 bp, Enterobacter cloacae; identical to SEQ ID NO: 109344

SEQ ID NO: 146323 - DNA, 672 bp, Enterobacter cloacae
atgaacaaatcaaatttccgtgcgctgactgatgaggaagttgctaattgcgtcaagttaattcgacatgaccgaaaatggtctcaggaacaattggccgcaatcagtggattaaatttaagaactattcaaagagtagaaaaaggagagccttcatctattgatacgcgaagaaacctagcaaattcttttggtgcaaacgacattgatgctttcaataaagaaacctatataccatcgatggatgaattaaaaaaataccaagattatattgaggattcttgtgaacaaatcaaggcaaccaaacttaacacaagcattggtcttctagacgcaactgaaggatgtcacgcatcattcttcgattcatccttcgatatgagtcatgatgcagaggaagcaaaccatctaatcaaatgctatttaaaagaatacatggattgccatgatctttataacaaagaacagaaaaatgatgccgcaaaagaaatccaggtacatatagacaaactgaacaaactgggggtggcacttgtttacgcaaagaaaaaaacgaacataacaaacattggtaataacatatcaatggaaaccatttatataatagcattccctattggtaaggaacctgacacattaataataccgaatgaagctgatgtgagtgtttag

SEQ ID NO: 146324 - DNA, 531 bp, Enterobacter cloacae
gtgctgggggatagaacggtgaaatttaatatcttccctattctagttatagtaattgcaggtctgtcagtcgcccttgttaaaagttgctcagacgccagtagcctacagagcgataacgacgttctgcgaagtgataactctttacaggggcaggtgatcgccaatcaggctttcaacttcaatcggttcaatcgggttgcagaacatgccaacaggcttaactccttgatcgataccaccaccgaagaaaccgtaatcgaatatcgggagatactccgccgtgaaaaaacctgtgatctgcctgttcctgctgacattgctggtgggttgctcgaatacgcgtaccgtttacgttccagcgccatgcacaccgataccgacagacctgacgcagccgatgatcgttccgctgcctccagctcaatgacgtattgccaggctgtattgtggataaagccgctgctgtccgtcattgaaaagggtaacaacaactttgctgggattaggcagattgagcaaaaccggtaa

SEQ ID NO: 146325 - DNA, 768 bp, Enterobacter cloacae
atggaagctagagggaattatcgtttaaggccaatttcaaaccttggaagcgggacttttggacgtgtagagaaaatcgaactctacaattctagtgagcatttttgcggctattacgcccgcaaaagtctcgcagttaatcatgatattgttggttcaatcttcagccccgatgactggagaagacgatttgaacgagaggtgacttaccaatctcgctgtcggcattcaaatgttgtccctgtcttgatacataatctcaatgctgagcatccatggtttgtaatgcctctggctaatacggatctcatgaaggagattgaaggtaacgtgctaagcgatgatgagaaactatcagcgattagaatgatgttgctcggcgtcgaatatattcacagtcgcgggtatcttcatcgggaccttaaaccagaaaacatccttaaattcgatgatgggcaatacaaggtgtctgactttggtttggtgaggcatgatgatcctaacgcggcctcagcagttttaaccaatatagctgtcagcatgggaactgatgggtataaagctccagaggtcaatagtggtctgtatagtccaaaaactgacatctatgcagcgggtgccatagtgaatattttaaatttgagccatgtggatggtatcgatgctttaataggtaaggcgacagcatacaaaccgactgcgagatatgattcagtcagtgagatgcttgccgatcttaacgccataattgaagggaggcaggcatga

SEQ ID NO: 146326 - DNA, 741 bp, Enterobacter cloacae
atgattaatcttctgagttgcggctttttctcatgccctaaagatgccgaccgcggcaatcaggactcatatgtattgccaactccgacaggaaatgggtttgtatttgctgtcgctgatggcgtcggttcatacgagggcgctaaagagatagccgatactgctacttctgctcttaggtctttcaataacgagagcatcacgaacatccaaaaaacatttctggatctcaaagaaaaggttgacgcggttgtagatgctaaatctgaatggatcaatgcagcgaccacgctttcattctgtttcattgaccatgaagctttgtatgttggacatgttggtgatacacgtgtctatataaaaaaaggcgcaaagcttcagttgataaccaaagatcacactcaacaccaagaactttttgatgatgggatatacacaaagaaagagttacgtgatcttccaggtaaaaacactctcacttcggcgatatccagaaacgttgctttacgcttccaaagcgtcaagttgcccttgtcggaactggttgatgaaaatgggctcattactgtttacatcatgtctgatggagctcatcacttctgggaacagagaccacggctttcccttgaaacaatttctaaagcaccaaaatttgcagcaagcttgctgagaaggatagaacggtccggtcctatagatgattacacactggtcgcggtatctttccaaacatctaagtag

SEQ ID NO: 146327 - DNA, 1215 bp, Enterobacter cloacae
atgttcggccctctggtgttggacctttttgccgacgacagtaacgcgaagtgcccagcatggtacacggctgaagataatgccctgacgcaggattggtcagagcgtctggcagaactcggtggtgccgggtttggcaacccgccttacagccgctctcagtaccacgacaagcaggccgttaccggaatgacccacatcattaaccacgctatggcaatgcgagaaaagggtggtcggtacgtttttctcattaagtctgcgacgagtgagacgtggtggccggaagaagcagatcacgtcacattcatccgtggccgaattggtttcgatcttcctacatggttcgtgccgaaagacgaaaagcagcagcccaccagcgcattttttgctggcgctatcgtggtcttcgacaaaacatggcggggtgaacgtttcagttacatcaaccgcaccgacctggaggccaaaggccgtgcttcgatgtcgctggcccagtttgcagtgggaagaacgcaaactgatgcggcgccggagctggacgctgaggtagtaccggagaaatcagaggcagaactgccattaacccaaaaagccattctggaaaccagtggtgtagaggcttgggcctgtgttgtcgcggcgttcggcgagaaagatgagtacaccttcagcgagtcaaagtttggtcatacctgggctgccgactctctggaaaaccctgaatttaccaatgtttcaccgctgacgatcgacagagcgaaaaagctgatcagcgagagcatcctggtgggtgttaatgcatggctggaaacattgccctttgatagcgatgacgtgaaacaagacatgtcagagcggcttcgcacggttgccgttgaatctgcgaaagaatacggcatcaaccacagtgaattcatcgcgaccatggaaagcctggataaagccaaatggtcaaatattcgggggatccgcgcccatgtacgtgagacgcaggaatcaaaggacaaggcgttaaacgaatcgcgcgtttggcctcttgaggttggcctggtgtttaaccagattgaaggggctgacgctctacctgtttcacaacagaacaagctgaaagccaatatcaaccagctttggctcgaacgtatgccgacgagtgaaattatcacgaccgctggtggtctcttcaacagcatgcagggggccgtcaatgcgtga

SEQ ID NO: 146328 - DNA, 282 bp, Enterobacter cloacae
atgagtcgcttcaggccaatgaatcttgcggccgtcacagcgcatgaccatgaagaaacgctttctgatcgtcggcgcgccgtagtcacatgcgcgcagctcccgataatcaacctcataaccaagcccggcgatcagctgttgcgcctgctggccgtgcggctcaatgacaaggaattcacaaacctcagccagcgcagggtgattcgccgcgatccccgtcgacagcatgccgacaaatgcctcgaatgtttcgccagcacgctcaggatctgggcgtaa

SEQ ID NO: 146329 - DNA, 255 bp, Enterobacter cloacae
atgagcgggtttatccagcgggcgcggctttgcctggtactcactgccgccgttgccagccaggaacggggtcagggcggcctcaactacaccaagcgcatgcccattcccgcccgggcgcgccgacgtaccagcggtgacagttggaaccggctcggtcactggctgcccggtggccccggtgcggaatttagtaagatgcggtaccgccagcgcgtagccatgctttttagtgatggtctgcaatggctctaa

SEQ ID NO: 146330 - DNA, 438 bp, Enterobacter cloacae
atgaaacgtaaaacactgcctctgctggcgctggttgccaccactctgtttctcatcgcatgcgatgacagaagtgatgacctgaaggccatcagtaaatttaaggacctcaccccaccgcgtttcagtgatgtggtcagccaccaggatgatgtcagcgaagaatggtcacaggttgactacttatccggtcccaccttgcaggttttacgtacccgccagtcgcccgatggctgcgaggatggcagttactactacctcgtggatatgcaggaaaaaaccgtccagccactgatgaatgcgctgtgtattgccgataacatcaaactggaataccaggaggtgacggacccgtataccaaagaaaaatactttgagtacgcccatgacggcaaactgatggggcgactgctgataccctcaaaccctgagaactag

SEQ ID NO: 146331 - DNA, 216 bp, Enterobacter cloacae
atgctgcatgcagtgaatacgcagcatggtctccagcggatagggccgtcggccattgcccgccttgggataaaacggctcgatgacagcggtcatattctgccatggcagaatatgctccatgcgggagaggaaaatctcttttcgggtctgacggcgcttagtgctgaattcactatggggtttgagggccaatggaacgaaaacgtacgctaa

SEQ ID NO: 146332 - DNA, 447 bp, Enterobacter cloacae
atgtatatgagtaaaccggtctcggcctggccatcactgacgattcattggactctggacccaaatgaatgggtctattctttcgacggcgaattgcctgattgggtaaaaaatgatgtaccgatcctcggttgggcaccgatagcagaaattcacaatcatctggttatcaatagcaaggtcaataattcacaggagttttgggaaggggccgctgaagacaaagctgaaaatgtgataagtggctgggcgattgcaaagccaatgtctccaccgatactcatgttatggcctccgaggacgctagatgaaattgttctggccggtggaaatcaccggtttaatgttgcgaatctggctggaggaaaacatattcctttcttggccatatacagtcataaagcggggcttacggcactcttaccgtcagtcgtatggttgccttag

SEQ ID NO: 146333 - DNA, 669 bp, Enterobacter cloacae
atgtttggaaagctccttaacagcgtgacctggcaggtcagaactgacctccgccgcaaactcaaagccaaccgggatcataaaaatctcagctggaatctggcagaaaggctgcaggtttattgctccacgcattacattcgggccatgctgttactctggggagtggcagccggcgcggtggcggtggctcactatgcctgccctgtcttggatccgtttgcccgtcaacattttaaaggtattaccgccttgcccgggcggatgtccagcctgctgggaagccaggtgaccctcatcggtattgtgttcccgctggttgtcggtctgatcagtgttctttttcagaaaaaatcatcccgtattcatatccagtccgcctatcagctgaattccgggtatatgtttgcaggattaagcgccctttccctggcgggctttattctgatggcggggatagcgtcgtcactcggggataactatctcaatactgcgatggcgtatacaaaacccgggatctggtcctggcggatatcttcgattacattgaagtgttctacaacagggcccgccgccacagtcacctcggcggcgtcagtctggaggccttcgaacaggcctcatcgtgaggacagaatctgtctactgtcgtggggtcagtccacctga

SEQ ID NO: 146334 - DNA, 306 bp, Enterobacter cloacae
atggccaggattagccagcgtaccgatattgaacacggagcgtgcggtcatgttgtcagcatcgataaagcatcgcgctggttcagcttcgttggcatagccagctgcataacggacaaagtcaggaatgctggttgtggtcatggcaccgcggaaacgaaaacgttccaggtcgaaacgctcaaggctttctacgtttacgccattagggagcagggcagtagggcatgccgtttctttaactgcagtgaggtgataaccggaaagaacaaggtctttcacctgctgcagggcattgccgtctaa

SEQ ID NO: 146335 - DNA, 672 bp, Enterobacter cloacae
atgaaccgtacagacgcgccagctaaacagtcaaaaccatttggcataaatggaccaagagagcctattcttgcaaccacacccagcggtgataacacagcatcatatgatcagggattccctcccatcacaatgatactgaaatctgcaggtggcttgccgccaaaaggccaggacatgaaccaaattttatatgagctttccgctctatctagatggttcagcgcaggggctacaaacgcttacgacgccactttctcggcagctattggtggatacccaatgggtgcaacgattcttggaaacgatggcaccaccagatacatgagcaccgttgattccaacaccaccaacccaaacactggcggtgcaggatggtttaacttaacaacaggatatctcaaaaccgctaacaacttctcagagattgcagccggtggcaacaccgcaatagcatcggccatttcaaaccttgggcttattggcggaaacctttctagcgggtctggatatactcagacctatatcaaaataccaatcagcaccccagccggactcgttaataaaattgtgcagtatggatccgctactgtttctaacggttctgatactattcttggcttgccaattccatttccttctgcagtgcgctcgtggcttgctacatgttga

SEQ ID NO: 146336 - DNA, 639 bp, Enterobacter cloacae
atgtggcaggaaacaatcctaactcaatactccgccagccaaaagctattggacatcattgatacgtttaatcaggccataagccttgacgacttcactgatgagtttattagcaaggtatgggatttaaccacgtgtgaaacttatggtcttgacgtatggggtaaaattgttggtatcagccgatacatcaacgccccgatagatagttcaacatttggtttttctgaggcggacgatctaaatccagattacccaacaccatttaatgacgctccattttatggtggagtacaggaaacaacaaacgtaagactcggagatgatgcctacagaactctgatactctgcaaagcttttaccaatatcagtattgcaactattccagagataaatcgctttctgaaaatgcttttctatcagcgcggaagggcttactgcataagctatggagatatgacaattggcttcacttttgagtttgaacttgctccttatgaaaggtcaattctcacaaattatgatgtcactcctgttccaagtggcgtgctggttaatgtgagcgaaattattactccttactttggattcgcttcagatgcatacccattcaatgatggaatactctacagagattaa

SEQ ID NO: 146337 - DNA, 534 bp, Enterobacter cloacae
atggttttttcccataattccttcgattttcttatttttcctgaatcaacatatatagatgaatcttttttatcaattagagaagatcatgcatctctttttttgaatggcctgaatattgaaaaaacaaaagtaaataatatcaatgtttctttccttgtacctgaagagtatgttgcattatatatattgatgcatgaatgttgcagaagaacatatgggaagttagatgtttctagcgtttttaaaccactcaataaactttattcaggagactttagttttgatactctaaaacggtatgcaaaaaaacctgaattaaaccgtactaaagcatatcgtgtaagtgaaaaacagaagagggatttatgttatcttataactgatttttgcaaaaaatatgaaattgagcagacagtttcttctgtagtgaataaattaacagcagttacacaattagagcctcactcaataaacttttcttttagtgagagtaaggtaaaggaatggatggatatctcaaaaggaaaatga

SEQ ID NO: 146338 - DNA, 1824 bp, Enterobacter cloacae
ttgggtagtgcatggcgaggtacactgtccaactggcaaaatatcgttagcgattgtacatggattgaaaaacacggtgacttacgcttcatatgcgcgacagtaaacgatcgtggtgagttactgaactccgctaatcaactttcagcaacacgtgtctctatcattaacgaacttgaaaatctgtccaacgaactcgaatcgtccaccgacgaattcttccatttggataatcagcatttacgtatcgatagtgtcctgcaaaaactaacctcctggactgaaaatgccgaacaactgtctaaatgggttgcctggcaacaccggcgcaaccaggcaaataatttgggactctcagaagttgtagaacggcttgaggatgggcgcttaccattatcaacttgttatagctcggtcgaatatacctactatgaatcgctgttcagtttaatggctaaagagacaccgtctctttcccgcttcgacggtgaacttcataaccgaaaagtgcagtactttgccgaaatggatttacgccgtataaagagctcaagtattgaggtcgctcgggcacaccatcgtcgtattccttcaaaaatcggagcggcaggtccggttggagtcctgcgtgccgaaatggcgaggaaaagaggccatatgcctattcgccaattgatgcttaaagcgggcccggcaattcaggcaatcaaaccggtcatgatgatgagcccactctctgtcgcacaattcttgatcccaggtaagcaaaaatttgatttgctcgttatggacgaagccagccaaattcagcctgtcgatgccataggtgcaattgcgcgctgtcagcaagttgttgttgtcggggacgaaaggcaattgccgccaaccagtttcttctctcgtatgactgaagccagtaacgatgatggggatgaagattcgacgcaagtagcagatatcgaaagcatacttggattgtttgttgccagaggcttgccacagcgaatgctccgctggcattaccgtagtcgacaccagtcgcttattgcggtttctaatagtcagttctacgaaaacaaattgtttatagtaccaagcccatacactgaagaggcgggtatgggcttgcgattccattatgttgaaaacggtgttttcgaatcaggtgcaggtaatgccaaccctattgaggcaaaaagaattgctaccgcaattcttgagcatgtacagcagaatcccgaattgtcactgggagtcgcaacattctcggtttcacaacgtaaggctattcaggatgaattagaggttcttcgccgtttaaatcctcaatatgaggatttctttaattcccatccaggagagccattcttcattaaaaacctggaaaatatccaaggtgatgaacgtgatgtcatcatgatctctgtagggtatgcgcgtaataaacaaggctatctggcaatgcgatttggccctctgggttcgcaaggtggtgagcgacggctgaatgtgctgattagccgtgcaaaacgtcgatgtgaggtttttgcatcgatcaccgatgaagatattgatcttgagcgagcgaaaggtgttggcgtaatagcgttcaaactattccttcaatatgcccgtacaggacgcttatcaatgtccaaagtttccgggcgtccgatggatagcgtatttgaagaacaagtcgcctcagcacttcaaaaccgaggctatcaagtacacccgcaagtaggaattgctggcttctttatcgatctagcaattgccgatcctgaattaccgggacgttatctgatcctacccacgtaa

SEQ ID NO: 146339 - DNA, 504 bp, Enterobacter cloacae
atgccgggcaaccgcccgcattatgggcgttggcctcaacacgattttacgtcacttaaaaaactcaggccgcagtcggtaacctcgcgcatacagccgggcagtgatgtgattgtctgcgctgaaatggacgaacagtggggctacgtcggtgctaaatcacgtcagcgctggctgttttacgcgtatgacaggatacggaggacggttgtggcgcacgtcttcggtgaacgcactctggccacactggagcgtcttctgagcctgctgtcggcctttgaggtcgtggtatggatgacggatggctggccgctgtatgaatcccgcctgaagggaaagctgcacgtaatcagcaagcgttacactcagcgcattgagcgacataacctgaatctgagacaacatctggcaaggctgggacggaagtcactgtcgttctcaaaatcggtggagctgcatgacaaagtcatcgggcattatctgaacataaaacactatcagtaa

SEQ ID NO: 146340 - DNA, 426 bp, Enterobacter cloacae
atgacaggtgttaactcaattcagatccctcaggaagcggttgcaggtattcttgataccataaatcgtataaagcgggtttccccggaatcgaaaatcattgttatcggtccggtgccacagtggaaacaaaatcttgttgctgtaatgctgaagtactgggatgagtttcatacttacccgccaaagtatatggactttgaacttgataaaagcatgttcacatgggatgaggcgctcaaatctggccttgagcctcatggggtgaagtacatttctgccctcaatgagatgtgtaacgagcagggatgtataaccagggtcggtgacggggtgaaagacttatctgccgctgactggggacaccttacccccgcatcttctgcatatcttgtcgataagattaaaggtcagcttctgaattaa

SEQ ID NO: 146341 - DNA, 735 bp, Enterobacter cloacae
atgcgtataacaaacatgttactagttcttggttttatcccatacatggcagtagcaagccgaggcgatactatctgtcagacttggttgaaagaaggggcaggtaaccaaattacaacccctgcgatatccggagatatacaagacaaacctgctgaccttgctatttgctatcaaggtaaggattatagccaggatgtagctaaatcaaccctcttcaaaaagttaccaggtaatggactaagagttatatcgtcgtcgaatgttgaaggttttagggagatgtatgtctctctatataacagtataactagtgagtctgttataactcgtgtggctattaataattataatgcgttagtggcatatcctggtggtcttgtaagtcgtcagcagttaaaaggaagtgatctggacgggtattttgtttttatcccatcatatataaaagatgccgtctattttaactttatcgaaccgtcaaatgtgcgagtttataaatttcaccatatccccggctatgttaatagtgccgctgatatatcaaaagtatctgattcatacggtgagtgggtcaagaaaaatggagacataattgtttccaaggatgaaatcatcgaaggaaaagggcgagtggggtatggagcaattattactccggatggtaaagaaaaatgtaagttcgattctggaataaaagcttgggttcttacggcgcttgcttcttgtgaataa

SEQ ID NO: 146342 - DNA, 405 bp, Enterobacter cloacae
atgagccttaccttgccacttatgtactttaaaacaggaagcgatcttagccagataacgcattatgaagtgaactacccggatgattttgtaaaacaagcatgggaacagccagaaataaacctctttattgtttgtgtagcaacaaagaaaggcgcggttcgggagatcaagggaggcatggccgtatttactagcatacctgccagtaatgggcttgagctatccagggctcttgatgacgttcttagaaaatctaatgaactccgctcgctcgcaggtcagaaaaataacgtctttcttccggcaaaagttggtcttgctggcgacccccctacagaacaagagttgcttagtcttttttatcagcagtgcctgaagcatggatcatggggtagtgcctga

SEQ ID NO: 146343 - DNA, 348 bp, Enterobacter cloacae
atgcaggaaaagcttaatgcggttattgaagagcgccgtgaagaagctgagcaggaagccaaagagcgagaagaacgtgaaagaaagcgtctagaattgcttcagttgatcgcaggtgaaggtttctccgctgaagaactgctaggattaagcgaaggggcaccgaaaaaacaaaaaaacaaacttccgaaagcaccgccaaaatatcagtttgaagaaaatggcgtagtgaaatattggtctggtcgcggtcgtgcgcctaaaccaattgatgcagcccttaaagctggtcagaagcttgaggattttctcatcgagaaagaccaatccggcacagaacaagcataa

SEQ ID NO: 146344 - DNA, 249 bp, Enterobacter cloacae
atgaatgaaaaagtttttggagcaaaagccatttggactccaaaggtttttgcgcttgtttacctggtaattggcattttcctcgttttttctgttgtctcaatgaatttcacggcgattacgatatcggtggtaagtgcattgcttttacgtgtgctttatgagttcctaatgacctcattcaaggcgactgagcatctttacaggatcgccgaatctcttgaccgtaatggatccagcgataaatag

SEQ ID NO: 146345 - DNA, 246 bp, Enterobacter cloacae
atgaataatcccatccagagtattattccccctgtcaccgtacaacatcagctgtctcgccattgcagctcttccgtcggcatcattcgcaaaggtagaaaatccgccatttttacccgttgcgtttgctgcaaccctcaaattaccgggattattatttctgaagccaattgcgttattccttgtttccccgtaaggaacattgccgcgtgcaacgttggattgtggctggctgatagcggataa

SEQ ID NO: 146346 - DNA, 405 bp, Enterobacter cloacae
atgcaaatagatcaagaataccttaaaggtttgctcgaggctttcgaggcatcggattcacctgataccgatattattcgattaaatgatttagggttcaattgtgaaactgacacatttgtgtttcatatgcgtttgcttgaggatagagggctgattatcaggagtgatggagagcccggctttggtgctattcagtctttagacggaatgactcactgggctgtaatgcccttgcgattgaccgcgatggggcatgacttcttggatgctctccgtaacaaagaggtttgggcaacattaaaaaccggattcaaagatgccagtatgggcacgctgatgacagtttcgaaggagctgtttaaccgagctcttgctaagcaacttgataaaatgttcgactaa

SEQ ID NO: 146347 - DNA, 1152 bp, Enterobacter cloacae
atgagacgaacatttacagcagaggaaaaagcctctgtttttgaactatggaagaacggaacaggcttcagtgaaatagcgaatatcctgggttcaaaacccggaacgatctttactatgttaagggatactggcggcataaaaccccatgagcgtaagcgggctgtagctcacctgacactgtctgagcgcgaggagatacgagctggtttgtcagccaaaatgagcattcgtgcgatagctactgcgctgaatcgcagtccttcgacgatctcacgtgaagttcagcgtaatcggggcagacgctattacaaagctgttgatgctaataaccgagccaacagaatggcgaaaaggccaaaaccgtgcttactggatcaaaatttaccattgcgaaagcttgttctggaaaagctggagatgaaatggtctccagagcaaatatcaggatggttaaggcgaacaaaaccacgtcaaaaaacgctgcgaatatcacctgagacaatttataaaacgctgtactttcgtagccgtgaagcgctacaccacctgaatatacagcatctgcgacggtcgcatagccttcgccatggcaggcgtcatacccgcaaaggcgaaagaggtacgattaacatagtgaacggaacaccaattcacgaacgttcccgaaatatcgataacagacgctctctggggcattgggagggcgatttagtctcaggtacaaaaaactctcatatagccacacttgtagaccgaaaatcacgttatacgatcatccttagactcaggggcaaagattctgtctcagtaaatcaggctcttaccgacaaattcctgagtttaccgtcagaactcagaaaatcactgacatgggacagaggaatggaactggccagacatctagaatttactgtcagcaccggcgttaaagtttacttctgcgatcctcagagtccttggcagcggggaacaaatgagaacacaaatgggctaattcggcagtactttcctaaaaagacatgtcttgcccaatatactcaacatgaactagatctggttgctgctcagctaaacaacagaccgagaaagacactgaagttcaaaacaccgaaagagataattgaaaggggtgttgcattgacagattga

SEQ ID NO: 146348 - DNA, 594 bp, Enterobacter cloacae
atgaaagtcacatttttaaccgtgcttttatctctggctacgtttacgagcttggcggggcaacatgccttaactccagaaactatgccgcagccgttggttccggatgctcgctgccagataaccagcagcaccactgaccttgactatggcgccaaatcccgctgggaaatgcaggacattagcgatcgcagccagtcagtaacactgggcaagcgccgggtatcgctgtcggtagtttgtccgtatacccataacatgagcatcaaggtcatgggcgatcgtaacgtacacggcggtttccgttacggggagtcgggtgaagtgcaggtacgaatcgtacaggcgcaacttgatggccttgatgtgcaagttgggctcagcatgccgtcgggaagtctagtggggtctcctaaggattcgctggcgctgttaccagaacagacattttctgctgtaaggggtaatcaggccgtgcaggggaaggctttcattgtactgctggaaattcagcccgtgttaactgacacaggagccagagtatcgagtcgacaaaccaacacatccaatatttcattcgagttagttgattag

SEQ ID NO: 146349 - DNA, 219 bp, Enterobacter cloacae
atgcaaagaaaagtactggctctgatgattccggctctgttaatagctggttctgcacatgcagcagaaatttataataaagacggtaacaaattagatctgtacggaaaagtagatggtctgcactatttttccgataacaaaggtgctgacggcgatcaaacctatatgcgtctgggtttcaagggtgaaacccaggtaatgactccaacttactga

SEQ ID NO: 146350 - DNA, 129 bp, Enterobacter cloacae
atgcggattatcagcagcaatatgctttttcatctgatcatcagcatagctctttacctcaagagctttatcgtcaacgtactgacgcgttgccagcacaaccgacggatcaattttcagggaaattga

SEQ ID NO: 146351 - DNA, 372 bp, Enterobacter cloacae
atggaggttgataagacacagttcgtgaaactttatgttgacggagtatctgctattgaaggactgtcttcatcgggtaaaaaagttttcaagatcctttatcttgctatcagagataataaggatactgatactattttgatgtcatacgatattgttgatcaagatgtcgtaaaaatatccagaacaacatatttcaaaggcatgaaagaacttgctgacaagaagtttattgcagagaccatgatacagaactattacttcattaatccagactatatgtttaatggcgaccgtttaacatttatgaaaacatattatctttccagcagtaactctaataaacccagtaataataaggtgaagaaatga

SEQ ID NO: 146352 - DNA, 339 bp, Enterobacter cloacae
atgccgacgattaccgctggtggccagcacgttggcgaggtccggacattcctcgaaacctactgcggtgatagcgaggatgaatggctggtgacgatcgagggggttaagtaccagatcgtcgatatcggaatgcgcatgctgcaaccgcatgagctttataaggcgcagggcttccctgatggctacgttatcgatcaggactaccgcggtaaccgttacgccaaagacaagcaggtagcgcgctgcggtaatgcagtaccgccgccgttcgcccgcgcgctggttgaggcaaatcttcctgagttctgttctgacaaccagcaggaggtggcgtga

SEQ ID NO: 146353 - DNA, 150 bp, Enterobacter cloacae
atgatgccgatgatgatgagcccgacgacgacgcggaagaagacgaacgcgacgatgatgctgaagatgacggcgatgatccggatgcgtcagaagatgatgattctgaagacgacggcgacgacgatcgcaaagagagtaaggcggtaa

SEQ ID NO: 146354 - DNA, 924 bp, Enterobacter cloacae
atgaatctgcttaaatattttttgctgttgatattgacattaatatcttcagaaagctatgccggatgtgcgaataatatcgctgtgcaaaatttcaatttaaattttaatacgataactgcgcagcgcgatgttgcgccgggaacggtggttgcttcccagtcgggtatttataatgtaaatatttcatgcaccgataccactaacgtctatcaggaggcgatgaacggtacgtcactggggaacagcctctatgatataggtgtaagtgggtacggtgtgcgtgtttctgaaaatgacacgggtggtggttttcaccactactttccaattgggtttgctcttggcaactataacgcgtcttatatgtataaagttgaactggtaagaacaaccggttctgcggcatcaggaacccttcgcagtggacaagttgccaatgtgtcaatttcaaaccaatttcttattgcaacatggaacataaccggtggaagcatcactactctggcctgtagccttaatacagcggcgctgagttttcctataggtaatattcctgttgcaggttttggttcaacagtgggcactacaccagccaatgcgcaagtaagtcaaaatcttgggttaacctgcgattcgggtgcgaatattaatatttccttaagcggtcaacaaaatccggacgtgaccaatacaagtgttttagctttgtcaggtcaggggagctatggagttgcacagggagttggcgtacagattttatatggcggcgtgccacttaaccttaataataatattttgctaaagcaatcaccggggggtattgaatcatttcctcttgttgctcgttattatcagacgaagccgactgttaatcccgggacagcaaacgcaacagcaacgttgaatattacttatcaataa

SEQ ID NO: 146355 - DNA, 510 bp, Enterobacter cloacae
atgaatagtaagttaagtattgtggctttgttgatgaccgcccccattttttcgtgttctgcggatactgtaaatattaacgtgacgggtaatgtcgtggcgtcaccctgcattgttaacggcggggcaagcagccttaatgttgatttaggaaatatacaggcaactgcactcgcggctgccggatcgtcatctactgcggtaccatttacactaacggttacaaactgcccgacaggtaccagtactgtaaaagcatctattggtggttctgcttcccacgactcacctaatctctatatgaattcaggtacagcaggtaatgtatatgttgctttgtatgatggtgtgacaggaaatatgttgggtcctggatctgccgtcgttaaaacagtccagagcgacagtacggcatcgatagcattaaaagctaacgcatattctctatatgggaacacaacgcctggttcgatcagttcggcaataacagtcacaatgacttaccagtaa

SEQ ID NO: 146356 - DNA, 2676 bp, Enterobacter cloacae
atgtcgttaaccctacgcgaagccagtaaggatacgttacaggcagaaaataaaacctggcactactacagcctgccgctggctgccagaacgcttggggacatttcgcgtttacccaagtccttgaaagttttacttgaaaatctcttgcgctggcaggacggtgaatccgtcacgctcgatgatatccaggcgctggcagggtggcttgagaaggcccatgccgacagagaaatcgcctaccgcccggcaagggtgctgatgcaggactttaccggtgttccggccgtggttgatttagccgcgatgcgcgaagccgtgaagcgtctcggcggagatacggcaaaggttaacccgctttcccccgttgacctcgtcattgaccactccgtgaccgttgaccacttcggtgatgacgatgcctttggtgaaaacgttcgtctcgagatggagcgtaaccacgagcgctacgtcttcctgaagtggggacagcaggcgttcagccgttttagcgtggtcccgccaggcaccggcatttgtcaccaggtaaaccttgaatatctgggtaaagccgtctggagcgaattgcaggataaagagtgggtggcttatccggacacgctggtgggcacggattcacataccaccatgatcaacggtctgggcgtgctgggctggggcgtcggcggtattgaagcggaagccgccatgctcggccagccggtatccatgcttattccggatgtggtgggcttcaagctgaccggaaaactgtctgaaggcattaccgccaccgacctggtgctgaccgtcacccagatgctgcgcaagcatggcgtggtaggcaagtttgtcgaattctacggtgacggactggattcgctgccgctggccgaccgcgccaccattgccaatatggcgccggaatacggtgccacctgcggctttttccccattgacgacggctcgctggagtacatgcgcctcagcggccgcagcgaagagcaggtcgcgctggtggaagcgtataccaaagcgcagggcatgtggcgcaatccgggcgatgagcctgttttcaccagcacgcttgaactcgatatgggaagcgtcgaagcgagcctcgcggggccgaaacgcccgcaggatagggttgcgctgaccgacgtgccgaaagcgtttgccgacagcaatacccttgaagtgaacgtggcgcagaaagaccatcgtcccgtcgactatgttctgaacggacatcagtatcagcttccggacggtgcggttgtgattgccgcgattacctcctgcaccaacacgtccaaccccagcgtattaatggcggccggtctgctggctaagaaagcggtagagcttgggctaaaacctcaaccgtgggttaaggcctcgctggcaccgggctccaaagtggtgtcggattacctggctcaggccaaactgacgccgtacctggacgagctgggctttaacctcgtgggctacggctgtacgacctgcattggtaactccgggccactgcctgaacccatcgaaacggcgatcaagcagggtgacctgacggtcggcgccgtcctttcaggtaaccgaaactttgaagggcgcattcacccgctggtgaaaaccaactggcttgcttcgccgccgctggtggtggcttatgccctggccgggaacatgaatatcaacctggtgaccgatccgattggtcacgatcgtaagaatgatcctgtctatctgaaagatatttggccttcttcacgtgaaatcgcgttggccgttgagaaggtctctaccgagatgttccgcaaagagtacgcggaggtctttgaaggcacgccggaatggaaagccatcaacgttgcaggttcggatacctatggctggcaggatgactcgacctatattcgtctgtcgccgttctttgatgagatgctggccgagccggcgccgcttaaggatatccatggcgcgcgtatcctggccatgctgggggattctgtcacgacggatcatatctctccggcggggagcatcaaagccgatagcccggcaggccgttacctgcaaagccggggtgtcgaacgccgcgattttaactcctacggctcgcgccgcggtaaccatgaagtcatgatgcgcgggacctttgccaacatccgcattcgtaacgaaatggtgccgggcgtggaagggggcatgacgcgccatctgccggggacggaagttgtgtcgatttatgatgcggcggtcaaataccaacaggaagggacgccgctggcggtgattgccgggaaagagtatggttccggctccagccgcgactgggcggcgaaaggcccgcgcctgcttggcgttcgggtggtcatcgccgaatcgttcgaacgtattcaccgttcgaatctgatcggcatggggatcctgccgcttgagttcccgcagggcgtgacgcgtaaaacgctgggtctgaccggggaagagcagattgatattagcggcctgcaaaacctgcagccgggtaaaacggtgccggtaacgttaacgcgggcagacgggaaaaccgaggtgctggattgtcggtgccgtattgacacggcaaccgagctgacctactaccagaacgacggcattttacattacgtgattcgtaagatgctggattga

SEQ ID NO: 146357 - DNA, 1095 bp, Enterobacter cloacae
atgattgagctttcatgtgaaagtatttttgatgatgatttttgtcaggaatataatgcactccttcgcgagaaaataaaaccttttaaattaagcgtttcatccgaaagcgtggattttactgaggatacgctgtcatacctcctgatcaatcctttcgacagcgccttgagaaagaagcaggacgttttttttgataaatattttaatgtgatgcaatttctgctccacagtaaagcttattatgatttttttaaaaatattttggtttcagaaggcttaccttctaacatatatctgagaaaattgcgtgaggagcgccgtagagtcattgagcagtatataaaaccatatttacctcaactttcaacgatgcctgcggatgatgcatgtcgtacggctgttaactataaaaagatgtatgatgatgtcgattcatatcgcaggagcttaagcaatgacattaacaagcatatatcctataaaaaaatagacgatcaaatacgtagctttgttattagaaatatcaatctacgcatatgcccatactgcaaccgcaactactgcgatttctatcattttgagaagaaacaaaaaaatgtcgcagctttagatcacttttatccacaaaaaaaattcccattatacgctgtttcgctgcataattttgttccttcctgttattactgcaacagtatgctaaaaaaagacagactttatccattaaaatcagtttatgtgactgactctgtcgaaaagacgtattttaaaattgtgccaacgagtctgtcgggactgcttggtgaaaaggacgactttttagtgtgtaccagcaaagcgtctatgcaggatcgcctaaagggttacgttttcaggcatgaatctatttatgaaaatcataagcaagagataacattatggctcaaaagaaaagctctccacaacgacggatatcgttcccatctgagtacaattcttaagaaaaacatttccgataatgaactaaaaatgatgttgtttgatacaacaggtaatgtggacgactttaaaactaaacccttatcccgagcgaaaaaagatatcctggatttatag

SEQ ID NO: 146358 - DNA, 1821 bp, Enterobacter cloacae
atggaacttatctattcttatctgcattcctgctggggggaaaagtttgctttaggacttaatctttctcaaaagattcattgtgagtatgattttgcaacaaagaaaatagtcgtgcaggaaaaaaagacgacagatttaacccatttctttggtagcggaatatcaaacgtcactgcaattgttggacgcaatggtgtagggaaatctaccatccttcgtctgttaggtttaaaaaaaaatgacctcaatgatatttatcgctcggatgaagcagtatggttttgcctctatcatattgagggggaaacctatgcactagaaggaattagttctggggagctttttgatgacagtattctccaacgccggaaaggatactttgcatatattcttgttgagcatgacggacaactttattacaaaagccatcttcaggattatacgaatgactttgaaaataagttagtggttctttttaatcctgatatgaaggtaaggcagcgttttgaatccgagtataataattatggattcaaacgtgaatatattaatatctcgacaagggcaatgtatgaattcttgacttttcaagaagaattcacagagtttaagagccgaaaatggcattatgaattaaaaataaataacaacttcaggaataacagaatgtcatctgaaagaattcttaagttattcagggataaggatttttatactgaagaggaaattccttttccacatacaatatatacagaaagactaaagggaagtaaaccgcattttattttgcatttgatcgaaatgcttattaatgacctttttattaacaccgtggaacctgggcgtacagagattttagacgaacaggtagatcagaagtttgttgaacgctatcttagtgaaattggagagttgtttgacggcgatcttatgaatttttatgaggttcgagactatctgtcaaatattatgctccgttttatctctgtagcagaagatatcgtcgggatagatgaagagatcgagtggtcagtcgtgatcaaaatactcgaatctttaccagatgagtggtttaaaaatagtcatggatatattcaacttgctatcccttgtacacctgaagcatataaatatgatgttatttcactccttgatgagttagctaaagcacgttttgctacaccagtgaaatgcacctccccactgatgagtacagggcaaacggcattggtcgaaaaaatttcaagtattcgttatgcaataaataatcagctttcatatgaccgggtaaataatataattttattacttgatgaatatgaggagcatctacatccggaatggataagacgtttttttgattatttgataacgatgctcagtcaatttaaagataacataaaaatacaagtggttattgctacgcatacaccttatatcattagtgagttacctaaggaaaatattataaagttagtctggaagaataaccggagggtaactgaaaattgtcatttcggatttggcagtaatatatttgatatcattagtgacagctttttccttgataactcccttggcgcctttgcccggaaaaaaattgatggcgtcatagagatgcttgcatctgaagaaccgaaaggatctgagcaattaattgaatgccttcgaatcattgagcttgtggatgatccttacctgcaatcaaaactccaacaattggtggatgttaaatatccacaaagacaatgtgaaaaggagattgaaaggctcaaaaaaagaattattgaattggaaaggagtaattacaatgattga

SEQ ID NO: 146359 - DNA, 3297 bp, Enterobacter cloacae
ttggttcaatcagaatgcatttcatggacaaaatgtacttcatggctaacaaactttcttagtcgtagaggattgagacaacccgatggccgcccgctttatgaatatcaagctacgaatgaagaatatgtggacttaacgcagttacttcgagcggttagccaaactacaaatattgttgatgataaaggctatgcttcctgttttgtgtttttttgctctgaatggtaccgcagagactatgagcggaattgtgggtggacttgggagcccatttataaaaagctaggtacatcgttaacggcgactgaactaaggcatatcgttcctaaagggatggagagttactggatgcgaccaattcgattttatgaatcggatagacgtaactttctaggaacgttgttcagtgagggtggtctaccttttcgtttactgaaggaatcagatagtagttttcaaaccgtattttcccggatccttaatcagtatgaacaagctcagatagcaggtttttccatgctttcgctggtaagaaacattatagaaagatcttcgcttccagctgtttttattgaagacacatcagtagagctcatcagtcatatggcagaaaaactcagctcattggtactgatgtataatctaagcgatgactctgaaccagtagcgcagcttgataaaactcatccaaaatggcgggatgaattccctatgccacttgatgatgaaacaggcacccgctttctaaatggattgttacgtactgcatctatagaaacaaaaccccgttcacaaaaaaataaatgtaccggttgtcagttcttttggacagaaaaatcgccggatcaaatacgtgcgatagtttcgttaccagatgaactctcttttccaattattagtgaaccttcaactacacgatttgaaattgctatttacgaaggcattaacgaagttgcaagccttggtgtagtctatgcgtccctcgaaaaatcacatgccagaattcgcatccgtaaaaatgaatcacgatttgccagacatgccccttctgcgagtttatcgttagttgctcgggcaggcggaatgaatgttggcgcaataaaactggatgatagcgaaatcgccattggtgaggttccacttacttttgttgctgaaggagaacgatggctattaaaagggcaagcttcgtgcaatgttcgtaacagcgatgttcttattgttctacctcgagaaaagacaactgtttcaggatatgaaacgactttgaatacaatttcagtcttaggcttcgaaacactctccgtaaaaggttgccatgaattaattatttccggacatgaaatatatcgtatacgcactggaaaagaacagactaaccctggtggggttgagttttatggtaaaagagtaaattgggtatgcaaccctactgaaacattccttggggtccctaaagtcacctcgaaaaatcctgatgtaaaacatatccaatttaaaccttattttaatagtaaatcaatcgaagaatgccagttacaagagatgatgggatctcaatttgtttccgtcaggaataatgataatgagacgatactccgtcgaaaaattggaatattaccggcagactttaatgttcagattcatggtggcgagcaagctaatgaaggtaccattgtcatctcaacgcaacatccctgcatgtctgtcttaaaaaataaaacattcgagattgcgcgaaaacgcacagcaggacgcaccgagatattactcaaagccgaaggcatccctcccgcctttatctctctggaaatttatcctaatttgggggctgactcaattgaattgactttgccttatcctgctaaaggttgtttggtttttgatgcaaatggagaccttcttgaaaaaaatatcactttgcatgatttacttggttcaagagcctacttgtttggtaaaaatggtgaaccgactcgattttcactggaattacatctacgcactataaatggtcaacaggcatggcatgaatggttttatacggcaggagaacgccctattgaactcaatttatacagtctaagagagcatattgaaaatttgctatctcttgagtcaggaattgaccaagttgtggatatgcgaatcagaggtgctggcgtagcgatgagctggcagattcggcgctacaaatacagtttgcgttatgattatgaaaaagaagttctcaccagccagtcgacaagctatcgtgccgggcaactcccttctcctgtcatcatgttattgagcgagccagagcgaaaagcagtctcgttgtcatcgaggctaagtgagggtgtacctgttggtgaatatgaactgagttcaatcgttagcaaaaacgggccttggctagtagtcccaaaggaaggtgatgaaatggcgtttcgtccatgcttcattcgtggcgaatcttccttacatggcgatgaaagtagcgttcgttcacttcagaaagccacccaactttttaatccccaggcaaaagtgaataccataacgctggtgcttgatcagatggctaccgatcctgcgcactccggttggcagtttatgcacagtctttatgaacattttggctatcttccgctggctacatttgaagtatggcgagcactcgtacaacatccaagagcgctggcgatgtctctcttcaaatttgaaatgtccgccgagtatttaaaccgcattgagaatgaattccctgttttttgggagttcttccctatattagaaattaaatccgcagcagaaaccttcaaacgattcctgtcccaaaaaggggctccagatgaagttttggtaacactgctgagtaagatgtatcgacaattagggatcgtatttccgacttatgccgatgaagttgaaaaatggttaagttatgggaaattccctcctcccattccaacatcctttgtccgcgagtggtatcaggagcttttacgcgaacacagtgaagctcggtggccagaatatggctgtaagcgactgcataactggatgtcgtcacaaacagatgtagtgatagatatttatcccgaggctgattatcgctattcagttgcctggttacctgttttcgcggctgcagtggcaagcggtaaaacttcctttgaaactgtgtttgaacacaaacctggcgccgtatttttcctgagacaagttcgggacttcgattctcgctggttcaaggccatattccagtgcagccttctgcgttatatttcaaaaaataaaaaggattaa

SEQ ID NO: 146360 - DNA, 1305 bp, Enterobacter cloacae
atggtaattaaaaatgtaatctggcagttgtcagagaaaataatcagattgactgttaccgtggttgtaagtgcgcttatggccagatatttaggtccggaaggtttcggaaaatataattatataacagcaatcattgcaatagttttagttgtaacttcattaggtttcaatcgtattctcgttcgagaatcagcaaattgcgcaactgagatagaacataagcaaatagtcacgaccgcattaacactaaggctgatatcttcattatgtgcaattgcaatcataacactatacataatgtctcttggtaatattgatgatatcgtatacataatatcactactatctgtgttttttgtatcatttgatgtgatcgattatcatctccagggacaatctgtttttaaagtcgctacaagttgtcgggtagcgggatttattctatcatctgcgcttcgtgtctggtttgtttatatccaagccgatataatatatttttatgcaacaattttaatcgaatatgccgttgctggaattctaatattaattgtttctcaaacaaaatatagtgattataccaaaatatccttgagttatttttcatatcctaaggctaaggggcttttgaaagagtcatggcctgaaataattgcaggttttggggcaattgtattcatgaaaatggatcaaataatgcttcagcggttacaaggtgacgcaagtgttggtatttactcggcagctacgagaattagtgaagcatggtattttattccaacagcgatagtcgctgcagtttttccagttttgatgcgtaaatacaaaactgataaacaagacgtaatgaatcacttaagtaatgtaatgtctttactcgtctggttatcaataaccgcaggtctttttgtaaattttatcggtgattatataatccatattgtatatggagcagaatatgcagaaagttcattaattctaaagttacatatctgggctggcatattcctatgtatgggaattgtttcgggctcgtggcttgttgcagaaaaaaagctaaagctaaatctttatagaaacttaacaggacttgctcttaattttgcattgaatatattactcattcctcaatatggcggtataggagctgcagttgcgactgttttgggacttgccatggcttttttctttttcgatctattccataaagatttgagaagaatgttttggcttaagttaacagcattctcgcctttaattttgattaaatctattaaacattttttaaatgaagtgaaatcatga

SEQ ID NO: 146361 - DNA, 309 bp, Enterobacter cloacae
atggaagactgtcgggaattgtctgagtgttgccgggtgacgcttcgcttacccggcctacaaggtaaatgcgaacggcaacggatgttgccgtttttggtgttttgtgggagagggcaccagaccgcactacaaaaacacacgttttgtaggccgggtaaggcgaagccgccacccggcacaaccgcactagctaaacatcacctgcgcccagcgcgccagaccagcggtgacggagccaaagtcatcgccacccgcaactggaatgcccggcagctgttcggccagcgctttcttgatcagcggtga

SEQ ID NO: 146362 - DNA, 630 bp, Enterobacter cloacae
atgaggcgcaacaccgttagctcaaaaattaaatcatttatattgctcatgattacattttttttgcatggatgctattcattagatcaaaacgagttctgtccatttggaatgggactaagtgaagaagaagataccagttcgcctgtgtacgttgactcaaataatattaaactatccggacaagaacaaaaatctcttataagtaaatctcgtactttttctgctaaaataataaatgaaacttatgatgtggcggaatatgcatgcacaaataaagaaatcccagcaaaaatgcaacagcaaactcaagatcttgcttttatatatttaaattcttgggttgtgcatccatggacatggagtgataacggcaagttacagctaaatatgttgcatgaagcatttaaagaaaacaacacatttaatataatgacaggaacgttctgtgctgttgggttatgcacgcctaaagagtttcttaatttttgcaaaacaaaggaaagaaattttttgcataatgaggaggctaacgacgccctcgcaaaattttatatctccagccaaaattatactaaaacctacccaaaaatgagaacggtaagctattgcaaggggccaaagtggtaa

SEQ ID NO: 146363 - DNA, 288 bp, Enterobacter cloacae
atgactatgacccatcacacccagactagcgcccctaacgccgcaccggcgaccagcgtatccccgctggagcagtcaggctcaacaaaaacgaaatttccagaagtcaaaaccgttaagacagcgatcgcaaaactgatttacgatatcgaaaataaccgctgccatcgcctggcatatcgtgacgctgtagaggggctttgtcaggatgtagcaaaccagatcactcgctgcatacattcacacgatacaggggtgacgttacgcgatctgggtgaactggcttag

SEQ ID NO: 146364 - DNA, 528 bp, Enterobacter cloacae
gtggatattggcaatacacccaacgcaaaagactatggcagtaaccttgaacgagcaggttttcgaattttagggcaaggtgaaacattttctgcgtctcagaacgcgttacagctcgttttgagcaccattaacagcgccaggctcaacattgatgttgcggcttacagtttcaccagtaagccggtggcggcggcgctcgtcgccgccaaaaatcgcggggtggcagtacgggttgtggctgatgaaaatagtaacaacggcaaatacaccgccgttacgttccttgcaaaccagggcgtgccggtgcgtcttaatggccggtacgccatcatgcacaataaatttatggttgtggatggcaacacggtgcaaaccggatcatttaactacacggccagcgccgtaagccgcaacgccaaaaacgttctgctgattaaggaggttccggagctggccgcaacgtaccagggggaatttaacaggctgtggaacgaatctgaaaggaagtcaggcaaccttaattag

SEQ ID NO: 146365 - DNA, 444 bp, Enterobacter cloacae
atgcgtcattataaattacttgcgttagcagcaatgtttctgtgtggttcatcgtttgcgaatgatgaatattttgtgtgcgacactgcaaaaggaacaatcaaactagaagaaaacgacggtgtacttcggtacaccttattgaaagaccacaaaaatgaatttaactatgagtcgaaaggcaatgaacatttagaatttaaatacaatcattattcacgatttcaaactgattacttcaatgtgtcgtttgtaaatgcagggtataaatacacgatatttagtaattatgagaatgagaatgaaagtcgtggggttagtgttacgaacctgaatagcaagaaggaatctgtttacgattgtaagtccgttggcattgatcgcctcagtgatttgtcggcaaaattgacctgtgataaggactcagttcttggttgtgagtag

SEQ ID NO: 146366 - DNA, 2310 bp, Enterobacter cloacae
atgaatatatgttacccggtacggaaggccgacggacgggagtataagaactatgacgaattgctgaccgacattcgaaaaaatgcccacggttggtggttacttggcacaaatcgttactggcatgggggaattcatgtcgggatgtcatcgtccccggccacggtgctggatcctgattcaccagaaaaatctgttccgcttcagttcatgatggacggtgaggtggtggcatggcgggttaaccgcgattacgcggttatcgagtgttgccaggaacgccccctgcgccagtccggcacctttgtgctggttaaatcagtgtacaagcctgacgagcaggatgaatcctcctggctgacgctgtaccagctttacatgcacatcgcgccattgtcagaatttccgaaacgctcgctttaccgggtcacgcagacaggccacggcgtgcggatgcgtaaacattcccgctacgatgacagccgcgaaatcgcgccggacgttctggaaaacaaacacggccacgtcagaacgctcgtacagggtgacacgcttgccgtactgcaacagaaatcgtttttactggaacaacgtccggagccgtttgctctggtgcagcgtcttcaggacggtaaacccgccggagaacttttctgggtctcgatgcgcccggaatttctggagcctgacggcgaatgttacgtgtgtctgcccgactggatgcacagtgcgctgaatcacggcgtgttagatgatgtggtggtgccgcctgtgccgctgaaagtgatggtgaaagcaggggatgcggtcggattcctcggcgttcaggatctggctgacgaagataactttccgcagattattacaacggactataaagcccatatcgagttgctgagcctcgatgagcatgtcccggatgtggtggcaaacgtaaaggggattaaaacgggtaaacagttcattaagctgaagctgaaacgcccactgtaccttagatgcggggagggcgaggaaagtacctttgagcagatgagcgccattacccgtgccgatgccggaaaaattatccctcgtgatgccacgtacccgtttacggataaaaccggaatcacatactttcagatccgcccgcatacgtggatacacgaggacgatgtggaacagctaagccagcatgatttagcggggctaaactttcactgtattgaggatgaacacacaaccgattttacccgcacgctggacgaacgatggctgattgacgccttgaaaagcatgagttcgcactttgacggtgaaaaaggacctcagttcgctcaggcaaaaatgttttatgacagcctgatccacaacgctgaaaccagaagatcgcctagcccgtatcccgataaatcacatgaccagtatttgtttcgtgcactgcataccaaccaaatgaatatccctgaatatgcgcggcgactaatagtgaaacacgacagcgactggcacagtacgcgcgatgatacacgctggtcatcggtatttaaggtcagggatgaaagtcctgttgtgaagatggccaacgggggatttctggatgcaacgcgctggatggataaggttccgccgttcgccagtcagcgctcagtatggcattttcatccgcttgagtttctggaaatattacgaagtgcagagtttcccaagactcctgttaatggggaattaacgcctatagaaattattaatttctataatgaagacagaattgatgatactgattatgaagaggctgcaaaagagttgggatgcgaagttgcagcaattaaagctgtagcaaaaacagaaacaggttcttatggctcctattttaagtttgaagataacgatgattatgttcctgcgatattatttgaaagacatcactttcataaatatacaaatgggaaatatgatcatttcgaagatatatcaaactctgttgcgggtggatatggcgcaacatcagtacagtatacaaaactagtcaaagcgtatgccttagaccaaaaagctgctttgaaatcagcatcctggggtaagtttcagattttggcgtcgaacttcgccacggcaggctacgccagccctgaggatttcgttttggcattaagtaagtctgaaaaaaatcaattaaaagcattcgttagcttcattaaggctgatagagttttattgcattcaattaggactaaagactggctttcatttgcaaaaagatataatggaccaagacagaagggttatgatttgaaaatggagagaaattacaatgcgtcattataa

SEQ ID NO: 146367 - DNA, 1239 bp, Enterobacter cloacae
atgagtaaattcttgtacagtataagtcgcagttcagaaataaaaagcgaaaatgataatattgatgttggcaacaaaaacctgatcatcactggaggcaatggttgcggaaaaacaacattactcaatgacatatacaataaactgtcaacacacctaatacagagaaatcaccaacctaaaagtcaaattgaaaacaacataaaatttcttttgaatcaaaaagaaaacgcagttaaaggatctcaagaatatcatcaagcaaaccaacaattacgatatcatcaggcggaacttgaaagggtgtggggtggtattcaattagaatttgaagatgctaacaaattatctttattactttcagaagggaaaggtgttattgctttttttcgagcaaacagacaggcatcaattcaagctgcgaccggagctaataaaattataagcactgacgaatccaattacttgtcaatcagcaaccaagaactaggcaatacacttgaacaacatcttgctaatttaaaaacaagacagtcatttgctaagactcatgacaataatctcaaattgttcaattctattgaaaattggttttcagagttagaaaaaaatattgcatacctaatggaggataccacatttgaacttaagttcaatcccgatgaattcaaattctttttaacacaagaaggtaaaaaaccttacacattccaaactctgtcttcaggatattcatctatatttaatattatctctgatttgataatgaaaaccgaggcttttaaaatctctccgagcgaactgcaggggatcgtgatgatcgatgaaatagatgcacatttgcatgtatcgcttcaaaggaaaattttgccgttcctgactaaaacgtatccatcgatacagttcattgtaacaacacactctccgtttgttatcggttcattagaagactccattatctatgatttgagttctaaacagcatttcaaagatctctctagttattcctatgaaactatcatcgaaggcttacttggagtgcctgtagtatcagtctctttggaaaaagatattaaacgcctttcattactcatcaatgaggataatcatgatatagaagccatagatgagattgtacagaaacttcttccttatagggataaacttgatgatgaatcagctatcttcttgataaaaggaatgaatttgcttaaatgcaaagcaagaggagataaataa

SEQ ID NO: 146368 - DNA, 657 bp, Enterobacter cloacae
atgtttcctgtatcgaaaaattctgttcctcctatatcgttagaaaggagaacatcttactctgaaaaagatgtcatagaaacactatcaaaggactttcataataaatgctatatatgtgaggtcaaagaccctctagttctaaacgttgagcatttcaaacctcacgaaggtgatgaaaataaaaaatatgattggaataatcttttctttgcttgcgggcgctgtaacaatattaaaagaaatcattttgaaaatattcttgattgtactgacccaagtgttgatgtattaaggtctatcaagcatgttttccccacgacagcctacgctgaacatgtcgatatagtgccaatgaacgacgacccaaagacgatagaaactgctacattaatttcaaaagttttcaatgacgaccacacaggcaataaagatctcacgcgcatatatttaaaaaagcggctaatgagacagtataggaaatttcttgacctagtttttgattacgacgatgaagatacccttccagaagataaagaaataatatatagaaaaatcaaaaacatgcttcgtgtagaatatgaattttcagcatttctcagatgggctatattagatgctcctctgcttcatcattttaagaatgatgttttctaa

SEQ ID NO: 146369 - DNA, 1182 bp, Enterobacter cloacae
atgtataaagtcgatacgccgaccaacagtctgcattccctgcaagaggtgacgttcagtagcctcggctttcgcgagcgcgatcatttgcaggagtggctggcgaaaaatccgcagacgctgaccaaaaaagacgacaaagaagacgaactgctgattatccagaaagagttcgccggctttgacgataccaaagagcgcctcgatctcctggcgctggataaaaaaggcaatctggtcatcatcgaaaacaagcttgatgattccgggcgcgacgtcgtctggcaggcgctgaaatatgccggttactgcgccaatctccgtcaggaaagcgtggttgagatcttccaactctatctggatcagtacgatcccaacgagaaccgccaggccgcagaagttatcgccgaatttatgggttgggaaagtctgaaagaaggggtgctcaaccgtaaaggcacccagcgggtcatcatggtcgcggccaatttccgcaaagaggtcaccaataccgcgctgtggctgatgcagtttggtatccgcgcccagtgtttcaaagtgaccccttaccgtttcggtgaagacgtgtttgtcgatatccgtcaggttatcccaaccccggaagcggagtcgtacatgattggcatggcgcagaaagaggcggaggagcagtccacctccagcagtagcgaactgcagcagcgtcactatctgcgccgcgagttctggacgatggcgctggaaaaattccgcaccagcccctgctcactgtttaataaccgcgctccctcaaccgatcactggctggccgccggatcgggggtcagcggcgtgccctttgaactgatcttttcccagaaagatgctcgcgtgcagctcaatatttcgcgtggggatgcgctggaaaacacctggttatttgaacgccttcaggaacgtaaaacgcacattgaatcgctgtttggcgagtcgctcgactggcgtttactgccagagcgaaaaagctgccagatcgtctgttcaaaggcgtttgatggcggcaataaagaggcctggcctgccattatcgactggatgatggatagcatgaaccgtctggaaaaggcgatccgcccgagtttgctggagctggcgattgagctgaaacagaccggtatgatcaccgagggagaggaagagtaa

SEQ ID NO: 146370 - DNA, 1278 bp, Enterobacter cloacae
atggggcaatcccctaaaggcgaagaggttaataatgaggggataggactccccttattgaatggacctacagagtttactgaccgttaccctgcacctgtgcagcatactgcatatgcaaaaaaaatatcgctaccaggagatattttattttgtgttcgtggttcaacaaccggcaggatgaactattctgatcaaaaatattgtataggtcgaggtcttgctgcaataagaggtcgaaacggatatccgacaccttacgttaaagctgtattagagacttatcttcctaaattgctggcagctgcgacaggatcaacttttcctaatgttagcaaagaccttattaataatattccagtaagtgttttacctgttgagaatgcttgtaatattagtaagctcatcgaattgcaggaagagaaagtattcacgaataatcagataaaccaaaccctcgaacaaatggcacaagccctgttcaaaagctggtttgttaattttgaacccgtaaaggccaaaatggcagtgctggaagcgggcggttcgcaggaagacgcaacgcttgcggctatgtcagcgatttccgggaaagatgctgatacgctggcggtttttgagcgtgaacaacctgaacactatgccgagttaaaagccacggcagaactgtttccgtctgcgatgcaggagagtgagttaggggaggttccggaaggttggaggactgagaatgttgaaaatattatcaacagattaaaagtaaaaaatacctttcccgctgattgtattaagcaatttggacagcatccagtgcttgagcaaggggctaagatttatcagggttatcacgatgaagaaccttcgtttaatgcatccttgcaaagtccaatgtttatttttggtgatcacacttgtgtgatgcatctgtcaactgtgccatttgatatttctaaaaatacattggttctgaaaggtaagggatttaacacgtattggacattttttgccttaaagggtaagcagaagtttcaagagtacaaaaggcattggtcagacctaaaagttaagcaggttgttattcctgatgaaaataatggtttgttgttaactaaatactttgcagtcaaatgtgaggatttattcgggttattggagcaaaatagaaaacaaaatttgattttgcaaaatatccgagacaccctcctccccaaactcctttccggcgaaatcaccctgccggaagccgagctggtgataagcgaggcggaaaatgtataa

SEQ ID NO: 146371 - DNA, 462 bp, Enterobacter cloacae
gtggataacccgcatctcagttttactaaagacctgtttacggtcacaaccgatcccgccttttttgagctggaagccattcatgattacctttcgcaatcgtcctgggctcctggtattgatatagaaacggtcagtgtatctatccagaacagcctttgttttggcctactggatggcacaagacagatcggtttcgcccgtctggtgacagactttgccacttttggttatttgtgcgacgtctacgtgctgaacgactatcagaaaagtggcctcggtcgttggttgattgaatgctgtcacgcccatccattgatgtcacgcctgcgacggataatgctggtcactgacagcgccccttggctataccagaaaatggggtatctcccgttgaaccgaccagactttgtctggcagatcaaccgaccaggcatgtatcgtaaaaccgaaggtaaatga

SEQ ID NO: 146372 - DNA, 603 bp, Enterobacter cloacae; identical to SEQ ID NO: 78957

SEQ ID NO: 146373 - DNA, 696 bp, Enterobacter cloacae
gtgttaacagtatctccgtcaattgcccctgaaatttatcgtattgcacccggtttccgggcactcagtatctatgtaaacgctgcgccggtgctgaaccctgatattggtgaaacagcgctgagagaagcttgtgaagcggttcttgtcggtgagcctgagtgggcagaatcgcatttagctgcatgggctgagatttttcagacgtttggcgctaagcctaaacgcaccccttgttcagctgatgcgttacgtaagcgtgtattacgtgacggcgcgatgccagcacttgaccccatcgttgatctctataatgccgttagccttcactacgccgtgccggtggggggcgagaacattgctgcctatcaggggctaccacgcctcgttgtggcaacaggcactgagccgtttgatacggtaaaagagggtgaaatcgccgttgaatatccttcgcaaggtgaagttatctggcgtgatgatgccggtgtgacctgccgtcgctggaactggcgacaaggagtcagaacccgcttagatgtggaagcacagtacatgtggtttattctggagagtctgccgcaaatgccactggaaaaacttcacgaagccgggaagatgctgaccgatggcctcgaagcaatgatgccaggtctgcgggttgacgtaactctcattgaagagcaacaaccgtaa

SEQ ID NO: 146374 - DNA, 2934 bp, Enterobacter cloacae
atggcagaccgcaatttaaatatcagggtggcattcagcgccctgaataatatgtcccgccctgtcaacgcggcgcgccagagtgccgccgcgttggcgtctcaaatcaatcagaccaaaaccagcattaaagggcttgagcgtcaggcaaccagctttgaccgcctcaccgcagccaataaaaaaaccaccgaacaactggcccaggcgaaagaacaggcccggcaaatggcggcggcttatggcccgttacgccagcgcagcgccgaacaggttgccgccctcaatcagcaacgtgcagccattcgccagttaacccagcagcagaaaggcgagcagacgcagcttaaccagttgcgcgccagcttctacagcgaaggcattgcgatcagcagcgccagccgggcgacggaacagatcaaccagcgcaccgcgcaatacaaccgccagcttgccgaacagcagcgacggcttgacgctgttaaccaggcgcaggcccgttacagccgcgccaaagaaaccggcgaaaagatgatgagcggggggatgaaaaccgccgcagtaggggcggcaaccctcgcacctgtcgccgctgcggttaaatcatacagcagccttgaagacgccatgaaaggcgtagccaaacaggtaaacggcttgcgtgacgacagcggcaaccgcaccccgcagtatgaagaaatgcagcgggcgatcatggatgccagcgaaaagctaccaatggctaacggcgctgttgactatgccgccctggtcgaaggtggcgcgcgcatgggcgtggcaaacagcgatgatccgtgggaaaaacaaaaagccgatctgctggctttcgccagcatggcggcaaaagcttcggtagcctttgaactgcccgccgatcagctttctgaaagtctcggtaagattgccgggctgtataaaatccctacccagaatattgaacagttaggcgacgccataaactacctggacgataacgcgaagtcgaaaggctccgatattatcgacgtgctccagcgcgttggcggacttgccagccaactggattacaagcaagccgccgcgctgggttccacctttctgacgcttggcacccctgccgaagttgccgccagcgccaccaatgcaatggtgcgcgaactctcaatcgctacggttcagggcaaaaactttatgcagggtctggacgccctcggcctcagtgccgaaaaagtccagaagagcatgtcagtggacgcgatgggcacaatcatttcagtgctggaagcgtccaaaaaactggccccggatcagcaggtagccaaccttacccagattttcggcaaagagttcggcgatgatgcgcagaaacttgccaacaacctgcccgaactacgccgccagatagaactgacgcagggcgcagccgctaaaggatccatgaatcgggaatctgatatcaataaagcttccctttctgctcagtggcaactgaccaaaaccggcgcggttaacgcattcagttcagcaggggaaacgctccgcgaaccgctgatggatatcatgcttaccgtcagtaaggtggttggcagcgtccgccgctgggttgaggctaaccctgctctggttggctcaatcatgaaagtcaccgcagccataggcgcgttgctggttgtcgtgggtggcctgatgctgtccatcggcgcagtgctcggcccgatggcacttgttcgcctcagcttcaccacgttggccggtgaaggaggaatagcgcggctgactggtggagtaatgcgcctgggtggtgcgttccagtggcttgctggctcgcctatgcaggcattgttaagcgccggtcgcatggtattcggcccgcttatcacgctactggctggcatttctgcgcccgtctgggggctgattgctctctttgctgcggcagcagtggccgtcattaaattctgggaaccaatacaggcatttttcactggtttctttaacggcatcatgacgggcttacaacctgtatttgatgctttcaacgctgttttcgctccattagccccaatctttgacgcgataggctccgctattagcggcgtttgggattggtttacaaaattgcttgaaccgatcaaattttccagcgatgcgctagaaacttgcactactgttggcgaaacatttgggagggttctgggtactgcaataagcggtttgctttggccgctacaaaaactgatggagggtgtcggctgggtactggagaaacttgatctaattcctgctggacttgatgcagcaaacgccaaagcagaaagccttaaaaaagatccggttgtctgggagtgggatccgcagcaaaagaaaatggttaaaaaggattggcactggtcgccggataaaccaaaccaacctaaaccgccaaaaccaccaataacgccgaagccagttggcatcccagaccttatgggagcgccaaacttaacgccgaagatgagcaagagtctggataaaatcgcagacaacacgggaaaaatggcggcaaaagacggccccggcgaaatcgtcttcaagaataagcagccctatatcccgatccggggcggatattcggaaccgcttaagcaggcgcagcgccagctaccatcccttaccgattgggtgacgcagcaggccggatcgctgatcgcctccgttacgccgtggcaggttgagaagcccgccgcacgggtgcccgtttcggcgtcgccgtctgcggcttccgtcgctgcgctgatgcctgcacctggtggcgatgtatataactttaacttcgactttagcggccagaaactggatgaagaaaccattatcaggcgcgtgcgcgaagaacttgcgttagcgaagcagcaggccgaccggcgcaagcgttcccaactgaccgatcacgtgtaa

SEQ ID NO: 146375 - DNA, 606 bp, Enterobacter cloacae
atgaaaccgatatttgatgataatgggctggcgactgagcctggagacattcgctgtttttattttgacccaacaactagagaatataccggctggtctgacgaatacattaacgttggcgtcagcatgccagggaattccacctatatcgaccccggcgaagaagtggacggaaaaatttcggtgttcgcaaatggtcagtgggaaatggacgaagatcatcgtggcgatgatgtatattcaaccacagatgcctcagtctccacggtagactacatcggcccggtgaaggatggttacaccactatcgctccttcaagcccatatgagaagtgggacggcgaaaaatgggtgattgatagtgacgcacaacgtgcagcagatattgcatctgcagatgcggaaaaacaggctaaaattgaccaagccaacacatacataagcaacaaacagtggccttcaaaattagcccttggtcgcctgagtgatagtgataaaacgttattcaatgggtggttggattatcttgatgcactggatgttgtagacacatctacagcaccagacatcacctggccgacatcaccggaaagccagaccagctaa

SEQ ID NO: 146376 - DNA, 321 bp, Enterobacter cloacae; identical to SEQ ID NO: 21402

SEQ ID NO: 146377 - DNA, 789 bp, Enterobacter cloacae
atggagaataactcgctgggtgatattgcagagcagttagccaccggcgagtcaccggcagataaactcgacaagctgaataatgcagaagaagagcgtttcaggcgggaagaatgtgccggactgagtgcggatgcctgctcagacaaaatgtatgacgctcgaagggaagccctaaaaaatgttgcctcattgggtgctgatttcctccctgtagttggagattttaagagctatgctgaagctgaagattggattgattatacattagcaactgttgggcttatccccggtgcagactttgttacaaagccactgaaagaagctaaacagttgttgaaggctggtgacctcaatggtgctaatgagcttctaaaggaaaccagtgatcaaatatcgtcagtaatccgccctggacatcggcaatcagaaatagatgttgggaatgatctaggagatagctggaaggagcaggtcagctacaaagatggaaaagaagttccttatggcactaaaggtagcacccgacccgattggtgtaatggagatgtttgtagcttagaagtgaagaattacaatatcgctacaaaccagagtgggctaatcaacaacgtagcaaaacaggcaattgagcgacaaaaacatttaccggaaggaatgatgcaggaaattgtcattgatgttcgtggacaagttctttctcttgtgcaagaagatgcaattattcgaggtattgtacagaaatccaatggtataattaaacccactgacattcagtttaaaaggtag

SEQ ID NO: 146378 - DNA, 414 bp, Enterobacter cloacae
atgaaacatgttggatttatcggtgggagttcgatagttgagttaggttcaccatctgaaatggaggatttcttttcatttttctttaacaatttaaaagaaaataaaaaccatgctattttggaaaggctatataaaaaatacgtcagacttgaagagcttgatgaaataaagcaaataactcaagagcttaaggactctttagcacctgatataaaagataaatactcgaaatatatctctggcattgaaatatgcattgaatcggccaagttattttatgaaagttggaatatttaccagccagtaagagttgggataactgatcttccttactatattgatgataagagaaggcctctgagtcaatatgatactcttggccctgaagagcttcccttctggctacgttaa

SEQ ID NO: 146379 - DNA, 486 bp, Enterobacter cloacae
gtgctacttcccgggctaaaagcttactttctcaaccagccctggagtcggctccggtggctttccgccagcgtgaatgccgggaaaggtaaggagaacggcaccaccctcacccacaccgaaaccacggttaacgcgggggatacgctcacgatcgtcagcggccgcgatacgaatctcaccggagcgcaggtcagcggggagagcgtgctggccgatatcgggcgtaacctgaccattaccagcgaacaggacaccgaccgctacgacagcagccagaagaacatcggcgcaggcggcagcttcagcttcggcaccatgaccggctcgggcggcatcagctacagccgcgataaaatggacagcgggtttgacgtcacggtgggcggccacacgcagctggacggcggggtgatggcctccacctccacgggggataaaaaaccgcctcgacaccggcacgctcggctggcgggatacccataa

SEQ ID NO: 146380 - DNA, 306 bp, Enterobacter cloacae
gtgtctagattatccgtggcgattcactgggcgtttctggatacgtttaaagataagtatcagaaagcactagagtattatcagcaggtgaatgctgaactcgatcgttatctactggagctttcggcgttagagtttgctattgatacgtctgcgttatcgcgtttctcgctgcatcttaacgcggtgaatagtgaaattgagcgtggtttgttgctgcgtgcagaggttgagcgccgtaatattgcgctaccgtttgaagcagggaatacccgctctgtgcgtagctggttaagtaagctatga

SEQ ID NO: 146381 - DNA, 273 bp, Enterobacter cloacae
atgacgctaacgcccgcgtttccctgtaaccagtgcggcgcttgttgtcgccacgtcaatcgcgccagtgaaacgcaatttctcgatcgtggtgacggcatttgtcgtcactatcagatggagacaaagctgtgcgcgatttatgaaacacgtccgcttatttgccaggtagaaaaacagtatcagcttaactaccaacaacaatatagctggcaggaattcattactcttaatcgtgaagcttgtttaattctagaaaaacttgagcagtag

SEQ ID NO: 146382 - DNA, 300 bp, Enterobacter cloacae
atgctgaatgtgaaccgcttgcccaacagcacccgcctacagattgccgccgctattgctgaagaggtttacgcgctggatctggatgatgaggcgttaattcatgagctgcgtcgttatggattcagccaggcttatgcggaagcaatgactttcagatttatgactccagcctttgaactaaaagaaccaaacagcaaattcccatcggcaaagaaacgagctacagcaaacacaatccccacggcttgccctggatggttttttgttgataacgttttaatgaagatcacggcgtga

SEQ ID NO: 146383 - DNA, 207 bp, Enterobacter cloacae
atgagtaaagcatccgtaatcgaggcattgagaaaagcgcgtgaagcgcgagagggcaatatcttcggtggtactgggcaggccgaatttaacaaagatttttatgctggccgcgccaccaaaacagatggtgtcagtaagaccgacagtaacgagccgatgaaccaaaaggcatttaatgcccggttctatgcggggaaatcatga

SEQ ID NO: 146384 - DNA, 300 bp, Enterobacter cloacae
atgaatagtgtattttgtcgtggttgtggtgcaaaaatccatgagacagccactgactgtccgtcatgcggcgcgaagcaacaggtttacaccaagagcaaagtgacagttgtgctgctgtgcttcttcttcggattcataggcatacatcgcttctacttgggccgcccattctctggtgtaatgtacattctgttttgctggactggtgtcaatttcctagtggcatttgtcgaattcttaatattgctttgtacctcagagcaaagaattaatcaaaaatacggaattaaggcataa

SEQ ID NO: 146385 - DNA, 369 bp, Enterobacter cloacae
atgtctgccgcattagctgagcagcaaaagatgaaaatttttaatgcctatgaggaaatgctcattaaacacggcggaacaaaatcgaaggttacctccaagaaaaaggatattgcagatcaggtagatcacatgacaagagaattagacaaagtggctctgcaaaaaaataaatcttgcttacttatttcaaatgattggctgaaagagcaagaagaactaatggcccaagaactaaaagagggtaatagccctttaacaaaggatgattatgagacattcaataccgcaggcagagattacatcaaatataagtgtctggctcaaagcgattttttaaacaatagtgggaaaaataaagatgaatag

SEQ ID NO: 146386 - DNA, 1707 bp, Enterobacter cloacae
atgagcacgaacaacgtgattgatttatcagtccacaaagacaacccgccagccgaaaagctgccgccgttttactgggtacatcgggagtacgacagggaacgcggggatgctggcgtttacttctacagagcaccaacggagaaaaaccccaatccggcacccgtctgtatatctgatgttattgaggtcactgcggaaaccagagacaacgataacgagtcgtggggcaaacttctgtcatggtgtgaccgtgacgggatgccaaagaaatgggcgatgcctgcgacttcactttacgcaaatggcggagctgaagccattagcattctggttaacggcggcctgcgtatctgggatgagaaggcttttatccgttacctcaaagggcaatcccaccaaaaccgattaacctgcgttacgcgctgtggctggtttaaacctgctgtatacgtgaccccggtgcggacatttaacccaattgataaagatatggttgtctatcaggttaatgcccgagtaaagccagagccatcctgcggcaccctggcgacatggcgcgatgaagtggcggcgttgtgcgttggtaatagtcgtctggttctggcggtatctactgcgttcctgtcccctatgctcaccatgctgggagttgatggattctgcttccattatgtaggggcatcatcttcaggcaaatcccggtcaatgacggttgccgcttccgttttatccgaccctaaagaatatattcgctcatggagggctaccgataacgggctagaaggtatcgccgcacgccataatgacggccttctgtgccttgatgaaatcgcacaagtagacgcaagcaaagccggggaaatcgcgtacatgcttccgaatgggaaaggcaagcaacgaagcaccaaaaacggaacagccaaagagattcagcaatggtgtttagcgctattatccaatggtgaaattgatctcaaatcccatgctgattcggttcggaaaagtacatatgccgggcaggaaatgcgagtgattaacatacctgctgataactgcgaatttgcctgttttgagcatcttcacggggaagctaacggagctttgtttgccgaccttctggacaaggcagtaagagaaaatcacggtacagcgtttaacgcatggcttgatcacctgactatcaattacgacaccattaaggagggctggcgcgattttaaatcggcctttcttaattctgtagctgaagacccttccggtcagatcgggcgtgttgctgagaagttcgccatagcggcctatgctggcgaactgtcttctgagataacgggttggagtccgggaactgcgacagaagcggcgaaagtctgctttaccgcatggattgagcgtagaggaggtacggaaagccatgaagataatgagatcgtcgagcgtatcaggcaaaccattgtccgggatggtgctcgctttcaggacgctaataaaccagatgagataccgacggcgcgagttggatttattaaagatgacgagtacattatcccggttgaaggctggaaagtgatttttgccggacttgatgctaaacgagctgccagcgttttacaggcgaagggtatcaccaaaccagatcgtcgatatctgcccggtttgggtcgcgtcagatgttacataatccatcgtgacagcctggcagactga

SEQ ID NO: 146387 - DNA, 870 bp, Enterobacter cloacae
atgaatacatgtcaaccgcaatccctgtctgacaccatgcgcgaagctggtgtaattccttgcgagctgccggaactaatacccggtaacgtagtccgctttcgtatcgagggcgataaatccggctcacttaatggctgggcttacccattccctgatggcgcgggctgtgcttttggtagctggaaaactggcataaccgcgtgtcactttgccgatggtgtacaggtcaacagcattgaacgtaagcgcgtgatgatggaagcacgccgggcaattggagcgatacagcgtaaagctgaggttgccgccgctgccgaatgtagagccaagattagtagcgcagttcccgccagtgataatcacccttacctattgcgcaaaggtgttggggcgcatggcatttatcaatctggtgactggttactgattccaatccatgatcagtacggaagtgtacagtccattcagtacattatgccggacggcacaaagcgctttaaatctggcgcactattgaaaggtggacgctattggctgggcgggttagtcgtcaatgacaaaaccattttcatcgctgaaggctatgccaccgccgccaccgttcgagaagtaacgggctgcccggtctgtgtcgcctttactgccggaaacctgcgagaggtatctgagagtgtgcgcagtgaatttccacgcgcccgcatcatcattgctgctgacaatgacgccaatactgacggcaaccccggcttaactaaagcgctggacgccgcacggcgctaccgtgcggaaatactcactccatcatctaacggcgactggaacgaccataaagacgaactggcggaacaatggaaggtgatggcatga

SEQ ID NO: 146388 - DNA, 468 bp, Enterobacter cloacae
atggctggaggccaaaaaatgaagaactgggagaaaatcctgattactgcgccgttgcacactatccctaagccaggcacaaaggcatatcgaatctggcgcgcgctggttgatggccctgtttgtgaagacgaattacttcaaatagcaggtaaacactatcgctcaccattgcagcaactaatgaacgagaagcatggctggtggttcattcatgaggatacggatgaaagaggcgttatcgtaagcaggtatctagatggccgccacctttcatgcgattgggagttggatgctcaagccagagccgaaaggcgcgaacagttagccaaaaaatcagccgacaaagctgaagcagaggcagcgcggacagcaaaggcaatcagagaattggttaaggctgaagacttgctggaggaaattaatgaccggataaagcaaaacggcaccccaaaggatgccgattag

SEQ ID NO: 146389 - DNA, 177 bp, Enterobacter cloacae
atgttaaaaccaagctatatccgcccaaagaatcttgctgaggaactaggcatttcaatgccctcattgtggcgttgggttaaagcaggaaagatgccgaaaccggtcaaactgtcccccagagtggcggcgttctcaactgcggaaatcaactcatggctggaggccaaaaaatga

SEQ ID NO: 146390 - DNA, 600 bp, Enterobacter cloacae
atgagcaatttacaaaaccaaatggggttatctgatgaagcgctggctagttacttaaggcaagcgaaggagaatgagttagagatagtgaggctaaatgctcacattgagactctaaataacgcgctatcaggaaatacagaatctgccctcgcagaactatccagagaaaatgctcaattgcggcattcattgagactcgcggagatgaacgccaattttgttagaagtcattacggccaggtgattgaaacacaccgccaagatattcaagcggcaggaggaatcatcaatgctattcatgacggcaaagaaaaggttcgaaaagtacgatcaaatggtggcaaaaatggtagccgcccagggatatttgagtcttatatcatcaaatatcttcacgagattgaagagggtacgcatgcgctgcccaaaaaaaagccagaagatgattttattaactggcttaaagaaaaatataaagatgccgtgacagaaaagccggatggcctagttgagttggccgttgaaggtgatcgcgtgagaagtgctaagaagggctcaatatctaagtcgataagggaaacgaaaaaaaaaatctga

SEQ ID NO: 146391 - DNA, 1257 bp, Enterobacter cloacae
atgggcaagctaactgacattcaaatcaaggcatgggtaaaagccggaacacgcttcgagggcaaagcagacggtaacggcttgtacctacgttatagaacccacgacacaatcccttcatggcgctttcgatatcggttagcaggcaaaccccgtgtaatgaccattggcacatatggcgctatctcattagctaaagcccgtgaaatcacccgagagctagccgctcgcgtttcccttggatatgacgttgccggagagaagcaggaacgtaaggcagaggtaaaagccaaaatagaagctgaccggaacgataaaaccgtgactgaagtcgctgaagactattttaagaagaaagtgctgggtacatggaaacaccctgacattctgcgccgccgtcttgagaaagacataaatccgcgcatgggcaaaaagaaggttaacgagataaagcccagggatattgacgctttactccaagcaattctgaaacgtggtgcgccatccgttgctaatgacgtcctgcgatgggtacgccgcatctttgaccatgcgatcaagctgggaatgattgaggttaaccccgcagccgcctttgatataagtgacgcgggcggtaaggaaacatctcgagaacgatggttaaccaggccggaactggttcaactctttgaagccatgcgaatggcgaaaggctttagccgcgagaacgaattgacgataaagctgttactggttacttgcgtcaggaaaatggaactgtgcgccgctcgctggagtgagttcgatttatctaatggcatgtggtatttgccgggagagcgtaccaaaactggtgacggcattgatattccactgccaaagcaggctatcgaatggcttgaggagcttcaccttctttcctgtaatagcaaatgggtactgccagcacgtaagcaacagcaccgcatgatcccccatattcaggaaagcaccctacccgttgcgctggcgaaggtgaagcatgagatgcctggtgtaccgaacttcacaatccacgaccttaggcgcaccgcccgaacccatctcgaagcgttaggtgtgaatcccattgttgctgagcgttgccttaatcaccgcatcaaaggcgtcgagggcatctacaaccgtcaccagtatctagaagagcgccgggaggcgttagttctattggccgacctgatggaagccttagagcgtggcgaggaatacaacgttcaaccattgaggaaagcatga

SEQ ID NO: 146392 - DNA, 261 bp, Enterobacter cloacae
atgcagatcactgtcacatcccaaaacgtagacacgcataagaaaaacatcagacgtgatgacctgaaagggttaacttgtttcatgcaaatggcacatagtgtgcgtgtgaccgcatcgcaagatcaccaagccatcgttcagagtgttttggggaaacctgatagcgatcaccatcatcaattatcatcttattggacatggaatgatgtggacgccgtaaagctggttgatgtgctgtacgcagtcgctaacgcataa

SEQ ID NO: 146393 - DNA, 633 bp, Enterobacter cloacae
atgttgagaactataattacagtcgcattgttaatgctttcatttggttcttacgcgaacatctatgtaacttcctctgagggagatgcaattttgggtgaggatgtttgctctataaataaaaatcaaaaagaagctacaataccaagttggaagttgttccccagggtggctattctgggatgttgggaagatgatagtaagggaaatgctatagtacattggtatcaacaggttggcgcagatggggggctgttagatgttgatcgcatcgagaaaattcctttgccattgcaaaataaaaaaagacctcttgatctaatcagcttgaaagaagattctaatgatgttttacggtggaatcatgtaagtccattatttctgccaagagataactgtatagcttatcagaaaagtatcattgaccctttcaaggatgctgggcttaaatttgaatggaatgcgtttgcaacattgaaaggttcatacaataatctctttgtagtcgcttatgaaaaagataaggttgtaggtgtgttggcatttactgaaaaatacagtgattgtctacttctccaaaatgaattaaataacatgagtaaaataaccataactcatccagacttaaaataa

SEQ ID NO: 146394 - DNA, 216 bp, Enterobacter cloacae
atggtgatcaacatgaagcgcttactttacgtgctggtactgctgccgctggcgtctcatgcaggacaaattacgatgaccaacccacaggaggaacagacggagaacgggaaaacgctatgcacgtatcagaacagcaattacctgttcactttcgtaactaaggggaaatgtccgtatgcgaaaaccttcaatacagaggattcggaagagtga

SEQ ID NO: 146395 - DNA, 333 bp, Enterobacter cloacae
atgctgtgcctgacggcaagcatggcggtatgcgtttcgacgacctgttattccctcaggaaaggaaaccggcaggcggtgaaaaacatactcggcgcggtggcaacctgtacgaacggtaagaaagacgttaacgccctggtctttgacagaagtgatgtgcgcacggacggcataattgcccgaaccgttgacataccagctgctgttgcgatgcagataaatgaaagatttcaatctccggacagctgcgtcagcagactgctgaagctgagtaaggagatgttcagggaaaaccgcaaaagagatgacagacatggtgtttctccataa

SEQ ID NO: 146396 - DNA, 540 bp, Enterobacter cloacae
atgaaatatacgacgtgttttcgtccagctgtggcgatgcttattcttgccggtctgtccggcaccacattttcggcgcagctggaatggcttcagccgaaacagcttattgttgataagagcttgccccaggcgcaattaagggcgaatgaagccgttgccagagaatatgcaacgttctggaacacgggagaagaatccctggcgcgtgatgcgctggcggtgaatttcatcgataaaacgcccccggaaggtcgtaagcaagggcctgaaggcgctattttagcctcccgggcgtttcgtgccgccgtgccggacttacgctgtgacgttgagcagatgattatttcaggcactcgcgtggtgtcgcatttgcatttttacggcacattcaccgggacatttggcaagctgaaaggaaaagggcagaaaatagatttcatcgctacggatatttatgaagtccgcgacggtaaaattgcggcaaactggcatattgaggacaacctgacgctgatgaaacagctgggcgcgctgtaa

SEQ ID NO: 146397 - DNA, 2643 bp, Enterobacter cloacae
atgaatacgacgcacggatgcaatttttgtcggcgtatgggtatgccgttactaccgatacgcccagcagtcatggcaaagggagatgacttaccttctctccccagtgatttttcacattccatacaaccagaaggcgaaacagactataccgcgcgactattacgaaagggatttttatatatatggtccgagcaaagccgttactggttgaactactttgtgactgatgatggctatttttatccccttccgaaaaacggcaatgttccgcctcgattgatcgaggggggattgaagccatgtatcacacaaccgcaagaattagcggcggcttcactgatcacactccccatgaagccatcgggtataaaaaacggtaattactggttcatttggtctgaagagcaatggactgataaaacccgtcagttacatgaaaagccagaatggcaacaaatgtatatgcaaaaatttgatatggatgcatggttgatgacacatcaaggtcaacaggccaggtcgatcaatctcctcacagagaccgtagcggaatacagcccttcggtccgtatttgtcaaatgaaagactggacgcctacgccacttaaaccggtaacggcgaattcagccagtgaattaattaaagctgccacttatcttgatgctcagcatggtgcgcttcttttactttctgacccagttgctgctgccatggaaatctcatcactctcgagatatcgttttgaccaggcgataaccgacaaccctgaatttaaacgtggtatagcattaagtgcgatgttgaacggactggaactctccgttcggggatgcctgttccagacggtgaaggacggtgatatcagaaatgaacaaaaaacacgtttcggttgggatagccccgctgggccacattttcccgatcctgaatcagcagaaaaacttcacaggctggatgaagaaacacgcaatgagcgagttaacgaagtttggcagcactacgaaaagtatatcgacagaaatcagcaaaacgaatttaccagcaagttaattaaacatattacaagctataacgaacgcatcatcgttccgatgaccagaatgtttcttaattggttacaaagtacggcaatgaagtcctacttcattcaacattttgatacaacttcgcctcacagtggtgctcgttacattcaaaccgtatttaattgcttggcaggtatggaggataaggccggggttataaagtttattgagcaacagttgtatatgcctgaaaaggaagagcaaaactatcttttaagggcggtgttttttaacaataatgcatggatctcgcagttcgaagccgaaatgaatatgcatggcggtcgggactgggataaaggtatcagctgggacaggttggctgatggtgtaaaggaaatcagtcaacaatattcatcagcaataaacctcgcgcttgaaaggctgcattacctgtacctgcctgcaatcatgaaagcgacaggtgaaatggccaaaggcgtacaggtcaattttgcgatttctattcttgctatacagggaaaagcgtttttgcgagtacccgtagatacaggaacaaagcattacctcaacgccctcactcggggtatggctggtcttcttgaaatgagtggtaagacaggcgggcggctctatcagacactgcagaaagaagctgaatatatgtcccgcggcatgtctgaaacagcaaggataaaaacctatttacccacactgatagatattgatgaggtgaagaaactacgagccctttctgaacatgaccgtctggcaaaacttggatccgtactgaaaacagaggatgagatcgtcaacgccgtgtttccgtcctccactcaccttcagcttgcaaaagcacaggggatatcaggcaataccatactctcagaactcggtcataatgccttcccctttgctggaagcaccttttcagctctgtttcagggatgggtcgtgctaaatggttttcaaaaagagggatggcccggaacacccgacggatgggcgcgcttctcgtcaaatggcgctatggcatgggcagccgcaatggataccctgaagcgcgcttccgctggaattatccgattagagctttctccgacggtgacgtttggtgctcgatttgtgctaaaaatcgccagttggccatggtgggagcggcttggatttctggggggggccgtatttacatttgtagaggcttatgagggtgttacagatattatagccgacaaaaaggatgtaggtttagcccatctggctaatggactgggtgttggcctaatgactctggctaccggcaaatccatcattgagcctctcctaatctcgatgggcctttcaagtgccagcgtggcggaaggtagcctttttgccctgatcttcggcccctgggggatccttgtcggcgtgttattgattttggcggcaaacgcctggttagtcagccagacgcgtaatgagatccaggaatggctggcaagcaccttatggcgacgcattcctgatggcgaatcagcgattccagtacagttcagaaacagtctgatggaaaaagaggcgttcaacgcgctgagcaaaggaaatgcataa

SEQ ID NO: 146398 - DNA, 1107 bp, Enterobacter cloacae
atgtttaaacgactccccctcgacccgtcccggatgtacatgggcacgttcacccgcatcacggacaagaccgtgttacagcgctatttccgtggaaaaggcaaccccggcgtcactgctgtatccgccatggacagcgttattcgtatcaactccacctgcctggaactggttgaccggctctatttttctcgtggttccgggacgctgcttgccgcctttgggttttgcatgatgtttatcgcttcttttctctggccaatatttcagtttctgtttcttggtcatcacattaaagcgtcatcctggttggctctgatttttgcctgggctatttttatcctccctctttcctgggtgacctataaattcctggttctggaggtctttaactatacccactaccccatccgctttaaccgcaaaaataaaaccgtctatctctttcgcaacggtaaacccgtgctcgccgtaccgtggaacgacctggagtttgtccgcatatccaacggcggcaaacccgagtcatggtccattgtcggctgcacgctcgcggatgacggcgaaaccgtcacacactacattcccctccccgtcagcaacaactgggggccggaataccttgaggtttactgggaatacatccgctgctacatggaagaggacgactgcgtggcagacctcgctgatatcgtcacttactgtctccccgtcgagaaacagaaagaaagctggttttttgggctgctctatatcagcaaaatgaccagcaggctggggtggctggttaacctcccgctcttcccttttgtgttttttgtcagcatcacgcgctggctggtgatgctcacctgccgcgttcccgtctggccgcctgaagtggaggaggcctgccgcccggatgaaaacgacccggtcaacaaaggcgcagagcaaaacccgccgcaggtatggcgcccgatgctggcggtacaggggaaaaagcgttatgaggaaaactacgcccgcgagcggggcgcgatggaccggatcattgcccggctgaaagcgaaatatccaccgtctgttcagccaaaaaagcgccgggagaagagaaagcatgtttaa

SEQ ID NO: 146399 - DNA, 1068 bp, Enterobacter cloacae
atgtttaaacgactccccctcgatccgtcccggatgtacatgggcacgttcacccgcatcacggataagaccgtgttacagcgctatttccgtggaaaaggcaaccccggcgtcactgcggtgtccgccatggacagcgtgatccgcatcaactccacctgtctggagctggtcgaccggctctatttttcccgtggttccggtacattaattgccagttttttctttagcttattttttggcgtgtgttttctttggttggtttttaaggcattttttttggggcaaggggagaataccccctggggtgtattaagtattatatggattatatttgtattacctctatcctggctgtcatataaattcctggttctggaggtctttaactatacccactaccccatccgctttaaccgcaaaaataaaaccgtctacctctttcgcaacggcaaacccgtactcgtcgtcccgtggcacgacctggagttcgtccgcatatccaacggcggcaaacccgagtcgtggtccattgtcggctgcacgctcgcagatgacggtgaaaccgtcacacactacattcccctccccgtcagcaacaactggggcccggaataccttgaggtttactgggaatacatccgctgctacatggaagaggacgactgcgtggcagacctcgctgatatcgtcacttattgtctccctgtcgaaaaacagaaggaaggctggttttttgggctgacttatatctgcaaagagccttccaggtttgggctactggtgaatctgccgttatatccctttctgcttcttgtcagcatcatgcgctggctggtgatgctcacctgccgcgttcccgtctggccgcctgaagtggaggaggcctgccgcccggatgaaaacgacccggtgaacaaaggggcagagcacaacccgccgcaggtctggcgcccgatgctggcggtacaggggaaaaagcgttatgaggaaaactacgcccgcgagcggggcgcgatggacaggatcattgcccgtttgaaagcgaaatattcttcatttgtatga

SEQ ID NO: 146400 - DNA, 669 bp, Enterobacter cloacae
atgaggaaattgaatcgattttttcctggtcctgattgtttatcaaagtatgattataggacacagggatggactttacaaagtccaacaaaacgtgagcgtataagaatttgggctgccatacggcaaatgcaaaatggattttgctgttattgcgaatctgttgctgataaaggctgcggacatattgaacacttttttcataagggtactcaacctgatggaagtagtccatataaaaacttgacttttatttgggataatttgtttggttgttgtggttcttcatctggagatacatgtggtcattttaaagatcgccgtggcaattatggtcctggagagtatgatcctttagatattataaaacctgatgttgatgatcctgcaaaatatttttattttttatcgactggtttgataaaaatcaaagacggattggatgaaattgacactaatagagctaaagaaacactacgagttttaaacttagctcatggatctttaaatggtgctcgaaaaaaacaaattgatatatttaaaagtgaattattagctttaaccaaattaaaaattcctgatgatgaattaaatttggtagttgataatatcaagcaaaaaataaaatcgtcagaatttcaaacagctgttttaaactcacttttctag

SEQ ID NO: 146401 - DNA, 570 bp, Enterobacter cloacae
atgcccagtaaagcacccagaccactggcaaccaggcgatcacggcaagcagaaattttcagacatccctgtgcagccagtttaccgccctgtataacgacacccagcgagttattctcaacctccaccttcgccgtttccgacgccgtcgccgccatggagacactaccatccgtcactgctgcgcccgccagaccacctgcgatactcacgaggctactgaccagccgtttctcctctgccgtcaggtcactggattttttatctccatacagcgcgctgaccagatggtcagtcatcgccgaggccgtaatggcccctatggcaccagccttcaggccatccgcactgctcccgccactcagctgcgtcagcgccgcagccacaataccgtgcagcgcggcacgggctgtcggatctttctgctccttgaccagggtcgccagaagaggggccgcccccgctgccgcgcctgccttcaggttaccgccaagcgcgcctgccagtaagcccgccgctgcactgcccttcgtccagaaatcacttcccggaccgtactctgtattctga

SEQ ID NO: 146402 - DNA, 456 bp, Enterobacter cloacae
atgtttggcattttccctgaggataaaccagtgaataatgaaggtgaatgtttcttgccatcatcggtaattattggtggtttttcagaggtaataaatattccactatcttactggaatatagataattacaaagttagctggctaaactctcttaaagagggattgacaaataaaaagcatgctgctttggttgtttcaatgtatgagcctgatgatgcgaactttatatttacttgggttttatatttctcgggtaatgatgtttttgttcaaaataaaattttatttttggatgagtgtccgggattcaatcctgaaatgataaataaacttactgattcgcgcaaaacacataatgaagatggagttaaaatttcagagtggaacactgatttagatagtgttattaatttttataaaactctaaaaaaatggcatgaatcaaatcgttga

SEQ ID NO: 146403 - DNA, 261 bp, Enterobacter cloacae
atggcatcattgatgcaatttggcgtgattttcacggcaggcatcacgctgttcccctttgtcatgccgtcaagcgtgagtccaatctccagcctgacgttgtgggacagcacttccagtcagctgacgctgagtattatgttggtaatcgtgctgatatttttgcccattgtgttgctctacactctctggagctactacaaaatgtgggggcgcatgacgacagaaactctccgccgtaacgaaaacgagctgtactaa

SEQ ID NO: 146404 - DNA, 1299 bp, Enterobacter cloacae
atgaaagcgatcttgatcccatttttatctcttctgattccgttaaccccgcaatctgcattcgctcagagtgagccggagctgaagctggaaagtgtggtgattgtcagtcgtcatggtgtgcgtgccccaaccaaggccacgcaactgatgcaggatgtcaccccagacgcatggccaacctggccggtaaaactgggttggctgacaccgcgcggtggtgagctaatcgcttatctcggacattaccaacgccagcgtctggtagccgacggattgctgacgaaaaagggctgcccgcagcctggtcaggtcgcgattattgctgatgtcgacgagcgtacccgtaaaacaggcgaagccttcgccgccgggctggcacctgactgtgcaataaccgtacatacccaggcagatacgtccagtcccgatccgttatttgatcctctaaaaactggcgtttgccaactggataacgcgaacgtgactgacgcgatcctcagcagggcaggagggtcaattgctgactttaccgggcatcggcaaacggcgtttcgcgaactggaacgggtgcttaattttccgcaatcaaacttgtgccttaaccgtgagaaacaggacgaaagctgttcattaacgcaggcattaccatcggaactcaaggtgagcgccgacaatgtctcattaaccggttcggtaagcctcgcatcaatgctgacggagatatttctcctgcaacaggcacagggaatgccggagccggggtggggaaggatcactgattcacaccagtggaacacgttgctaagtttgcataacgcgcaattttatttactacaacgcacgccggaggttgcccgcagccgcgccaccccgttgttggatttgatcatgacagcgttgacgccccatccaccgcaaaaacaggcgtatggtgtgatattacccacttcagtgctgtttatcgccggacacgatactaatctggcaaatctcggcggcgcactggagctcaactggacgcttccaggtcagccggataacacgccgccaggtggtgaactggtgtttgaacgctggcgtcggctaagcgataacagccagtggattcaggtttcgctggtcttccagactttacagcagatgcgtgataaaacgccgctgtcattaaatacgccgcccggagaggtgaaactgaccctggcaggatgtgaagagcgaaatgcgcagggcatgtgttcgttggccggttttacgcaaatcgtgaatgaagcacgcataccggcgtgcagtttgtaa

SEQ ID NO: 146405 - DNA, 2181 bp, Enterobacter cloacae
atgacaactaaaaatatgaatacgccaccaggcagcactcaggaaaatgagatcgatctgcttcgtctggtcggcgagttatgggatcaccgtaagtttattatcagcgtgaccgcgttattcacactgatcgctgtcgcttactcgctgttaagcacgccaatttatcaggcagatactctggtccaggttgagcagaaacagggcaacgccattctcagcggcctgagcgatatgatccctaactcatcgcccgagtctgcaccggagatccaactgctgcaatcgcgcatgattctcggtaaaaccattgctgaactgaatctgcgcgacatggttgagcagaagtattttccgattgtgggtcgcggctgggcgagattaaccaaagaaaaaccaggtgagctggcgatcagctggatgcatattccacaactgaatggtcaggatcagcaactgacactcacggttggggaaaacggccactatacgctggaaggtgaagagttcaccgtcaatggtatggtcggccagcgtctggaaaaagatggcgttgcgctgactatcgcggacattaaggccaaaccaggaacacagtttgtcctgagccagcgtaccgaactggaagcgattaacgcgttgcaggaaacctttaccgttagcgaacgcagtaaagaaagcgggatgctggaacttaccatgactggtgatgatccccagttgattactcgtattctgaacagcatcgctaacaactatttgcaacagaatatcgctcgccaggcggcgcaggattcacaaagccttgaattcttacagcgccagttgccagaagtgcgcagcgagctggaccaggcggaagaaaaactcaacgtttatcgccagcagcgcgattcggttgaccttaacctggaagccaaagccgttcttgagcagattgtgaacgttgataatcaactcaatgagctgaccttccgcgaggcagagatctcccagctgtataagaaagatcacccaacttatcgtgcgctgctggaaaaacgccagacgctagagcaagaacgcaaacgcctgaataagcgggtatcggctatgccttccacccaacaggaagtgttgcgtttaagtcgtgacgtagaagcgggccgtgcggtatatctgcaattacttaaccgccagcaggagttgagtatttcgagatccagtgccattggtaacgtgcggattatcgacccggcagtcactcagccgcagccagtgaaaccgaaaaaagcgttgaatgtggtgcttggttttattcttggcctgtttatttcggtgggtgccgtgctggcgcgtgcgatgttgcgtcgtggtgtagaagccccggaacaactggaagagcacggcatcagcgtttatgccaccatcccgatgtccgagtggctggataaacgtacccgtctgcgtaagaaaaatttattttctaatcagcagcgccatcgtactaaaaatatccccttcctggcggtggataacccggcggattctgctgtggaagccgtacgtgcgctacgaaccagtctgcatttcgctatgatggagactgagaataacattctgatgatcaccggtgcgacgccagacagtggtaaaacatttgtcagttcaactctggcagcggtgatcgcccagtccgatcaaaaagtgttatttattgatgccgacttacgccatggttattcgcataacctgtttaccgtgagtaatgcacatggcttgtcggaatatctggcaggtaaagatgagctcaacaaagtgatccagcattttggcaaaggaggctttgatgtgattactcgcggtcaggtgccacctaacccgtctgaactgctgatgcgcgatcggatgcgtcaattactggaatgggcgaacgaccattacgatctggtgattgtcgatacgccgccgatgctggcggtgagcgatgctgcggtcgtggggcgctctgtcggcaccagcctgctggttgcgcgttttggcctgaacaccgccaaagaggtgagcttgtcaatgcagcgtctggaacaggcaggcgtcaatattaaaggcgctatcctcaatggtgtgattaaacgcgccagcaccgcttacagttacggctataactattacggttatagttactccgagaaagagtaa

SEQ ID NO: 146406 - DNA, 447 bp, Enterobacter cloacae
atggcccaactaaaatttaactcaatcctggtggtttgtaccggcaacatttgccgttcgcccattggcgagcgcttgctgcgtaaacgtctgccaggcgtaaaagtcaaatcggcaggtgttcatggtctggtaaaacaccctgcagatgcgacagcagcagatgttgccgctaatcatggcgtatctcttgaaggacatgccggacgtaagctcactgctgagatggcacgaaattacgatctgattctggcaatggagtcggaacatattgctcaggttaccgcaatcgctcccgaggtccgcgggaagacaatgctgtttgggcaatggctggaacagaaagagatcccggatccctatcgtaaaagtcaggacgcatttgaacatgtctacggtatgttggagcgcgccagtcaggaatgggcgaagcgcctcagccggtaa

SEQ ID NO: 146407 - DNA, 1140 bp, Enterobacter cloacae
atgaaaaagaacatttttaagttttcggtactgacattggctgttctgtctttgacagcatgtacccttgttcctggtcagaatttatcgaccaggaacaaggatgtcattgaactacctgacaatcagtatgacctggacaaaatggtcaatatctatcccgtcacgccaggattgattgatcagttgcgcgccaaaccgattatgtcgcaggctaacccggagctggagcagcaaatcgcgaactatgaatatcgtatcggcattggtgatgtgttgatggttacggtctgggatcacccggaactaaccacccccgcagggcaataccgtagcgccagtgataccggcaactgggttaacgccgatggtgcgattttctacccctatattggtcgcctgaaagtggccgggaaaacacttacccaggtacgcaacgagattacagcgcgtctcgattcagtcattgaaagcccgcaagtcgatgtcagcgtcgcggcgttccgctcgcaaaaagcgtacgtcaccggcgaagtcagcaaatcgggtcagcagccgattaccaatattcctctgaccatcatggatgcgattaacgccgcgggcggtctgaccgcagatgcagactggcgcaatgtggtgctcacccagaatggcgcaaagaccaaagtgaacctctatgcgctgatgcagcgtggcgacttgcgccagaacaaactgctgcacccgggcgatattttatttattccgcgcaacgatgatctgaaagtcttcgtgatgggtgaagtgggtaaacagagcacgctgaaaatggaccgcagcggtatgaccctggcggaagcgctgggtaacgctgagggtatgaatcaggatgtcgctgatgcgacggggatttttgttattcgtgcaacgcaaaacaagcagaatggcaaaatcgccaatatttatcagctgaatgcgaaggacgcatcggcaatgatactcggaacggaattccagcttgaaccttacgacattgtttatgtcactaccgcgccgctggctcgttggaaccgtgtgatttccctgctggtaccgacgatttccggggtgcatgacctgacagagacttcacggtggattcaaacatggcccaactaa

SEQ ID NO: 146408 - DNA, 2097 bp, Enterobacter cloacae
atgaagaagaattcttatcttttaagctgcctggccattgccgtctccagtgcctgtcatgctgaagtattaacctacccggatccgctgggttcgtcgcaatcggactttggcggcacaggattgttgcagatgccaaatgcgcgcatcgcaccggagggtgaattcagcgtcaactaccgggataacgatcaataccgtttctactccacctccgtggcgctgttcccatggctggaaggcaccattcgttatacggatgtgcgcacacgtaaatatagccagtgggaagatttcagcggcgatcagtcatacaaagacaaatcattcgattttaaacttcgcctgtgggaagaaggttactggctaccgcaagtggcgtttggtaaacgtgatattgctggtacgggtctgtttgacggtgagtatctggtggccagcaagcaagcggggccatttgatttcaccctcgggatggcatggggctacgccggtaatgcgggcaatattaccaacccgttttgccgggtgagcgataaatattgtcatcgcgcagagtctcacgatgcgggcgatatcagctttagcgatatctttcgtggcccggcctccatctttggcggcattgagtatcaaacgccgtggaatcccctgcgtctgaaactcgaatacgacggcaacaattaccagaatgatttcgctggcaaactgcctcaggcaagccatttcaacgtcggtgcagtttatcgcgctgccaactgggcagacctcaacctgagttatgaacgcggtaacacgttgatgtttggtttcactttacggaccaatttcaacgatctgcgccctgccctgcgcgatacgccaaaaccggcatatcaacctgcgcctgaatctgaaggattgcagtacaccacggtagcaaaccaacttaccgccctgaagtataacgcgggctttgacgcgccagaaattcagctacgcgataagacgctgtatatgtctggtcagcaatacaaataccgtgattctcgtgaagcggtcgatcgtgccagccggattctggtgaataacctgccgcaaggcgttgagaagattagcgtgacgcaaaagcgcgagcatatggcgatggtgactaccgaaaccgacgtagccagcctgcgcaaacagctggcaggtacagcgtctggtcaatcagagccactgcaacaacaacgtgttgaagctgaagatctttctgcctttggtcggggctaccgtattcgtgaagatcgctttagctactctttcaacccaacactttcacagtcgctgggcggcccggaagatttctatatgttccagctggggctgatgtccagcgcccgctactggtttactgaccacctgctgcttgatggcggtattttcaccaatatttacaataactacgacaagtttaagtcttcgctattacccgcggactctaccctgccccgcgtgcgcacgcatatccgtgattacgttcgcaatgacgtttatctcaacaacttgcaggcgaactactttgccgacttaggcaatggtttctatggccaggtgtatggcggttatctggaaacgatgtacgccggtgtcggttccgagctgctttatcgcccgctagatgccagctgggcgctgggtgtggacgttaactacgtgaagcaacgtgactgggacaacatgatgcgcttcaccgattattccacacccacaggtttcgtgacggcttactggaacccgccgacgctcaatggcgtactgatgaaacttagcgttgggcaatatctggcaaaagataaaggcgcaacgatcgacgtcgccaaacgctttgacagcggcgtggcggtaggggtatgggcggcaatcagtaacgtatctaaagatgactatggcgaaggcggctttagtaaaggtttttatatctcgattccgttcgacttgatgaccattggacctaaccgcaaccgcgcggtggtttcgtggacaccattgacgcgtgatggtggacaaatgctgtcacgcaaataccagctctatccaatgacggcagagcgagaagtaccggttggacaataa

SEQ ID NO: 146409 - DNA, 747 bp, Enterobacter cloacae
atgaataaattacagtcgtatttcattgccagcgtactttacgtaatgacaccccatgcctttgcgcaaggaacggtgactatttatctgcctggcgaacaacagacactttccgttggccccgtggaaaatgttgcccagttggtgacacaaccgcaactgcgcgatcgcctctggtggcctggtgccttgctgaccgactctgcggcgaaagctaaagcgcttaaagactaccaacatgtcatggcacagcttgcttcctgggaagcagaagctgacgacgatgtggcggtaacgattaaatccgtgcgccagcagttactcaatctcaatatcactggtcgcttaccggtcaaactggaccctgattttgtacgagtggatgagaacagcaatcccccgctggtcggggactatacgctctataccgtacagcgtccggtgactattactctgctgggtgcggtttctggggctgggcaattgccctggcaggcaggccgtagcgttaccgattatctgcaagatcacccccgtcttgcaggcgcggacaagaataacgttatcgtgattacgcctgagggtgagactgtcgtcgcccctgttgccctgtggaataaaagacatgtggaaccaccgcctggcagccagctttggttaggcttttctgcgcatgtactgcccgaaaaatatgctgatttaaatgaccagattgtgtctgttttaacgcaacgtgttcctgactga

SEQ ID NO: 146410 - DNA, 645 bp, Enterobacter cloacae
gtgcgccctcttattttatcgattttcgcactatttcttgcgggatgtacgcacagccagcaaagtatggtcgatacatttcgcgccagccttttcgataatcaggatatcaccgtagcggatcagcagatccaggcgttgccttattccacgatgtatttacgccttaatgaagggcaacgaatctttgtggtactgggacatatagaacaagaacaaagcaaatggttatcccaggataacgccatgctggttactcataatggacgtcttttaaagaccgtcaaacttaataataatctgctggaagtgacaaattccgggcaggaccctctgcgtaacgcgctggcaataaaagacggcagccgctggacgcgcgatattctctggagtgaagacaaccattttcgctctgcgaccctgagttccactttttcctttgctggattagagacgctgcatattgcgggtcgcgatgtgctgtgtaatgtctggcaggaagaggtgacttccacgctgccagaaaaacagtggcaaaacacattctgggtcgattcggctactggccaggttcgtcaaagtcggcaaatgttaggcgcaggggttattcccgtagaaatgacgtttcttaaacccgcaccatga

SEQ ID NO: 146411 - DNA, 1215 bp, Enterobacter cloacae
atgaagctcaatgccagacaggtcgagactgccaagcccaaagagaaaccctacaagatggctgatggtggtggcctctacttattggttaaaactaacgggtcacgctactggcgtttaaagtatcgtatcgatggaaaggaaaagttattggcgctgggggtatatcccgatgtgtctttggctgatgccagagcaaaacgtgatgaagctcgaaaaggtatcgctgggggtatcgatcctttagagcttaagaaagaacataaagctgaacgtgaagcgcaggtcaaaaacacctttcagcaaattgcgctcgaatggcacagcatgaaagtgaaaaaatggtcagttgggtatgcctctgacattctcgaagctttcaataaagatatttttccttttcttggtcaacggcctgttgcggacattaagccattagagcttcttaatgtgcttaaaaaaatcgaagccagaggtgcaacagagaaagcaaagaaagtgcgccaacgatgtggtgaagtgtttcgctatgccatcgtgacaggcagagccgagtataatcccgctcctgatctcaccagtgccatgcaggggcatgaatctacacattatccgttcctgaccaccgaagagcttcctgccttctttaaagcccttgctggctactctggtagtgaattgatggtgttggcagcgagattgttgatccttactggcctaagaacgggtgaattgcgtggtgccttatggtcggaaatcgattccgagaaagcgctatgggaaatttctgctgaacgcatgaaaatgcgccgtcctcatatcatcccgctatctacccaagcgttagccattatcgaaaagatcagagcaatgacgggacaattccctttgctgtttccgggccgcaatgatccaagtaagaccatgagcgaagccagtatcaatcaggtatttaagcgaatcggctatacaggacgggttacgggtcacggcttccgtcataccatgagcaccgttcttcatgaacagggctacaacaccgcatggattgaaacccaactagcccatgttgataagaatgctatccgtggcacctacaaccatgcgcaatatctcgatggcagacgcgagatgctgcaatggtatgccgactacatggtaagccttgagaaaggcggtaatgtcgtacagggaatgtttaatcggcttgggtaa

SEQ ID NO: 146412 - DNA, 201 bp, Enterobacter cloacae
atgacaacaagaaaacttattcgcttgccagaagtgatgaataaaacaggatttagcaaagcatggatctatagacttattagtaagggtaactttcctaagccgattaagattggaataagagccagtgcctttgttgaaagtgagattgatgaatggattgaacaactgatctattcatcacgcaatacagcagcataa

SEQ ID NO: 146413 - DNA, 198 bp, Enterobacter cloacae
atggattattacggtctttttcctaagtttaaattaaaccgatctcttaatgatgaagagagagagcatcagctaaaacaacaccagacaactgaactggatggacaatttttggttcctgatatgaaagtgataacactaaattctcactatctggagttgattgacaaatattactcagcaaaaggatttcggtaa

SEQ ID NO: 146414 - DNA, 861 bp, Enterobacter cloacae
atgattaattacctggagcagcctttgcaactggcggaccatcaatatgcagttattgaccgtatgcgggtgccagaactgccggaaagctggccgcttatcgaactggtttcgccgatgctggcaccacaagcccatctttacccgtggctgataccgttgcatgagcttccatctgttgagtggaggacgttgatggctgacctttcgcgatgcgcagatccaacttcaccgccgacgagtgtccttttactgtccagcccacgcccaacaaatattgtacgtaatctgctggtcaatgcgctgtttttaaaagatacaaaccaacagggacatatcctgcgttattacgatccacgagtgttgtttcatctgcactggatgttgagcccatggcaattgtttaactatctacccgcccaggaaataccgtactggacattctggctggagagagagtggcacacactggctttcccggctcgagtttcttgccagcccggagaccaaacagaaattccgctggcgcaattacagcgttgtgggcagataaaccttgccctggaaaaattgccacccaatgtcgatatggcgcagcgccaggaaagcagtcgcaaaatagatgctttgcttgtgcaggggatgacatgtggactgccgacccaggaagatcgtattgcatttgcgctgcatggattagtgcagccagaaggtttctggatggctccgaagatggctgcattcctggcactgtcccaacaggctcctgactattatcgtgatgtaaccagtaactgggatgaaaatctctggcaagagatgacccaaatgcagccctataataatgcatggaacaattaa

SEQ ID NO: 146415 - DNA, 192 bp, Enterobacter cloacae
gtgtttgtgcttagatcaaaagatgcaggtaagaagttgcaaggcaagcaagaacacatcactaaacaatttactaagtatgttgaaaagtacataaaagccgttctgaagggcgatactaacattcttaaaagttcggattaccgtttttcaacactggttaattatcactctgagcttggtttaccttag

SEQ ID NO: 146416 - DNA, 702 bp, Enterobacter cloacae
atgattagaagtgcttggttcaagatgccctctacatggatgaggaatgaaggcttgagggagtttaagtggagtaatgaccagctgggtgctccagctgcaaaaattgcagctctacagatctactattcaatagctatgagccttgaatttgtagaaatgcgaggcgcttacgatatgaaaattaaccgttacgtttctacggctacctttaatcggtttagagctcttacaggattgagtcgagcattgataacagcaggtgttgaggttttggagcgggcaggcctcatcaaacggtatcgcgagggtaagcgttgcttttatgaaattgtaggttacgttcctggcggtggcggttggtgtaaagtgcctcttcgaaaagttctaggaacagctggagagatagtcccatttcatagattcaaactgcgcaggaagattgagctatacgcaatgaaattctacctctatatatgctttgctcgtgataacactacagaaggaacctatgcatcatttgaaacaataaacaaagcaaccggtatccctgaaaaagagatcccgagcacttacagcttcctcatcgctgtcgggcttataaatcgcgttgataaaggaaatgaagacagttttgatccggcaaagagagctaacacttactacgtaacaggttctcgtgagttttttgctaggatttaa

SEQ ID NO: 146417 - DNA, 147 bp, Enterobacter cloacae
atgaatgaggtctatttctggttttatgcattgatggaattggcaaaggtcgctgataagttggtgcctctatttctcagcgctgcggttttggttgctttcttggcagcctttgtattgttcttaagggaaggtggttccaaatga

SEQ ID NO: 146418 - DNA, 2973 bp, Enterobacter cloacae; identical to SEQ ID NO: 56202

SEQ ID NO: 146419 - DNA, 372 bp, Enterobacter cloacae
atgagttggaataaagacgcggctgtttcttacctccgctcgcatgcgcttggacactctcataacgaatgcgcgaagtttacacgtcgtgccataatcgctggcggcattacgcttgaacgtacacatgatgcaaaggattatggaccaaaacttttgcgtgcaggatttaaagaggttcctcctggttcaacgttgcttagcggagatgtggctgtaattcagccctatcccgggggaaactcaagcggccatatgacaatgttcgacggcactcggtggatctcagattttacccagctcagtatgtaccccgggccgggttaccgccgcgcacaaccaacctataagatttacaggatgagtcgatga

SEQ ID NO: 146420 - DNA, 2451 bp, Enterobacter cloacae
atggtctggcagccgatggcacctgccgtcgcggcggcgcttacgccaaccgggcagaccacggtcgatcgggcggggaacggggtgccggtcgtcaacatcgccacgcctaacggggcgggtatctcgcataaccagttcggtgagtataacgtcggcaaagaggggcttatcctcaacaacggcacggaccgtttaacccagacccagctgggcgggcttatccagaacaaccccaacctgcaggccgggcgggaagcgaaaggcattatcaacgaagtcacgggcgccagccgctcgcagctgcagggctatacggaagtcgccggtaaagcagcaaacgttatggtggccaacccgtacggcattacctgtaacgggtgcggatttatcaacaccccgaacgtcaccctgaccacggggaaaccgcagttcgacgccagcggtaacctgcaggcgctggaggtgacgaaaggcgccatcacggttgaaggccaggggctggatgccagcaagagcgacgcgctgtcgattattgcgcgcgcaacggaagtgaacgccgcgattcatgcgaaagatttgaccgcgaccgtgggcgccaaccgggttgccgccgacggcagcgtcacgccgattaccggcgagggggccgcacctgtggtagccgtggataccggcgcgctcggcgggatgtacgccaaccgtatccgtcttgtttccagcgaaaaaggcgtcggggttaacctcggggatcttaacgcccgacagggcgatattacgctggataccaacggtaagctgatggtgaataacagccttgcaagcggtagcctgacggcgaaggcggatagcgttgtcctcagcggcgaacataaaagtacgggagcaatgctgatcaacagccgttcagacgtggcggtaacgaacggcaaactgcttagcgacggggatattacgcttgccggtaatggaaagctgagcgtcgctaacggtacgttaacggcgggtaaaaacatcagcctgaactctggttcgcttaccgcagataccaccagtgaggttaatgcggctggcaccattcaggctaacgtcgcaggggctgcaaaccatgcgggtaagatggtggcaggcagcggtatctctctttccgcaggccagctcgctaacagcgggaaaatgaccgcgaacggcgatctaaacgtgaaggcgggaggttttaccaatagcggtgcggtacaggcgcagaaaaatacccggctcgatctgggcacgcttaaccatactggtcaactgctggccggcggcgtgctggagatctcaacgggggatgcctggattgacggcatgctcagcagcgatagcgatctgagcgttagcggtactggcgcgctgaatatcgggcaaaacgggcaattgttatccaccggcaggctcgggctgcagtctgacagcgtcataaacaacgggctggtcagtgggaaacagaatctcgcgctcaccagccgtcaattcagcgctcttcaggggagcacgctgaccagcgggggcagcctgcagctcaatgcgggtgatgcgcagatcgccggggaggttctggcccagggcgatctgtccttcagcggcgaccgacttacgacgctggcgagcggacagcttcagtcgcagggcgatatgctgttgcaggcgcataacgccgccgggctggacggtgtccaggctgcaaaaggcaacctgacgctcgctgccggcagcttaacgcatcgcggtacgagccgcggcagcaacgtttctctgcaggctaaccagattgacaccagcggcaccctgcaggcggataatgccatggcgttgagcgccgaaaccattgttcagcaggccggaggggcgctgctggcgcagaaaacgctgcagcttaataccagccagttgaccaacagtggttcgctggatagcgatgccttaacgcttgccattaccgggcatacggataaccacgcgagcggcaaaatgacggcccgtaacgggctcacgctgacgggaaataccttcaccaacgacggccagctggctgccagcgcgctggcgctgacgctaaataacgcctttaccaacacggcctccggaagcgtgctcgccgaaaatacactcgacctgaccgctccagtgttcaataacgccgggagagtggcctcatccgctctgaacctgaacgcgaataccctcgacaatagcggcctgctgcagggcgggcaaacgttgcagctcgcttccacaaggctggctaaccagagcgggggaaaaatcatcagcggcagcgggctgacgctgaatatcccacaactggtgaatgccgggctgatttcggtgaagcaggggctaaccattgaaagcctgatgctgacgaacagcggcaatcttgaagcccagtcgatggcgctgaaagcgggttag

SEQ ID NO: 146421 - DNA, 12441 bp, Enterobacter cloacae
gtgaacgccgggaagtttgctaatttcggcggcgtcacggcagacaatctgcgcattagcggcaacagcctgactaacgacggctggttgcaaagcggcggggcgctggatctgaatgtcggcgcgctggcaaacgggctttccggcactgttcaggcaggcagcggcctggccgttaccgtacagcagctggttaatgctggcgcgatctccgctcagcaaggcgctgccattgatgcgttaacgctggataacaacgggcggattgaagctcaggatctgcagctaaagctgcgcgaaaagctgaataacctggctgaggggatcctcctggcccagcgcagcctgaagctcgcgacgccgcagctcagtaacgacggacgtctgatgtcggaaagcgcgacgctgaacgcgaagacgctcgtcaataagggtttgctgcaggggagcgcggcacttgtcgctgacggtgagcagtttaacaatgcctccgaaggcgaagtcgtcagcggcggtacgctgacgttcaatgagaccctagggttcagcaacgccggtaaggtgcagggcgagactattggactgaataccagaaaggcggataacaatggccagatgctgggattatctgcgcttagcctgagcggaaccgaaagcctcaccaatagcggtaatttgctcagcaaaggcaaactgggccttacgagcgagcagttggataaccaggggcagatcgcggcgcccgagctgaacatcaacacccggcagatgaccaatagcggtttgctacagggtgaccagctgtttggttttaccgcctcctcactccataaccagaagcagggcagcattatcagcggcagcgggctaagacttgccattcccgacctgattaacgccggtttgatttcggtcacccaggggctggctatcgaggccgcgacgctggacaacgctgggaacatcgaggcgaaggatttacagctgacgctgcgccagcagctgaataaccaggcgaaaggtgtgctgctggcagatgattcgcttcacctgtcgacacctgagttcaccaaccgggggcagctgattagccgctcaggcacgataatcgccaatactctgtcaaatgcggggttattgcagggaaatcaggggctttccgtcagcagccatacgctggataacctttcaggtggtcaactcctgagcggcggtgcgctcaccctgaataccgtgcagggagggaacgccggacgtctgcagggggacacggttcagatcggtgcggggcggctggataacagcggccaggtgcttgctatcaacggtctgtcgctcaccgccggggaattgaataatactgcaggcgcagaaatgagcggcagcggaggtagtttacatgttgatcggctggtcaacgccgggctgatttcggtcagtcaggggctggctatcgacgcgctgacgctaacgaatggcggcaatattgaagcaggcaatctggcgttaacgtcggtacagacgctgaataaccaggccagtggcgtactgctggcagacgataccctctcgattgacgccgcccgcggtgataacgccgggaagcttatcagcagcaacgcgcgtcttgcggttagcagcttaacaaatagcgggctgattcagggaaaccagtccctcggcctgcagagcagccagttgaacaacatcgccagcggccaattgctgagcgatggtgatgtgggacttaatgttgaccgtctggataacgctggccgggttcaggggaaaagcctgacgctcgcgggtggacagtctggcggcgttaaccgcggacaaatgctgggccgcgaggcgctgaatattctgttcgccggggctttcaacaacgacgggcgtcttatcagccagaattccctcagcctgaaaagcggggcgctttctaatacaggggtaattgctgctgcaaccgttaacatcgacagcgcagtggggcaggcaaataacagcggattaattcaggccgacggcaagctcagcttctccgccgcctcattgtccaatcaaaagagcggttcgctggtagcaggcgatgatattgcgctgacggtacctgcgctgatcaatgacgggctgatgtcgacggggaaaaacctgcgcctggacgggacttctcttgataaccgcggtggtctggaagcactgaatgtgcagctgaatttgtccggtcaggtaaacaaccagcctgaggggcatctgtttgcagacgacctgctgacgcttaacgccggaagctggcgtaacgacgggcagcttatcggcaacaacgtcattatttcgtccggacgcgggcaaaatagcggcctgctgcagggggatattggtcttaaacttgccgttaccggcctcgataacgatcaagcaggcaagatattaagtggtgggctgctcgatattaccggccagcagctgaacaacactggcctgatgcaggggcagaacgctctcctgcacggcgtggatttcactaatgcgggttcgctgacaggtaaaggcgatctgacgctgaatgtggataataccgcgaccatcagcgggcaaatgctgagccagggcaagctgcagcttgacgccagtcagctcgataatagcggtattctggcagcaaatacggttagcgtgagcaccggagagctgaacaataccgggacgctgcaaagcaatggtgctttgaatctcgttgcagacgcgttcagcaacgttggtacgcttctggccaaacaggcgctaaatctcacgagcgcaatgctgactaacagcggtgtgattcaggccgacacgctgaccctcgcggtaaaaaacgcgctgaccaaccgggacacgggcaaagtgcttgccacccaggcgctggcttttgacggcaatacgttaaccaacagcggcacgctggcggcagataatgcgcacctggctctcgggatcctgaacaatagcggcctggtgcagggtaacagtgggctggcgatccagggtcaagcggcacagacctcgggcctgagaagtgttgacgccgcgcagacgcctgctgccaaagtgattaataacctgatcgtcggacagctgttaagcggcggcgatttgacgattgccggggataagggcgataacgccggtacgctacagggccggacgctgaacgttaaggccggaagctggaataacgaggggacgctgcttggccagcaaggcgcgagcctgaacgtcagcagcacgctaacaaacagcggaacgttactcagcgaggccgggtttgatattcgcacaggcgctgtagataaccgcgggcagttggcggcgggtacgcttaacctgcaatcggacagcatcagcaacagcggtttattgcagggtagcgctgcgttgacgttcgatacccgggccctggataaccttaccggtggacaaattctgtccggcggctcgcttaatctcgatctgccgcagtttaccaacggcgggctcgttcaggcgagtcaggatatgacgctgacgaccggcagctttgacaacctgggcacattgtctgccggagcgttaaatcttaacgtcgcgcaacagctgaataaccagagcgggggcaagctgctggcgacccgtcaacttagcagccagagcgccagcctgacgaataacggtgtgcttgccgcaatgagtgtcgagcttaccagcggccagatcgacaacaacggcatcctgcagggagacagcgcgctggcgctgcacacgccgcggctcaacaatctgacgaacgggcaaattgttagcggcagctcgctgaatctctccatcccgcagatggtcaacctggggctgatgtctgtaaaagaggcgctggtcctttctggagccaccctggataaccagggaacgctacaagggagccgtgtggggctaagcttcaccggcgacgtcgtgaaccgcggcaatgcacgcctggtggcacaaaaagatctgaccctgagcgccgccagccttaacaaccagggcacgttagcgggagattcggtgaatatcatcaccaatctgctgaccaacgtcggcttgctgcagggtaacagcgcgctggcgctgaactccctgacgccatcaactctggtacttaacaataagaccggcgggcaaattatcaccggcggggcgctgacgctttccctgccgcagctgaccaaccaggggctgctgctttcgcagcaggggctcacgcttaatctcgataatctcgacaaccagggcatcgtgcaggcgcgcgatctgggcctgaatatcggcaaccagctgacgaaccaacaaagtggacggctgctcgctcagcaggggctgaacctgacggccgcaaggctggataacgcaggtcagctggcggcgagtaatgccacgctggcggtcaatatcctgaataaccgcggcgtgcttcagggcgacggcgggctgtcgattaccgccccgacgctgaacaacctgaccggcgggaaactgctttccggcggacagctgacgcttaaggccggtcagctcgcgaatggcgggataatgcaggggcaacggctcggcgtgaacgcgagtggctggaacaacagcggcagcgtactcggtaccgacggactgaccgctcaggttgataaccagttgaccaacacgggtcgcctgcttggccaggggagtacgcgcgttgctgcgggggcgctgaataaccagggttctctgctggttgacggtgacctgatactggacggcggcagcctgtcaaacgggggcagccttcagggcagtaccctgacggtaaatagtggtacggtcgataacgccggttccgtgattggtctgaacgccctgacgcttcaacctcttcaggggctgaccaaccgggccggtgcatcaatgaaaacgcagggaacgctgctggcgggtgggcagagcatcacgaatgatggtctgtggcagtcgcagtacctgaaggttaacgcccggcagttacagaacaacggcacgctgcaaagcgcgggaaatacggatctcgcgctgacctcctccctggtcaatacgggctcaatggtggcgaacgggacggccacgctcggggcgccaacgctgaagaatcaggggcaaatgctggcgaagaagatgtcgctgtcgggcggttcgctcagtaacagcggcagcatcagcggtgccgatggccttggcgtcacgctcagcggcgatcttgaccagcaggcgggtgcgaagctgttaagcaacggcctgctcagcatgggcgccaatatcctgaccaacctcggtcatatccaggggagcaccctgacgctgaatgccggtagcctgaataaccagggccgcatggaggcgaataccgcgctcaacgccacgctgcgcggtaacgtcgataacggacgcaatgccgtgatgctgagccagggcgctttccagctgggcgcacagacgctgaataatgacggtacgctacaggggaacggtaatacgcagcttgacctgcgcgatcgcggcagtaatcaggggcagttactcagtggtgcaacgctaacgctgaatacgccggggctgaccaacagcggctgggtgcagggctttgcgctgtggctcaacgccggttcgctgaacaacagcggtacggtgctggcacagcagcagggaacgctcggtggtaattatattgtaaacaacggcatgttgcagggcgcgaacctgacggttaatccgggccagctcgataataacggtacggtatacgccacccagaatcttgggattgccgcctcgcaggtcaataacgctgctgctgcccggatgcttagccagggtaacctggcgattaacgccactaataccggccttcaggggcaggttgtggcgctgggggacctcaccctcgcgagcaaggcttcctataatcagctgactacgctggccgcggggaatacgctgtccgtcaccagccagggcgatatcacgaccaatggcctgatgcagggcaaggggatacagctttccgctgcgggtacgctgaataataacggccagctgcgggcgggctatggcgaaagccagcttagcgcagggcagctaaacctgaatggtacaggcagcgtcgaggcgggcggtacgctgcgcctgagcagcctgaacggtattaataacgcagggtttgtcggaactgcaggcgatctgatcgccagcgccggaagcacgctgctgaatagcgctctgctgtacgcgggcaataatatgagcctgctggcgaacagcatccgtaacgcgcgcggcgatattctggccggcaacagcctgtggatgcagcgcgacagcgcaggtaacgctagcgcggaggtcgtgaatacttcaggcagtattgaaacccagcgtggcgacatttcaatcctgaccgggcatttagtaaacgagcgggatgggctcaatgcagcccagagcgaaacgaatatcgcaccgtcctgggttaagggtggaacggcggatattcctgtggactggatttcctcttccggtaccggcaagtacggtatttatgtgacggaaggacagagttatcacggccacggtgacgactggagcgaaatgcttggcaactatgcgccttatgaagacgcggatgttcaaaaagttgccgttaaaaccgtttcggtatccgtgagcgcgaaggggcagcagtcccgcattgcgtccggccgagacatcatcgcccggtctgataacgttgaaaatatggcgtcgtcgattctggcgaacagaaatattcagctttcaggaagtaccttaaataaccagtcatggctaaacggcacgtcgacggtttataacgtttatcgctatggggtaggcgataaatatgcccgcagacctgatgagaccacgcgaagctatgacaagctggtatcgaagtcgattagctatgttcttgacagtgtgaccactgaaggggccagcggagacgtttatcgcgccgttatccaggccggcggcgcggtagtcgccagcttcagcaacaatatcagcaatacctccaccacggcgaacgccccgggctataagcctggcctcagtgcccccgggctgaacctgtctggcggcccgaccgttgcgtctggcgctaaggccaccggactcggcgcggcaagcagccaaagcgttgccgcaccgcaggcgaccattaacctgcccggcggtgggagtggcataggtaatgcggaagtgctcaccagccgcaatgccggtaataacggtctggcatcgattgataaccgtccccagagcatcggcgattttggccaggcaggcggcaagctggctgacgttcacctgcaggctgcaggcttaacctcccagaacggtgcgaacggtacgccggttgatttgaccgggaccggtgcagccctggtggttcccggcagcgcgggtggcaagcatacgactattgccagcgataccgtagcgctggcggggcagaagcagtcgggaacaagcggaacgtccgcgctggcttcccgcgataagatcggtgaaatcgctgcggtaacggctcagatcatttcgctttccagcggcgggaaaacgcctccgccaccgggttataactaccgtcctgtttcgcttaccgatatctcgtcggttgccccagcgctgaccagcaatggttcgccgattaagctgagcgactatccgctaccggccaacaataacggctattttgtggcaaaccgcgatccgaaaagcccgtatctcattgttaccaacccgaaactggcgggtttagggcaactggatagcagcctgtttaattatttgtacaagctggccgggacaacgccgccttcggcgccgcaggaaacccgtacaacctataccgataccacgcagttcctggggtcggattatttcctggcgcgtctgaatctgcgtccggaatatgattaccgtttcctgggcgatgcggccttcgacacccgctacgtcagcaatcagatcctgaacgagaccggtagccgctacgttaacggcgtgggctccgaccttgagcagatgcagtatctgatcgatcgcgccgctcaggcccgtgacaagctggggttacagctcggcgtcagcctgtcggaagagcaggttgcctcgctggattccagtatcctgtggtgggaaaacacggtgattgagggacaaaatgtcctcgtgccaaggctgtacctgtcggcgaaggacgtggcgtttaacaaagggagcattatcgccggaaatcaggtgatccttaatgctggcagcatcacgaatgacggcagtacgctgcagggtaaaagcctgctggctgccagcagccagagcacaatcaacaacatcaatggtggcctgatcggttccagcggaagcctgcagcttagcgccctgggcaatattaataacgtggggtcaaccatcagcgggcagacggttagccttgagagcgtggggggcagtattgttaaccagacgctgaccaaccaatggaatatctcgggtaccacgaacggatggaacagccaggccgtctcgctgacgcaaaccgacctgggcgcgcttgcttccatcaaagcgacggacagcctgaccctgagcgccgggaaagatatcatcaataccggcgctaacctcagtgctggcggcgatatgttgctaaaagcgctggatgatatctctgttacagggaatcaactggtgacgcgcgaccgttatggccgcaatctcaatgagaccgtcaccaaccagggcagtacggtcaccagcggaggcaaccttggcctgcaggcaggttacgatctgaacgttacgggcagtaatctgacggccggaggcagcgctgcgctttgggcggggaacgatctggtgctggatgtggcgcagaatagccgccacagccagaccgcgaaaacggattccctgaagacggataatacgcgtacggtcattagcgctggcgacgatctgacgctggccgcaggccgcgatctgcgcagtaacgccgcggcgcttgccgcacaggatcgcgtggggctgcaggccggacgggatatcgatctgctggcggcagagaccacaaccagcgacaaatacagcgcgaagaaaaaggtcgagatcaaccagtctgtgcgccagcagggaacggagatcgccagcggcagcagcaccacaatcattgcgaaccgtgatgttaatacccaggcggcgcaggtcacagcacacggggatattggcgtgggcgcagggcgggacataaatctcgccaccgcaaccgaaagcgattatcactacaaagagcagactaaaaccaaaaaagggttcctgagcaagaaaaccacccacaccatcgaggagaacagcgcgacgcgtgaatccggctcattgctgagcggtgataacgtgcaagtcgttgcgggcaataacctgctggtgaacggctccgccgtggcgggcgatggcgacgtgaagcttaaggcgggcaacaacgtcgatatcgtggcagcgacgaacagcgatacctcctggcgctttaaggaagagaaaaaatccggcctgatgggctcgggcgggattggtttcaccatcggcagcagcaaaagcacgcacgatcttcgtgagaaaggcaccacccagagtcagagcttcagtacggtgggctcgacggggggtaacgtcgcgatttctgcaggaaaccaggcccacatcggcggcgcggatcttatcgccgggaaagatttaagcctcagcggcgacagcgtcatcatcgagccggggcacgacaagcgcacccgggatgaaaccttcgagcagaagaaaagcgggctcaccgtggcgctctccggcaccgtcggtagcgctattaacaatgccgtgagcgcggcgcaggagaccaaagagcaaagtgatggccgtctgaaagcccttcaggccaccaaaacggtgctgtccggcgtgcaggccgggcaggctgcggatatggcggcaaccaccggcgacccgaacgcaatgggtgtgagcctctcgctgacgacccagaagtcgaaatcacagcagcatgctgagagtgatgcggtggcaggcagcacgctgaacgcaggcaacaatctcgctatcaccgcgaacggcaaaaacaaaggtgcaaacagcggcgacatcgtgattgcgggcagccagctgaaagccgggggcgataccacgctggatgcacagaacgacattctgctgtccggcgcggcgaatacccaaaaaaccagcggcaagaacagcagcagcggtggcggcattggcgtgagcatcggtgccggcggcaacggcgcgggtatcagcgtgtttgccaacgtcaacgccgcgcacggcaaggataaaggcaacggtaccgactggaccgaaaccacgatcgacagcggcaaaaacgtcaccctaaaaagcgggcacgacaccgtgcttgatggcgctcaggttaacggcaataaaattgtggcagatgttggtcacgacctgctgatgcgcagccagcagaacaacagcgactacgacagcaagcagaccagcgttgctgcggggggcagcttcaccttcggcaccatgtccggttcaggctatatcaacgccagccaggacaagatgaagagccgctttgattccgtggccgaacaaactgggctgtatgccggggacggcggcttcgatatcaccgtggggcatcatacccagcttgatggagcggttatcgcctctaccgccacgccggacaaaaacagcctcgataccgggacgctgggcttcagcgatatccacaacgaagcggactttaaaacctcgcactccggtatcagcctgagcggcggcggcagcttcggggataaattccagggtaacctgccgggcggcatgatctccgctgcgggtaataaaggccataaggaaggcaccacgcaggccgccgtggcagagggctccctcactatccgcgacaaagcaaaccagaagcaggacgtggccgatctgagccgcgacaccgaacatgccaacgacagcatcagcccaatcttcgacaaggagaaagagcagaaccgcctgaacgcagttgggatgatcagcgacattggtagccaggtggcggatattgccaggacgcagggtgatcttaacgggctgaaggcggcccagaaagaaaccggcgcaacactccccgcaaatgcgacagaaaaagagcgccagaactatcttgcgaaactgcgtgatacccaggcatacaaaaacgtgatggtgacctacggaaccggcagcgccatgcagcgcggcatccaggcggctacggcagcgctgcagggactggcgggcggcaatatcggaggggcgctggcgggcgcgtcagcaccggagctggcgaacatcatcggccatcatgcaggcattgatgacgatacggcggcaaaagcgattgcccatgccatcctcggcggcgtaaccgcagcccttcagggcaacagtgccgcagcgggtgctgtgggggccgcatccggcgaactgattgcgacagcgattgccaaacagttctatcccgatactgacccgtcgaagctgacggaagagcagaagcagaccgtgagtacgctggcatctgtttcagcgggcatagctggcgggattgccgggggaaatacggctggtgcggcgactggggccagtgcagggaaaaatagtgctgagaataacaaccttgccagcgttctggcagctgcaaatgctgtaaaaccgggaacgacagaaaaatggcaggcagagcagcaggccgcgattaaagaagcctgcagcggaggcacaccggtatcctgccagatggcgatggcggctgtgggaacagtgatgtccggaggcattcttcctgaagcaatggtcatttatggtgtcatcagtgctggagctgtgggtggtgttgattatgtgatgaatggttccgttgatcctaaaaacgttattgctgcctactggagcggtgctttaacccgttatactggatttgaatcaacagttcttatcaatgctggtagcagcgccatcgtaagctacctggatggaaaaaatccattcctttacggaactatcggtggtttgggtggagcaattggttatggagtaggtaataaattaatagaaccgatattgggtgacgttgttaaccccatgtggaaatctttacagtgggaggatattggatatggtatatctcagccttatcgattgagtccagtgcctgggattgttggagctgcaggcggcggcgttgcaggtgaagtatttaatgtggtggtagacccatctactcctgctaataacaagaatggagcagcaaaatga

SEQ ID NO: 146422 - DNA, 192 bp, Enterobacter cloacae
atgaaaaaatacaaatcaaaggacttggttgttgttgagaatcggtttttgggtgataaggacatcacaaccttcactgcaaaatacgcaagtaagaaggctgagggcgagatatatcagcttctgtctgaactgaaaaagcaggacacagatgagcaaaaacaatcgtttagtggatgttggttagtataa

SEQ ID NO: 146423 - DNA, 1404 bp, Enterobacter cloacae; identical to SEQ ID NO: 101449

SEQ ID NO: 146424 - DNA, 603 bp, Enterobacter cloacae
  misc_feature (523)..(532): n is a, c, g, or t
atgcgcagtaatgccgttttcaacttcaaaaagttacttttgtctctttctgtttgtgctgcaattttagccccgactgcaaatgcagacaacgcaatgcgtaacattttcaatggcatgatgacgtctaccagcccggccaccttttccacagcaacccgtacaggcatagttggcgggtcaatgtcttaccgaacaacaaacgttaataccaaccttgtttccatgtcgtttccaaaagcttctgtcggttgtaacggtattgacgtttttcttgggtccttcagcatgatcaacggggaccagcttgtgcaggtggcccgtggtattgcccagggtgcggctatctatgcttttaacgttgctgtttcagctatttgtgctgactgtgctgcaacgattaatgacatccaaaacaaactgcaagcgctaaataaatttgcgaaagattcatgcaatgcaacttactctttcctttctgaaaacgtgggtacgccaagccagttcgctaactcagttagcnnnnnnnnnnagttagctctggaccagcctcaattctgggatcgattaatggtcttattcctgattttggctcatcgatga

SEQ ID NO: 146425 - DNA, 141 bp, Enterobacter cloacae; identical to SEQ ID NO: 11535

SEQ ID NO: 146426 - DNA, 1113 bp, Enterobacter cloacae
atgaattactctcacgataactggtcagcaattctggcccatattggtaagcccgaagaactggatacttcggcacgtaatgccggggctctaacccgccgccgcgaaattcgtgatgctgcaactctgctacgtctggggctggcttacggccccggggggatgtcattacgtgaagtcactgcatgggctcagctccatgacgttgcaacattatctgacgtggctctcctgaagcggctgcggaatgccgccgactggtttggcatacttgccgcacaaacacttgctgtacgcgccgcagttacgggttgtacaagcggaaagagattgcgtcttgtcgatggaacagcaatcagtgcgcccgggggcggcagcgctgaatggcgactacatatgggatatgatcctcatacctgtcagttcactgattttgagctaaccgacagcagagacgctgaacggctggaccgatttgcgcaaacggcagacgagatacgcattgctgaccggggattcggttcgcgtcccgaatgtatccgctcacttgcttttggagaagctgattatatcgtccgggttcactggcgaggattgcgctggttaactgcagaaggaatgcgctttgacatgatgggttttctgcgcgggctggattgcggtaagaacggtgaaaccactgtaatgataggcaattcaggtaataaaaaagccggagctccctttccggcacgtctcattgccgtatcacttcctcccgaaaaagcattaatcagtaaaacccgactgctcagcgagaatcgtcgaaaaggacgagtagttcaggcggaaacgctggaagcagcgggccatttgctattgctaacatcattaccggaagatgaatattcagcagagcaagtggctgattgttaccgtctgcgatggcaaattgaactggcttttaagcggctcaaaagtttgctgcacctggatgctttgcgtgcaaaggaacctgaactcgcgaaagcgtggatatttgctaatctactcgccgcatttttaattgacgacataatccagccatcgctggatttcccccccagaagtgccggatccgaaaagaagaactaa

SEQ ID NO: 146427 - DNA, 195 bp, Enterobacter cloacae
atggaacgtgtaatattttcagtaatcttttttatgatgctgggcgtacctttttaccttctttataaaattgcccgggacatttttggtaccgccggtgctggtgagcctgcacaattgcctcagggcaagcaaagacgctcaggactgatgaatcccctaatgattttgataaaaatcattaagttaaggtag

SEQ ID NO: 146428 - DNA, 570 bp, Enterobacter cloacae
atgtgcgaactcgatattttacacgactctctttaccaattctgccccgaattacacttaaaacgactcaacagcttaacgttggcttgccacgcattacttgactgtaaaactctcactcttaccgaacttggccgtaacctgccaaccaaagcgagaacaaaacataacatcaaacgaatcgaccgattgttaggtaatcgtcacctccacaaagagcgactcgctgtataccgttggcatgctagctttatctgttcgggcaatacgatgcccattgtacttgttgactggtctgatattcgtgagcaaaaacgacttatggtattgcgagcttcagtcgcactacacggtcgttctgttactctttatgagaaagcgttcccgctttcagagcaatgttcaaagaaagctcatgaccaatttctagccgaccttgcgagcattctaccgagtaacaccacaccgctcattgtcagtgatgctggctttaaagtgccatggtataaatccgttgagaagctgggttggtactggttaagtcgagtaagaggaaaagggctttgttga

SEQ ID NO: 146429 - DNA, 648 bp, Enterobacter cloacae
atggtctgtgttgtcgggaggatgcgtgatctgatccttcaactcagcaaaagttcgatttattcaacaaagccgactttaggctataagaggctgactaaaagcaatccaatctcatgccaaattctattgtataaatctcgctctaaaggccgaaaaaatcagcgctcgacacggactcattgtcaccacccgtcacctaaaatctactcagcgtcggcaaaggagccatgggttctagcaactaacttacctgttgaaattcgaacacccaaacaacttgttaatatctattcgaagcgaatgcagattgaagaaaccttccgagacttgaaaagtcctgcctacggactaggcctacgccatagccgaacgagcagctcagagcgttttgatatcatgctgctaatcgccctgatgcttcaactaacatgttggcttgcgggcgttcatgctcagaaacaaggttgggacaagcacttccaggctaacacagtcagaaatcgaaacgtactctcaacagttcgcttaggcatggaagttttgcggcattctggctacacaataacaagggaagacttactcgtggctgcaaccctactagctcaaaatttattcacacatggttacgctttggggaaattatga

SEQ ID NO: 146430 - DNA, 432 bp, Enterobacter cloacae
atgaagctacagcttttcagcaccgggaaagaacacccgccacaggctcatccattgtttgccgatctggccagctgcggttttcccagccctgccgctgactatgtcgagtccgatctggatctccatgattactgcatacggcatccgagcgcgacgtactacctgcgtgccagcggagacagcatggcggacggtagtctgtacaatggcgatctgctggttgtggacagtgctgaaaagccgcggcacggcgatatcgttgtcgccagcgtacagggggagtttacggttaaacggcttctgctgacgcctcgactgacgctgcagcccatgaatgcctcctggtcgccgacttatcctgaccccgatgagctggatatctttggcgtcgtcacgcatatcatccaccgcccgagggagatgtactga

SEQ ID NO: 146431 - DNA, 795 bp, Enterobacter cloacae
atgaataacctggttccagttggatctccgtcatctcccggaacattgcttccggtggccatcgattaccctgccgccctcgccctgcgccagatggcgctcgtgcaggatgaactgccgaaatacctgctggcgccggaagtcagcgccctgctccattacgtgccggatcttcaccgcaagatgctgctggtgacgctgtggaacaccggcgcgcgcattaatgaagcgctcgcgctgacccggggggatttttcactgacgccgccgtatccgttcgtgcagctggccacgctcaagcagcgcgccgagaaagcggccaggacggcaggtcgtgctcccgcaggcagtcaggtccatcgtcttgttccgctttccgatcaccactacgtcagccagctacagatgatggtggccaccctgaaaattccgctggaaagacgaaacaagcacaccggcagaattgagaaggcgcgtatctgggagatcacagaccgtaccgtccgcacctggcttagcgaagcggtggaggccgcagcggccgacggggtgacgttctcagtaccggtgaccccccatacgttccgtcactcctacgcgatgcacatgctgtacgccggtattccgctgaaagtgctgcagagcctgatgggccataaatcgattagctcgacggaggtctatacgaaggtgtttgcgctcgatgtcgcagcgcgccatcgtgtgcagttcgccatgccggaagctgaagctgttgcgttgataaaaaagttaaccccagaccaatctacatag

SEQ ID NO: 146432 - DNA, 1128 bp, Enterobacter cloacae
atgttcgatttttcttcatcgaagccaactgtattggttatcgacgatactccagaaaacctcacgctgatgtatcagctacttaaagatgattataaggtaaaaggggcaaacggcggtgagcgcgggcttacacttgccgaaactgctaatccagatttgatcttgctcgatatcatgatgccggaaatagatggttatcaagtatgccagcagcttaaatcaaacccagcaaccagtgatatcccgataatattcctcacagctaaagctgaaagaatcgatgaacataaagggctaaaattgggtgccgttgactacataaccaaaccaattaacccagaggtcgtgaaggcacgtgttaaaacacatgtatctctcaaagtggcttccgatatcttaaaagacaagaatcaagtgctagagcaagaggtcgaaagacgaaccaacgaagctttgcggcaaaaagaagagcttcacgcaattcaagatttttccatttatgccatgatttcgttagccgaagcccgcgataacgaaacgggtaaccacattaaacgtacccaagcttacataaaacgtttagcagagcaattacgccaaaactcgcgttatgtttcagaactgaccgatgactttattgccctgttatataaatcagcgcctctgcacgatatcgggaaaataggcattccagacaacatcttgcggaaagaaggctccctgaccgacgatgaatttcgagtgatgaaaactcataccaccatcggttatgaagcgattaaaaatgctgagaaattatgcggccagcctatgaagttcttgattgtcgcaaaagagatcgcctactcacatcacgaacgctgggatggtgaaggatacccattaggtcttgctggagagcaaattccgttgtccgcccgactcatggctatagcagacgtctatgatgcgctcatcagcaagcgagtttataaacctgcgttttcacattcagacgcagtaaatatcattgtgtcaggcaaaggcactcaatttgaccctactatcatcgatgccttcgctgaaattacagatgaactcgatgccattgctcaagaaggcactgttgcaaatagtcggtggtga

SEQ ID NO: 146433 - DNA, 612 bp, Enterobacter cloacae
atgagtgagtcagcgctattaactggcacacttgaagccactaatgaaccatatgcaatagctaagatagcaggcataaaactctgcgaatcttataatcgccagtatggtagagattatcgtagtgtaatgccaacaaatctttacggcataaatgataattttcatcccgagaattcacacgtcattccagcattactgagacgctttcatgaagctaaagttgcaggagataaagaggttgttgtatgggggactggcaaaccaatgcgtgagtttctctatgtagatgatatggctgcagcatcagttcatgtaatggaacttgaacctgcagtttatgctagcatcacagaaccaatgctttcccatattaacgtgggtaccggtgttgattgtacaatacgagagatggcggaaactattgcacgcgttgtcaactttactggcgaaattatcttcgattctacaaaaccggatggaacgccgagaaaactaatgaacgtcaatcgtctaaaagaaataggctgggaataccgctatgaattggaggctggccttaaacttacgtatgcatggtatctcgacaatcttgcttctttcaggagttga

SEQ ID NO: 146434 - DNA, 456 bp, Enterobacter cloacae
atgaaattagagcgaggtttattccagacagtagttaaaaatgctcctcttatttcaattgacctcattattaaaaatagtaatggtaaggtgctgctcgggcagcgccttaatcgtccagcccaagattactggtttgtccccggtggcagaattttaaaagatgagcttttagatgaagcatttaatcggattggaaccgaggagttaggggtaaatatatatagaaaatcagcaacgttcttggggatctacgaacatttttatatcgataacttctcgggacatgatttttcgacgcattatattgttcatggctatgaaataattatcgatattgagctattaaatctaccctctgatcagcatggtcgcttccagtggtttaggatagatgatttgttgaacgattccacagtacatcagtttaccaaaaactattttatcgcaaggtaa

SEQ ID NO: 146435 - DNA, 1407 bp, Enterobacter cloacae
atgttacttcctgttgttatggctggtggatctggtacaagattgtggccactatctcgtacattatatccaaagcaatttctgtctcttaatactaatttaactatgctccaagagacgctacgtcgcctgcatagtgttgagcactgtccagcattgattatttgtaacgaagctcatcgttttattgttgctgagcaattaagaaaagaagagattaaacatagtggcattatactggaacccgctggtcgtaatactgctcctgctattacgcttgctgctcttaaggcttgcgcggatggtgacgatccaattcttctggttttggctgctgatcatgagatccaggatgatactagttttaccaaggctctagaacaagcggaacattttgccaagcagaataaattggtcactttcggtatagttcctacaacaccggaaactggatatggctatattcatactggaaccaaaattgctgacggtggctacgaagttgctgatttcgtcgaaaaacctgaaaagacggtcgctgaatcgtatttgtcaagcggtgattatttatggaatagcgggatttttatgttcaaggcctccatattccttaaagaattacaaaaatatcgccctgatattttagacgtttgtaagaaaactttgatgaattcctgtattgatcttgacttcatcagacttgatcagaaaattttcaatgattgccctgaagattctattgactacgctgtaatggaaaaaacgaaagatgcagttgttgttcctttagatgcaaaatggagcgatgttggttcatggtcagctttatgggaaataagtagtaaggatgagcaaggaaatgccgtccgaggagatgtgttaacagaagaatcatcaaacagttatctttattcgcaacacaggttaattggagctgtaggcataaaagatctcgtagttgtcgaaactaaagatgcagtacttgttgcacataaagacaaagtacagcaagttaaaaacatagtttcgcaacttaaaagtaaaaatcgttctgaatatcttcagcacagagaaatttttcggccgtggggtagtcatgacactattgctgaaggtaatcgcttccaggttaaacatgtcatagttttgccgggtcagataacggctaagcaaattcactttcatcgaactgaacactgggttgtcgtcagcggcacagcaaaagtacatttagagaacgaaagctatttaattgctgagaacgagtcaacttttattcccgtaggtgttcctcatgcaattgagaatccagggaagattccacttgaaataatagaggttcgttcaggtgcatatttgggcgaggatgatgtcgtcagaatatcatctgacggcgtaggatattag

SEQ ID NO: 146436 - DNA, 747 bp, Enterobacter cloacae
atgaaggtaagtataattaccgcaacttataatagtgagaaaatcttagctgacactttgaattctgttgaatctcagacatatcaaaacattgaatatataatcgttgatggtgcatccacagatggcacacttgaacttataaaccgactttcatctcgggtaacaaaaatcgtttccgaaaaagacaagggtatttatgatgctttgaataaaggtgtcaaaatggcgacgggtgatgtcattggttttatccattccgatgatatattagctaatcctgatatcgtagaaaaaatcgtgaatgagtttcatttctcaaacgctgatcttgtctatggtgatttggtttttattgatagagaaaacaccagtaaaataaaacgttattggcgaagtggtgagttcaggaaaagtaaaatatcattcggttgggctcctcctcatccatcattttatatgaaaaaaaagctgtaccaagacaatggtctttttgatcttaatttcaaaatcgcagctgattatgatcaaatgattaggatgttacagcgcgataacattaaagtatcctatcttaatgagatttttgttaaaatgcgactgggaggggaaagtactaaaatagagaatgccatttcaagtactcaagaaataatttctataatgaaaaaacatcaaattaattggcggttcgctattttataccgaaaattggcaaaatgtatgcagttattcctaaagccttga

SEQ ID NO: 146437 - DNA, 1110 bp, Enterobacter cloacae; identical to SEQ ID NO: 133099

SEQ ID NO: 146438 - DNA, 294 bp, Enterobacter cloacae
gtggcgcacgtattcggtgaacgcacgttggccacgctggagcgtcttctgagcctgctgtcggcctttgaggtcgtggtatggatgacggatggctggccgctgtatgaatcacgcctgaagggagaactgcacgttatcagcaagcgatatacgcagcgcattgagcggcataacctgaatctgaggcagcatctggcaaggctgggcaggaagtcactgtcgttctcaaaatcggtggagctgcatgacaaagtcatcgggcattatctgaacataagacactatcagtaa

SEQ ID NO: 146439 - DNA, 765 bp, Enterobacter cloacae
atgggattttcattgctctatattaccgtgataattaagagtgttccctatattgattggaaattctcgacgagtgaaaaaatgtttctgtcgatgagtttgatttgtattccaaccataataatgacattcaaagtccttaaaactgaatggtttgcctggacacattaccccattcgctttgacagaaagaacagactggtgcacgtattccggttaaatggttcagcctacagcgttccctgggatagcgtttttttcaccacaggactgagccacagaaaagatgcgaacaaagactactacatcagcggtcatgtgctggcggatgataataaaaccgtgattgacaccttctgtctgccggccacgcattcggacaggaaacagcttgaaaggcactgggagtttgtcaggcgttacatggaggaagggcctgagtccgtcgttggggttgttgatttttgcctccccatcacaaaaaaacgcgagggctatcgctttggtctgctctatcttttatccggctttaacggcgcaccgttatttttatttccgctcctgtttgtgctggcctttattttcagcgttccgcgttatctggcaatggtgacaagcagggtgcccgtctggccggagagtattgaggcgcagtgccgggttgataaagatgatccttatctggtcgatgcttctggtaatcctgaacatccatggcgaaatctttttaggaagtcatcagcaaataacagcgaacaaagatga

SEQ ID NO: 146440 - DNA, 2598 bp, Enterobacter cloacae
atgaaaacacaaaaaggctgcaaattctgtatacgctatgggttgccatttttacccgttcgtccggcggttgtagcaaaggacgatgcattgcctcatttgcctgacagcatcactgtacctgtagtagcaaaaggtgaaactgcatggacggggcgcttgttgcgagaaggttatttatatatctggtctgagtcaggtaaccgctggattaattattttgccactggtgagggatattattacccgctgccagaaaatggagatgcgcctcctgatattgcaaatggcaaggttaagccatgtattactcagccagaagagctggcgaatgcgtcactgataacgctgccggtaaaacccttaggtatgaaaaacggtatattctggttctgctggtccgaagtggaatggacaccagcggtccgcgcaaagcatgaagacgcgtcttatcgcatccagtatatgcaaccttttgacatggatgcctggatgaatactggtaaggctgaccaggttattgcaatatcagcgctgactgaaactgtggcggaatacagccagggtgcggacagcagtggtgtccgccactggtccccgtcgtactggaagagggcaaaggcgctggacggttcgaatctggtgctggcagcagaggcgttgtccccgggtaagggcgggattattattttgtcagacccagtggcggtagcgcaggaactgagttcgttagtaaactatcgcctgaaaacccgctttgccgaagatcctgaattttcccgtggcatcgcgttatctgcaacgttgtctggtcttaaacaggccatgaccgaacaattcagaagagatctaattgctgaagataaaacaacggaacaatggtcaaagacggtgggaagcagggttatcgcaggtatcccggtgccatcggaaaatgctgaacaggaagcagaagaggcgaaagactggcataaccgcacttttgatgaacggtttgaagtccgggcgaaacagcgatgggatgattatgaaaaatatattgaccgggataaagagaaagcgttcctgacgaaattagatgcggccgtaaatacgtacaacgaaagcgtcattattccgatgacagaaatgtaccttgcctggctacagagcgaagcacttcccacttactttgaacataacttcgacacaaaaaatatcccatgcggggcattctatctgcaaagcgtaactgactgtctggaaggtatgcaggatcagaagttggtgtcacagtggctttacagtcagctcgtggcggaggctttcagtgctaaaaactatatactccaggctctggtttttaataacgatgaaatagcgaagcagatccaggaaaaagtcagcaagatttctgtggttgatgctatttcgtgggaaaatctgatggatggcatcaaagacgccactgaggattacagtaaggtactgtctgtaaagatggagagctacctgagctgcatcagtagtggttttgtgcgcctcttgcgggatatgacatacagcaaaccagcaatcagtattgtcgcgatggttgcgaacagcggctatgggttaaaaacggtggtgctgacgggtaagcgcaaatattttcttcgggcgactttgcgtgaagtcgcccggatgacagacattcatgatcgtgtttcacaggacaagctgcaccatcatctggataccgcaatgcggcgaatggagctggacggggttccgatggaggacatgcaggagcggcgatttatggtgctgatagaccgtaatgaagccagaagaatcagcgcattgccaaaagagacgcgtattcaggaagccacccgggttcttcgttctgctgacgatgtgacaggcagtgtattcccccgtttttacagtacgaatatgtcgggtctgagaggggcaacggtgaatcgccttgcggacacggcgggaggaagtattccgtttgcagggtgtatggcttcgttgatttttcaggggggcgcgttaatcggtgcggcaggagaaaaagatctgctgacctgggaaaaaggtacacgctttggcgcgaatgttgtgggggcatttggcacttcgctggaggtggcggagcgggcactgaatgatctgagggtgctgaggctgaaggcgattatacgcagcaacctgggagctaaagcgctcaggaagacgaccgggtttatcagtcaggggattaaggtgtgctcaaaggcggcactggttggtgttttttgggatggattgaattctctcgattttgctttaactggtgattatggtatggcaattgctagtttaggctcgtctataggggggttacttttatccggtataatcaccggtttagttctggggccattaggaatagcctgggcgctggttctagtttttggttgtgctatttatatggcgttaaaaggggataacgatatccaaaaatggctgaagagctgcctctggcggaaagctccggaaggattgtatggtgacccagctatttatcctaccgggataatggaaatggacgcgtttaatgatgcgattaagccagaggatgactga

SEQ ID NO: 146441 - DNA, 1032 bp, Enterobacter cloacae
atgacaatgtatggcctataccagccctataagataaatcgaccattgaccaaagaagaaaaaaataaccagtttaaacaagggaaacatcgtaaagtaaaagcattgtattgtggtgagtcagtaattcatatgaactcaacttatcttgaaattgtagataaattctataaaaataagggggtggacagtctttggggtctgatgatttttgtggggtttattggaattctactatatgtgatttttagaggggttacagatttaattgctatgcatggactgggtaaattttctcttgcttgtttgatggttcttccgtttatagcttttggtggttattttgtctttaaagaatggtttaaatggacacattatcccattcgttttaaccgccggaatggcatggtttatgtattccgtacaaacggaacggtgttatgtgctccctggaaggagatattctttactcaggagaaagaaccgggccccttgcgtgaatggtgtattcgcgggcatatccttgataaggatggggagatggtactggaaacctttagcttgggtatttgtggggctaaagggttgctgccgggttattgggaatttattcgttgctatatggaggaggatttaaccagtgaactggcagatattattattgtctgcccaccgattgaaaatcgaagggaaggatttgtttttggttttcagaatctgatttatatgtattcaagaatggagtggatatctttaatctggatgctaccaatgagtatggtaggtagtatagcacgttatattgccagtcaaaccagtaaaatccctcaatggccgcaggaggtactggatgcctgtaagccagatgtcgatgattcagtaaatgtcagcgccgataacaatccgaaagatatgtggcgactggtatttgcgaatcagaagtatgaaaactggaaaatgcttgttgagcgtcatgaagtggtattaagtaaaattaatgacatactgacaaaacgttatggaagccagtag

SEQ ID NO: 146442 - DNA, 1035 bp, Enterobacter cloacae
atgacaatgtatggcctgtatcagccctataaggtaaatcgttcattgaccagagaagataaaaataatcagctcagacaaggtcgatacagaaaggtcaaatactttaattgtggtgggtcggtgattcgtatgaattcgacatatcttgaaactgtggacaaattctataaaagaaagggacaggataatgcctggtggttattggcctccattgtaattattagtgtgattcttattggtttatttaggagtacccagttaatttcgactcaaggattgacaccattaattcgaatcgctccttttggtttaataatgctaggaggagttttttttacgggacgattcgtatctaaagagtggtttaaatggacacattatcccattcgctttaaccgccagaatggtatagtttatgtattccgtacaaacggaacggtgttatctgcgccatggaaggagatattctttactcaggagaaagatccgggtcctctgcgtgaatggtgtattcgcggacatattctggacaaggatggggaaacggtacttgaaaccttcagtctgggattttgtgagaataaagcatcattgccggagtattgggagttcatccgttgttatatggaagaagactgcgttgaggatctagctgaactggtagtcatttgcccaccagtcgagaacagaaaagaaggttttgtctttggtcttcagaatctgttttatatggagtcccggcttgagtggttatttttgcccgtaacgctgcttctgaatattgatggcagcgttgctcgttatattgcgatgcagaccagtaaaatcccgcaatggccgcaggaggtacaggatgcctgtaagcctgatattgatgactccgtgaatgtcagcgctgataacaatccgaaagatatgtggcgactggtatttgcgaatcagaagtatgaagactggaaagcgttgtatgaaaaaatggaatgtgcgacgaacagaattcatgcggcgctggcggaacgttataacgtgtga

SEQ ID NO: 146443 - DNA, 207 bp, Enterobacter cloacae
atgaccaagaagcatctggttgcagacgatgcagccgcctatctcaatatcagccgcgctcgatttttcgatttccgtcgattcgttccaacgttcccgaagcccgtcaaagttcgcctcaacgagggcagaccgcgccttgtgtggacacctgaacagctcgacgctttcgcgttggctttttggggggatcgctcacatgggtaa

SEQ ID NO: 146444 - DNA, 381 bp, Enterobacter cloacae
atgggtaatctgaccagaaccgaagtatccaagctgatccggaacaagctgttgaacggcggcaagctgacaccgaagcaacttgaccggattttgcagaaatacggaaatcacgaacgtagccgcgttctggagcttttgcgctgtaagtggggtatacccattaccacaggctcgaaaggctgttacagcatcactgagagcgatttaagacgatttgccgatgaccccgatgatgttctatctggctggaaggaaaacgcgaaaaagaatcgtgagtatcgccagctttatcggtttgttacggcgtttactggattgaccggaatcagcagtgagacaagacgagaggtgctggcagcagtgaaagccagaatttaa

SEQ ID NO: 146445 - DNA, 1005 bp, Enterobacter cloacae
atgccgggcaagtcaacgaaggtcgacggctggactgaaaagacccttcggggatttaaagattttgttcgaagcattgaccaaagcaacttcattggcggacacgtatcagcgattaccctaacgacaggaaaacgcccatctcctgagttgtttaagaaaatgatcgccgccgtaaccaatgagctaaacaaaatgacgggcggaaaatgggtctactgtattgaaaaaaccaagaaccagaaggctccgcacgttcacttaattgccgtgttccctgattcatgcggtgatattgatgcaaagaaagtaattgcagcctggtttaaatgggcgatgaaatcgaatctcgttccgtcgattgaaaatcaagatgcacgggacgcatggtccccagagggctggatgcgctacatggcgaagcgtgatagcaagttgatcatacacggcacaaaggagctttccgtaaccaaaggctgtttgccgggagtgcgtatgtggggtcatggtgacgggtggtcgctatctcgtgaagatatcgatttaactgacggagctcaccgcgtcataacgtccatggctgacactgctatcgacatccagttacgtgataaaggtttgcgggataaggttgtatcttcccggaaaaggcttgagagatacggtagcgcggctattgtcgccccacggtctttccgaccgtcggagatgggcgtttccattatcaaagagctggctgcaaatccgggtcttgtttttggggtaaacgggataggctttcgccctgaaagccaccgcgaatgcgaaattctacgcagaatgcttccattgcaaatcgccagggaaattactcaggaagagttcgagtttctgtatgacgaaattactgaacattacgacgaagagatgaaagacatgttggcagacatgcgggaggcagaaatggaggacaagcgtcggtccggcgatattcatgagcaagcgcatgatgccgagtggatgtga

SEQ ID NO: 146446 - DNA, 213 bp, Enterobacter cloacae
atgaaaagtaaaaccggtgattcttgggctgaattttttgctgaagtggaacgtgaaaccgataaagaaattgctgaagtgagtaggcaactggcattaagcgaagaggaagataaggcgcttcttgcttctctcgaagctgaaccgctgccggagttggagttggagttggatttggagctggatcttctggatattgatttcgattggtga

SEQ ID NO: 146447 - DNA, 648 bp, Enterobacter cloacae
atgaacatcatgaaatccagccgtgtttatgcctacctacgtgcctccacaacagaacaggacgccagccgcgccaaagaatctttgcaggagttcgccaaagaacacggctacacaatcgccgctgaatttatcgagaacgagagcggggcgagcctcaaacgtccagagttgtttagtctgctgaaagtggcgcaaccgggcgacgtgctgttagttgaacaggtagaccgtctgagtcgtttaaacgctgacgactggcagagcctacgccagatgataggcagcaaagggattcgagttgtagcgttagacctgccaacatcgcacatgttgcttaatacgggtgacgagttcactgggcgtatgtttgaagcactcaattcgatgatgctcgacatgctggcggcaatagcccgcaaagattacacggatcgccaacgtcgtcaggctgaaggtattaagaaagccaaagaacagggagtatacaaaggtcgtccagcaaacgagaagttgcaccgacaaatactggcgctgcgtcaagcagggcactcttatagccagatacaggagttaactggtgccgcacggacaaccattagcaaagtgattaacggcaagaatggcactgttgacccatctgtttaa

SEQ ID NO: 146448 - DNA, 441 bp, Enterobacter cloacae
atgactacttattggcacatgcagattcaccctgatgacgttagtttctctgatgagcatttacatgcgattctggaacagagaagcataatcggtgttggggagtgggaaaaaggacaacctaccatatataagttcaacaatatcatgaaggtaaatgatattgttgctatcaaaaaaggggctaagctgatcgctttagttcaaataattggcggtgcttatcaggttactgatgatgatagtcccatcactggatggattgagcatcgtcgtcctatccgagttcttgactgggagttatggggaagagagttacctcagccaagaggtacattagagcgttgtgcttctgatgttgagacgaccaatattattaaagactggcattcgcgcgtgaatatctcttttcgtaagcgtggcatacctacttccgtctag

SEQ ID NO: 146449 - DNA, 1008 bp, Enterobacter cloacae
atgaaatttttagtcactggagctgcaggcttcatcggcttccatgtatgtcagcgcctgctggagtctggtcatgaggttgttggcatcgacaacatgaatgactattacgatgttagcctcaaacaagcgcgtctggatctcctgaaaacacctttgttcagtttttataaaattgatctcgctgaacgggtaaacatggagcaactttttgcgacagagaaatttaatcgagtcattcacctcgcagcgcaagcaggggtacgttattcgctggaaaacccacatgcctatgctgacgctaacctgatggggttcctgaatatcctcgaaggttgtcgtcatactaaagttgagcatctggtctacgcatcatccagttctgtttatggcttaaaccgtaagatgccgttctcaactgacgactcggtggatcatccggtatcgctttacgcggcgactaaaaaagccaacgagttgatggcacatacttatgcgcacctgtatggtattccgacaaccgggctacgtttctttaccgtctatggtccctgggggcgcccggacatggcattgttcaaatttacgaaagccatgctcgaaggtcaaagtatcgacgtctacaactacggaaaaatgaagcgagacttcacctatattgatgacatcgtcgaagctattgttcgtattcaggatgtcattccgcagccagatccaaactggacggttgaagctggctcaccggcaaccagttctgctccgtatcgggtatataatattggcaatagctcccccgttgaattaatggactacattaccgcccttgaagaggctatgggcatggaagcgaagaaaaatatgatgccaatgcaaccgggcgatgtactggagacaagcgctgaaacgcagccgctgtatgatctggttggtttcagaccgcaaactacggtcaaacaaggcgtgaagaactttgtggattggtataaagaatactataccggttgttag

SEQ ID NO: 146450 - DNA, 153 bp, Enterobacter cloacae
atgaaggaagatgagttttttaactctcgtgttattcgtgatttagaggagtttaaaaaagaatcagatgtaattatctctaaccgtatggctgaagagttgacggatgtgaaggataaagtatacacacgagatctatttggtagtgattaa

SEQ ID NO: 146451 - DNA, 1797 bp, Enterobacter cloacae
atggacgctttcgatcaaattcagaagaaagccaaaggcattaaagaccctacgttgaacatgaaaagattcagccaggggctaaaatctgctgaaagggaactcgataagctgaataagaaagcgtcaaagcctcgtagcaacgatgaacgagaaaaggcaagggcagctaaggcgcaagcccgtgtagaggctcaggcagcgaaagaggccgcaagaaacgcacagcgccgtgaacgggctgaattgaagctcttggacactgccagcagctttaagagtatgcagcaccttaccaacgtcgaattaacccaggcggcactggcagcgtcacggatcactaaggcttatgcagcaggtacaatttcgctccaacgtcagaccagcgagcttaagcgcttacagcagagctacagacgcattaacgcagagcgtagggcagcggcaaaggcgggaggagctaacgctcttgctggcggtggtaaagctacaggggcgatctctggctctctgatgggattaggcactggtgcgcttgctggcgctggtatcggtgcggcggcttacggtgcttattcatggggaaaagatgctgtaacagcccaggaagagcgtagcgagattgtcgcccgtgcgaagttgggcggggtggattacaacgttttacaggcactttcgcagtatgccacggctaacgggattgattccggtatggggctgcaagggcaacggaagttgctggactctgggaaggacatctccgaaaagctggcagatagctacaccaatagcacctttgataagaagtctggacaatggaaaggcggctcggctccagtggatgcagccctgaacatgggattcacaaaaaaagacctgaaaggctttcaatcaaaccctttcgccttcgtttctgcttacaccaacaccatgcaggggaaaggctattcacaagagcaaatccttcataatcttgaggatttagccgatgacctcggactctatcacaaggcattttctaatcaaggcaaggcgatcactgatcaggtggacgtgctcaagcgtaacgggcaatggctggacgaagcccagcaagatcagcttgtggcctatcgcaagtttaatcaggaaatggacattctcaacgatagccagaagttggcattcttcgaaggtttcatggagtctctcgaccctgcgacggttaaagagtttaaggaagctatgcaggaggcgttacccttcttcaaaggcttaggcaaggcggcgggtgatgttgtagatggcttaatgaagatgaccaactggatcactaagaagctgaatttcttgaacggtgacaacaccactaaagaggctgttagccagcactacggcactacgtcagcacctgcacaacctggtgataatgctacagcgaatagctatggggcaagccagccgcgccaggacggcacacaccaacataatgtgtttgatacggtgcgcgagtggtggaatggcacaggcgatgctaaagacgtgagcagttacgcacagggcgctaacggtgattattctcctgtctcgatgttgaaacaatccgcagcggctacagcaacaccgccagctcataatacagtggtgcagccagtggtattacaaaataacttaccggaaggaatgatctctctcactatttcccctgatccgacattcggaaacatgctaaatgcgagcgtagatcagcgtattaatcagaacaatcagcgcatggtgcttgctgtttcctctggacaatcatcaacgggcgggtaa

SEQ ID NO: 146452 - DNA, 1212 bp, Enterobacter cloacae
atgcctgttgatctctcctgtattccagctcgagcaaaaagacaagccgcaccttcttttaagcgctgggtgatgttcctgatggtgcttattgtggccggagcggggatcatcgtctatttctggcctaccagttcgcccactcatacggctactttctggttttgttttcttggaatccccttggctgccggtggggttgcattttcgtttcgctggctgttttatcttgcaggagaatggctggcagatggctgggatgcggccagggagtgggatcttgctcaggatattcggtccggccagcgtagcctcggtatgttaggttatgtagttcatttgccgcatgtcatttcgtctgaatccatttctcaacagatgcaaatacctgaaggtatcatattgcctaccaaggtggatgagaatagcgagttgcttatccaccacgccagttttagcgatatgggattacctgtgctggtaagagtgaaggaacggataaatttgttgttaagggagactgcgctacaaaacgcatttcaacacatgcccgaaaagtccccccttgctgtgttatttcagttcagcccggatatatctatatcacccgaagaactttgtgaaatacagctattggttcaaaacagcattggttaccctttctgtattacttttatcagcggagaaggattacaggcgattgatgcgtggcttgatagaccagatacgatgcaaaccctgcttgtcattaccatgaatcttacggaaaaaatcgtggagggtggcggggaagcggcggcagcactattgatgagttcatcagaaagacccgaggtaaaccggaacgttgtggttcagatccatcgacctgaacaaatgaagactacgcaggaaatgagtcgcgcgcttctacaggcgttacactggggagatactactcaggaagagataaaacatatctggttaacgggtacgggtataagcaataaagcaaccgccttgctctcaaccgctggtgttcgattccctgtcgccggacaaccttgtgatattgatttaaaaaccggactgacgaggaatgtttcaccctggcttgctatagctgttgctgccgaccaggctgaacagtctaaatcaccacaacttgttatgtacgttcctgacgaaagtatatttccctggtttatgattgtttgccctgtagcgaaataa

SEQ ID NO: 146453 - DNA, 267 bp, Enterobacter cloacae
atgaaaggcattatccgtaaaaacgacaaactttcaagcggtggttatgtcactgtgggttctgaaaccatgaaatttggtggtatcggtgtggcgcataaggacgacccggtgagttgtccactggaagggcacagtccttcttttattgcagaaggccatccgacatttagggataatggcagacaggttgcctttcacggctataaatgtacctgcggatgtacactgatcgcttctttaagtaatgctactacgagtaaataa

SEQ ID NO: 146454 - DNA, 342 bp, Enterobacter cloacae
atgacaggatcggcagtcccacatcttttccaacgtgacgtaaaagagtttgttctagaagttccaccattaaaagaacaacacgaaatcgtccgtcgcgtcgaacagctctttgcttacgccgataccattgaaaagcaggtcaacaatgccttagcccgcgtcaacaatctcacccagtcgatcctggcgaaggccttccgcggcgagcttaccgcccagtggcgtgctgaaaacccggatctcatcagcggtgaaaacagcgccgccgcgctgctggaaaaaattaaggccgaacgcgctgccagcggcggtaaaaaagccgcgcataaaaaagcgtaa

SEQ ID NO: 146455 - DNA, 1698 bp, Enterobacter cloacae
atgttgaacgcaaacgatgcgccgaaaagtatggaagcccactacccgccgcgtccgggaaaagcggatcgcgacagccagaatcaacgtctaatttgccccggttcgacggcgctcatgaagaacgtcacgctgggggcattggcgcgaacggatgtctttgaaatggttctacgcaagccgcaaaacggtgaatatctgccggatagcacggaagaaggccggattgttgccatgactctggcggttgccctacgtcaggcgctggccggggttttgggtatctccgcggcagaactgggctacgccgtgcgtccggtcagactggcagatggacaatcggtattagccgttcaacttcacgatgtgattagcggtggtgcgggttttgcatccagtgcgccgatgcacattgaggccattctgcggggaatggtgaagcagttgggttgccgccactgcgatacagcatgcagtgaatgcctcctcgactcccagacacgccacgatcacgatttgctggatcgtaaagcggcacagacatggcttggtgatgacttctcgtactacatcggtttgcctgatgaagagacattctcactaccggatgcccgctactgcccgggagccattggcgatacccttcgtcgggcgattaacgagggagctgaaaaactcacactgtgggtgaacgggccactcaatgagtgggatctttatgcccgtcaattccgggcggctattcagaactaccggattaaagacaatgttgcggtcgaccttgtcattcctgctggcgtcgatgatccggagctgttgcacgaactttcgcagtttactgctttgggcgtgcgcttgtgtcatagcgaacagactctggaattgccgattgtggcgcaaatcgcctttgccgatcgcgtaatgacgctggcttcacgcagccagcaggcaactaccccagggccaggctggcacctgaatgacaaactggtcgttcgcagcctcggctataaaacggtaaaactgaacgagtttgtactgccggggaaagcagcgaacgctgttgagcgtgtaaaagacatagagattcataaacagttaaatggtccactttcgcagttcggacaacgcttctgggacgcgctgtttaacagccatgaagaggcacagtcgctgatgaaaaaccagcaaattacccacgttcactataccgatcgctatctgcaaaacccggttgcgctggcgctgctgggggcgatcctgaaaccgctaaaaacaaagctgaccgatgatgctgaactggcgttggatacgttgtttaaatctaaagaacgttcaggaaatcgcccctctcatgactggatgagcgaagcggattttcaggatttcgccgaccagtggtttacagcggcaatgggcagagcggtagaactgacggtgttcgattcgccacgtgatattccgcatcatcgtaagctgacggtggcctttgagaatggtcagacgttgaagattcgcttcgatcagggaatgggatactggcgtatcgaattcccgtatgtatggcgtaattttgactttgccgatgacgtgacttatcagctcggaaaaatggcgcaagcctgccaggaaggcaaagtccttaatagcgaggagagctgggcaacggatgtgctggtagaggtgatggcgtcttaa

SEQ ID NO: 146456 - DNA, 174 bp, Enterobacter cloacae
atgaagttggttgaccaggacatgggattccgtgtcctttgccgattcatcttcactttcttctatatcaggaatgacaggatcagctgcttcctcaccctcagatttaactatctgcgtgtcattatcaatttcattatcactttcggctttcttctcaaaatcgtcggatga

SEQ ID NO: 146457 - DNA, 456 bp, Enterobacter cloacae
atgcctgagtatccgaggctgttcccaaatttcgaaccatctgaaaattattcaattagcgtaacagttgccgatagtcagtcgaataccaaaacctatactcagaagttcagttatctaccgaataaccttgtgcagttacataatctacgcacattatcggtcagttcgcctctcaaaacgacagatggcgtaccccttgcgtacctgtccactaacgttctgcgtaagacaaatggagaaattgctaaaggggtccagaacgcaacgctgactgtgcggaaggatgcagccttcggtattaaatttaacggggcacaggcggctccaggtgagtcagttgaggtgcaaatagatatgggccagggggataatcttctgttacccgtttatccttccgaaaatgggaaagttggcacctcagaattcatgattcagatcgacgagttgaagtaa

SEQ ID NO: 146458 - DNA, 135 bp, Enterobacter cloacae
atgagtcatcaacttaccttcgccgacagtgaattcagcagtaagcgccgtcagaccagaaaagagattttcttgtcccgcatggagcagattctgccatggcaaaacatggtggaagtcatcgagccgttttaa

SEQ ID NO: 146459 - DNA, 216 bp, Enterobacter cloacae
atgggcaaacttggcgaaaacgtaccactagtcatcgacaaagccgtcgattttatggcgtccagtcaggcatttatggagtatctgaagaaatcacctcgcctgagtcacgtaccggaagagatcccggaagagaaagcggcgatgtttctggagcgattagaacactaccgcaaactttatcagccggtcgagaaccaggcgaaagaagtttga

SEQ ID NO: 146460 - DNA, 525 bp, Enterobacter cloacae
atggaagaaacacaggcttttgaaaaccgtgtgcttgagcgtctgaatgctggcaaaaccgtcagaagcttcttgattgccgccgtcgagttactgaccgaggcggtcaatattctggtgcttcaggtgttccgcaaagacgattatgcggtgaaatacgccgtcgaaccgctgctggacggtagcggcccgctgggcgatctttcggtccggctcaagcttatctatgggctgggcgtgattagccgtcatgagtatgaagatgcggagctgcagatggcgctgcgtgaagagctgaaccatgacggcagcgaatatgccttcacggatgatgaaattcttgggccgctgggtgagctgcactgcgtctctgccctgccgcccgcgccgctctttgacgatagcgatgccgacctgctggcaatgcaaaaacagcgctatcaacaggtcgttcgctcaacgatggtactttctctgaccgagctgatttcccgaatcagcttgaaaaaagcctttcagaaataa

SEQ ID NO: 146461 - DNA, 213 bp, Enterobacter cloacae
atgtacaccgccgcggtggatgaggcgatgcgcccctgccttacggcccccagaagatactccctgaagccatatgtagggctttggtatttcaacgttcccggggtgaaagggtcaagtccgttatcctccagccaccttatccagcgtaaaaatgcccgggctaaaggctttaaatccctggcctgcaggatagctttatccataagataa

SEQ ID NO: 146462 - DNA, 588 bp, Enterobacter cloacae
atggaagaggctaagaccctcggtcttcctttctataaatttcatcctggccagccagcatcttcggtctgtattgatgtctgcaacacctatactaatgtttctgacctaacatctcgtcttttgagcttggtgacagttcccggtgaggttaacccattcgttcagtatgccaaggctctcgtttccaatgtgatttccgggctttcttacatagagaaaaagccttctatttatctgattcacaagaacatgaaaagccacatgtctattgtgaatcttacagtcaaggtaatggagtcatgttacgcgagatattatggttacgatgtctggaccgaaaaagttaagtacgtcgctaacgataccttgccggtacgtttcaagcgtctcgctgaatggtttacggctcatttcatgaattacgaggggtccgaacaaatagactggttagatactgtttcccagcttattgattactcaatgtccgacccagagcatatggctaaaatgaccgcaggtattatgcctgttttcgatatgctcattgaaaaacctttaaatgagcatcatcaagagaaattgtaa

SEQ ID NO: 146463 - DNA, 234 bp, Enterobacter cloacae
atgacgatgcttcatctcaaaacaataagtaacgaaagtatcatgctaaaaaaagatgatattatcctaataaaatcatatggtaacgaaaaaacaaaaatatttttacggggtgtgaatgaggttctaatgattgacgcgagctttgaagaggtaaagtttgctatcaataatgaccttcaggatcttcagggaatgcaggcagtaagcgcaccgctaaaaatagcaacctga

SEQ ID NO: 146464 - DNA, 279 bp, Enterobacter cloacae
atgcgcgttgccgaaagcatcatcctcgatgccctcactcgcggaggatgcatcaaaaccttttaccgcatatcctcacggcaggctgctgaatcggccacgcggatacctgaggggtatattctggagtcgcccggcgagccggaagatattgtgctcagccatgcggactttcatgcactggagaagcagctggagcagaaggaaacctgggagcaggtggtcggtgtgacctgttttggtggggcaacctggcagctgagagccgggtccgtgtga

SEQ ID NO: 146465 - DNA, 354 bp, Enterobacter cloacae
  misc_feature (314)..(323): n is a, c, g, or t
atgatcctagatgccagttatacattattagtcgcatgtatcgcgctactcataggaatgtttgtcgtaaaatttaccccgttcctacaaaaaaaccacataccagaagccgtcgttggtggctttattgttgcaattgttctgttaattattgataaaacatcaggttattcgtttacttttgatgcttcattgcaaagtttattaatgctcacattcttttcctctatcgggctaagttctgacttttctcgactgattaaaggaggaaagccgttagttctattaactattgcagtaacgatcctaatcgnnnnnnnnnnccgcatagtcccttttttatcgctgcgttga

SEQ ID NO: 146466 - DNA, 726 bp, Enterobacter cloacae
atggcttgtgcaacacttggattagtgttgggtggtttagttggcggccctgttgcccgtcatcttttgaaaaaggtctctattcctaaaacaaccgagcaagagcgcgacactatcgttgaagcttttgagcaaccaagcgtcaaaagaaaaatcaatgcaaataacgttattgaaaccatttcaatgctgattatctgtattgttgttggtggctatatcagtgcattgtttaaagatacttttctgcaactgcctacttttgtctggtgtttatttgtcggtattattatccgtaatacactgactcatgtatttaaacacgaagtgtttgagccgaccgtcgatgtattaggtagcgttgctttatcgcttttcttggcaatggcgttaatgtcattaaaatttggtcaattggcaagcatggcagggccagtattaattatcattgctgtacaaactgttgtcatggtgctatttgcctgctttatcaccttcaaaatgatgggcaaagattatgatgctgtcgtgatcagcgcgggtcactgtggctttggtatgggagcaacaccaacagcaattgcgaatatgcaaacagtcacaaaagcatttggaccatcacataaagctttccttgtcgttcctatggtcggtgcctttattgttgatatttcaaacagtatcttaattaaaatatttattgaaattggtacatactttacctaa

SEQ ID NO: 146467 - DNA, 903 bp, Enterobacter cloacae
  misc_feature (755)..(764): n is a, c, g, or t
atgaaaaaagctctcattactggtgttactggacaagatggttcctaccttgctgagtttttattagaaaaaggatatgaagtacatggcattaaacgacgcgcatcatcgttaaacaccgagcgggttgatcatatataccaagatcttcatgctgagaataagagattttacttacactatggtgaccttactgacacatctaaccttgtgagacttattcaagaaattaaaccagatgaagtttacaaccttggagctcaatcgcatgtagctgtgtcatttgaatcgccagagtacactgctgacgttgatgctatagggactcttcgtttactggaagctataagaatatgtggtcttgaaaaacacactcgattctatcaagcttctacttccgaattgtacggtttagtacaggaaatacctcaaaaagaaactacaccgttctaccctcgctctccttatgctgttgcgaaattgtatgcgtattggataactgtcaactatcgagagtcttacggaatgtacgcttgcaacggaatattatttaatcatgaatctccgcgtcgtggtgaaactttcgttacccgaaaaattacccgtgcaattgcaaatatttcgcaaggtatagaaagttgcctttatctaggtaatatggattcacttcgtgactggggacatgctaaagattacgtcagaatgcagtggatgatgttacaacaggaaaaacctgaagattttgttattgcaannnnnnnnnnacgggtaagcagattactgtgcgcgagtttgttcgaatgtcggcaaaagaggctggtattgaaattgaatttacgggtactggtgtcgacgaaattgctactgttattgctaaaacttctgaatgtgctacaggtgtaa

SEQ ID NO: 146468 - DNA, 522 bp, Enterobacter cloacae
  misc_feature (424)..(433): n is a, c, g, or t
atggctttagcgctatacacaataatctcgataagattgacggatacatacctaatgttctatttccacacatgcaagaccacgagtgggcgaagatttgttgagcaaaacgctccttttctaagtagggcaaatggtccgaaaaaatggcaatggttatcccaaggttattacttttggaccgatgtagattactttgcccatatttgggggcgagattcatataataatgattatgctatagttcgctgccaaattacgattaactctgatatagttttagacttggctgccaacgttgaacatagtctatatttcaaaggacttgcagaagcgtatcagaaaaaaatacaaaaagttaatccaaatgaaataccaacagtttctacagtaatagagcattatagaaaagcagcggaaaaannnnnnnnnnttatgactactatacctcgattacagttctgcttatttcagtcttcaagaaacgctattacatcaaaagaaatatatcatttctcgtaa

SEQ ID NO: 146469 - DNA, 771 bp, Enterobacter cloacae
atgctggagtccctggggctatgtgtcagtcagctggagtgtggcccctttcttgaaggcacgatgcttcaaaaatcgcagtttgatattggtaaaagcaacacaaatcagccaatgacagcaactgaagccggattttacgatgttcatctttgggagttcccaatcatgacaatgctcaaattactgattattggcgagtgcactgctgaaccctatatagatgccagcctgacctatataagcgaagtggaccctatgtgggaaagtgatctgcttacactcgtcctgaatccagaggcagtagtttttgcaaacccaattgcctcaatggtgtgcgctgctgactgtgtagcagtaacagcaggaaaggataatctcgctgcatacttttgtgccggatgcgatggcaacctttatccattaaccggccacatttacgcaaatgatgacgctgtaaggacgagttcactgataacccagcgtcttctgactaaactacatcgccagggaatgctgatgcgaacgatgggagcagacgcaatgtgtgagaaaacgtgggaatactttacacctcgttcccagtatcggctttcaatgcttttcccaactcctgaggcgaaagggccggattgctgtcatcgtcttggtgattcggtacatgactggtcaacccttaaaggtgggcgcaaaaaaataggcaatgataattatgtctatatgttgtggcgttacaatgactgttgcgtcagatatataccaggcgcttga

SEQ ID NO: 146470 - DNA, 345 bp, Enterobacter cloacae
atgtcatcaactcagtttgtacctttcagttttgaaccagtacaactcaacttcaataaccacaacaccatgaggttttacaagtacatcttcgagatgaaccagctcatgaacacaatgtatgagtacaactcattgggtttactggctgtaagcgactatccggttatgtctcacaacattataaagagtattaatttatatgttgagaatgtgaaaaagactctgaatgtttctcgccgtaaggatgggccatacagtccagcagagttcatcaccaaagtaatgcaatataaaagtgtgcaggcatacattgcagccgaactgtcaggcaaacgtcgataa

SEQ ID NO: 146471 - DNA, 1473 bp, Enterobacter cloacae
atgattagtcatgctttggaaaaaaaaactcattttgaatggatgctattcacatttgttttcgctgtagtggctgtgttttttacggttatccatccggtgacaatcatctcaggtgatgagtggattaacctttcttccggtaggcaggcatatccgcaatggggaggttttaatccgattaaggttgtgcctgaagtagctttccctctctttggtaacatagcctcatcgctcctaatgccacttggatttagtttccttgaagctattgcctattttacagcgatgttagttgcaattcttgttgtggcgttcctttatcaattctaccttatgatgagagaggctgtaggcctgtcaacatatacaagctcagcgatggtgatattctatttactgtgcatgtttggcctattcagaactcttaacaataataacagcccatacctgttatgggagcaaaaccttacttgttattatcactacattatcccagcgcttataaacggaactctagcactttacgttttgcgaatgtcgccctcattaaagtctttcttttacgaaaaagctatattttctgggatattgatatttgccatttatctgtgtgtgttttcgaatatattcgctagtattgtgcttgctgtcatgtgcggagttatacttctgctgaaacttattaacaacagattcaaaattgttgagacagttaaggcttaccctttccactgtatcactttgataatgtgggtcatttctgctgtgtttgaaatgaacggaggaagagcagatcgcatgtcaaaagatcacctagatatttcaggtacggtcaactcgttttactcactacttaaactaatagaccgaacatttttcgttgttctggctgttggattggtttgcggcgtagtgttcttgctgagaaaaaaatcatgtgaagggaaacgatatgctttctgtgtatcagtaattactggagctattaccacattagcccttattttggtgtgcgcaaaagctagcgcaaactacgcgactcgaccagtagcaatgtggggtacatttatgtacttaatagtggcagctagcataggacttggatacatcatcgatcgctttgaggctgttcaatatattgtcccaataattttactgtgcttggttaataaggctacagatcaatcacattctttgcgcgagtctcacaatggaaacattcctttctccgtggcaaatgcaattggacaagatatgattgatcagattcagagagctgttgaaagcaatcagaggacgatgacattgcatgtccctaagggtgacaataatgataactggcctttccccgtgaccagaggaaaagcaatctctgagacgctgaagtcaaatggattaatacctcgtaatatcgagataaaaatccaacctgacagagaaatgaacgctaaatatggtatgccgatctga

SEQ ID NO: 146472 - DNA, 1119 bp, Enterobacter cloacae
atgaataacaaaattcaatccatacacctgctgcgtggcgtagctgttatttttgtcgtcctatatcatttcaaaggatacctgaatgatgtttatgtccagagggatttaggtcaaatcctttttgggtctggtggttttggagttgaccttttctttatgataagtggattcattatctcgctttcgactcaaaacgttacatcgaaagcagtatttgcagtcaggcgctttttcagaatatatcccgcatttatagttgttttcgtggttggcgcggttgctgtttatcgcttttacccgtcagagaatctactgaggggattgttcttcatccatagagattactcaaatgcatcccctggttttggctataatgttcttggcccagcatggacgctcacatatgagatatacttctatacattgtttgctgtggcaatggctataagccataaatacagaactgccattgcatcaatactcttggttgcacctatatttatacttcaattgtactttgatgggtccatttcaataaatggtgatgccgctgccagtattcctgtcgtacaccatgcctatgggttcctgaggtttatttcttcaccaatgcttgtagagttcgtagtcggaatgtttttctatgagttatacaaaaacatatccatcaacacaagcaaaggtgtatctaagtttattttattggtttgcgttggattctttgccacgaattacttcagtggacatttcaatggatttggaatggataaggcgggggtgatttctgcggtgcttctttttggatttctgctctatgataaatcagttggttttggtgagaacagattgtttggattccttgctgacgtatcattttcagtttatatatcgcactatctttttataaacattgctaacttttataaacctgagttctttatgactacaaatggacttggtagattgttccttatgcttaccataacaatggcagctggaacaattcttcatttttatattgaaaagccattcataaaacttggaaagaaaatagagaaacatatattttacgttaaaaatgaaagagcaagaagggtggaaatcccccgcaattaa

SEQ ID NO: 146473 - DNA, 372 bp, Enterobacter cloacae
atgaatcagcttgatggacttcagtttgacgccaagcaggacctgattgtttcagtaggtgacctggtagatcgcggcaatgaaaacgttgaatgcctggagttaattacattcccatggttcaaggcagtgcgaggcaaccacgagcaaatgatgattgacggcctatcagagcatggaaacgtgaatcactggcttgttaatggcggaggttggttctttaacctcgattacgacaaagaaattctggcaaaggctctggttcataaagctgtagagttgccacttgttattgagattgagacgtgcggtaaaaaagtagtcgtttgtcatgctgactatttatatccgcatggacacgagcttgcctga

SEQ ID NO: 146474 - DNA, 1599 bp, Enterobacter cloacae
ttgaaatttgcacaagctctcagcattctctcaaagtcttcaccgtatgcggtcagtaccgagagagagcactatcaagatcacctcgttagattcaagagatacatatacatcacgacagatatagaagcggattttaaaaaagcactcctatctgctaagtccaatcaagtcatcttcctatgcggaagtagtggtgatggcaagtctgagatcttgacgcagtacagccaaaagcacaaagtgactcatgacttccatttggatgcgactcacagcttcaatccaagccagacagccattcaagctcttgatcaaagattcacccagttcaagcaaagtcataaaccacttgttgtgggtattaacgttggtatgctcggcaattatgcagaagaaggttccaaagagcatagcgacatcaaaaaggtgctcagagactttctctctcgtaagcgatcagcaattccaaagcagtacgtattcttggattttgaagactatccaaaattcaccttcaatgctgagggctgtgcatcagactttgcagaaaaatttctaaaaagattgacagcacaaacgcttgagaatcctttctatgcgctttatgacaaagagctcaaatctctaggtcatactcgcctgacggcaaactatgcgctgctgagtcgcccttcagttcaggaatctctgatcggcttattactcaaagcccgtcttatcaaagatcagttcctcacggcccgagcgttactggatttcattttccagttgctcgctgcggatggctacttgttcgacaacttgtttgcaggcagtgataacgagctgttatcccgtatacagggttttgacccaagtaatctgcacacgcgcaccgtcgatgagtttgtgcttcagcatgagctgggcattgaagatgagcgtttcaatgcgtttagatctaaaattaacgagcttggtttttacgaggtaaccaaagcaacgtcttttcttcgccttttctatttgcttcggggtgacaaagagctcagcaatgagtttgtaacgcctatccaaaacgagttcacaaacaatctggtagaaacctatgcatctgtctggatgcgacatcgtgatttcgatggttcaggaaagatgcgcaaactgcttggcagtttctacaaagaaacgctgatcgcagcgcttcaccgctattgtaatcgtcatgccccaacactcgacaaagacgagtatttagtttctgagcttaatggctacaaaacggcggcgtctcttgaagttaaggccgatttttcagcaatacaaaacagtacactcgaaaaaataggcaccttcaatgtgtatctgaaagtcgatgaacaatcgcttaagccaatgccaattagcgtcaaactacttgagcttttggtcaagattgggcaggggtatcgccctaacaagcacgacaaaaatgctgttttgttacttgatgaagcattggaacagatgctgacagtagctaagcaaaaagagaccttttttattctcaagggtgataagcgctacaaaatcgtgaaagaagaaagtgactattttgaagtgagtggtatgcactaa

SEQ ID NO: 146475 - DNA, 426 bp, Enterobacter cloacae
atgacgaccgataatttcacattaccgataaaggccggtttgccacaaacggtagctgataagttccaaaataagaatacgttgagcagttacattcccattcgtacgcaaggcaatgattttgactggtcatcagtcgtgggcttagtcctgcgtggattactttgtaaaaaaatagaaaagtacaattaccaagattttactgcggattgcaaaaacaacttacaaaacaaattgggtgaagaggcattttggagtgtacttgaagatatgtatttcactaatgaaaatatattctcggtaacccctgagtttctgttgtttaagagccagaagagtcaagataacaagtacacgcgcgacatgcgaatggcatccttgtttattaacttacttcaaggacagcaaattgaacgattacaatag

SEQ ID NO: 146476 - DNA, 852 bp, Enterobacter cloacae
gtgaccgagtcaccatatttgccctatatagcagaggcgtttcaacgtgacctcgagtttttaactggttatccgaaatacctgttggatgagttcgagcgtttcttggcattctatggctttgcttacacggctcaattaagcctatcgttgtcggattggaaaacaggtgaagccccaaccgcgaaaccgctgtatttcatcatggatcatgagcgcgccagcagtgaacgtatccatatcaaaaagcacggttacaagctttttagcgaatcgtctttcaagctgtttcccttcctctctatgctggaaaatcttcaaccaaacccagaaaaattaaaaaaacctttgtggcaattggcaaaggatattaagagttcagagcggagtgatctagctgagtatattgaaaattacgcaaaaatgtttcgccacaacagaaaacttgaaacagcaatacctgaaaaagcagaaaccgcaattgattggttggaatatgctttgaagcttgctgaagaacagttcagagaccctaaaaccgaccgtccggggactatcaaaaaatatattaaagcggttgaagaaaacatggctactggcttcgtgcaagctcgtggtcgctctggtcgggtgttagtactcactcaagaccacattattttgcttactaacctagtggtgggtaaggaagaaaagcttcgcttccatgagctgataattggcttacagcaaagggggatttttgttgataagcagacagaacaagagcttattaagttctatgagcgaattggcaacgttgaacgcatgagtgatagtggggatgcagtgtatgtgcgcaaaacaatttga

SEQ ID NO: 146477 - DNA, 5049 bp, Enterobacter cloacae
atgtgcgcaaaacaatttgaatcgtttctggttgagcagtttttactgcacgcgaaaggaaacatccgcgcaggctatcgctaccagtttaactctcctgaccatgctaatagtcagcgacttttcgatgcgctcttagcgcgaaaaggaggagagagcgaagatcgcaatggtgtagcgctgagctatttagacctagaagactgcaaagtggtgccagtgcttcatagcgaagatgcgtgtgaaacgggctttaccgaaaactacatctctaatttgcgtgacgaaatagcaagccaggaaggtccgttgaagggctgtgcactggtggtgattcacaatagtcgcctagatactctcatcaactcggcggaagatcttggccagtctggccaggtgtggagtccagagaacatcaaattcgctcttagtggctttattgagcaatctgacaaatctcgagacgtttcgctttgccttttggacgaccaatttgacgcgattttggaagatggtgcgaccatgttcggtttcgagtctttatacaaggcagttgaggatggcgagctgtgtttcagcgagctaggcatgtttgaggatccttttgttgctgagttatcgggcaataaaaaacagatcaaacagcgcctagaagaaaaccgtactctttaccaagagttgtcgtttgaagtagagcattttggtcagcaactcgaagaaaggctgaaaggctttagtagtaggtttatcaaagaacatttttctgacgatggttggaaagatgtggagtttgaaacttatcgagaagagatcaaaaggaataagattcagaaccttaagcatgaaggtgaagacgagaccaataatgcgcaagtgattggtcgctacccaaaagaaactaaagcaggattgcgtgaccgtcacttgattattgcactggaagaaggacaaagtgagtttgaacttaaactgagcttttctggcatcagcgatttaagaaaagagcagtttaaagtctcgccagcgaatgcacttggcaaacaagaagtcatcagcacgcgcctaactagtaaaggggcaaacgctactctagcagctagttatgccaatgagcctttgtttttcacgctagcattgaagcgtgacaatacctctgaacaccataacttccgttgcttggttgtcagaaaaggcgagtttcacctcgaggcattcaaaaacattttcgccgttgagccttcaaaaaaacgccttaccttgaaaacggtagacaacagcttggttattaacccggcgctaactgcaaaccgaagcctagatgatgtcggtgaagtggttgacctcgcagaatttggtgttgtcgattttgaatctttggccaacgagtcagaagaaatcagctttgtggtgaaatcaggtgataattccctgacattttatattgagggtgaacaggtagaaagcagcctgtccttcccattgctgcttaaccaatctcgcttccacaaattgtttgacgatcacgtgtttggcgagctttatccgagtaaagacgttgtcgcgatcgatcatagtgaatttcgcgtcatggagccgcgcattagcctacttcgttgggaagagtgtttcgttcagcaaaagcaagtctacctagcggaatccaacagcatggcgttggaacagttaaggtctattgatgacggtcttcactcagcataccaagcactgtttgactatctagcgagccgacgaacaactatttcgttggtttcgtgggggcctatatttacggcactcgtgaaagcgaccgtggatgcattccttgattatttcaacgcgatcccaactggtggcatgcttaccaaagagcaaaagcttgtgatgcaaatcggtttggttcgcgagaatggtgaagaatattactcgccattccacccaatggtgttggcttactacttaaatctttgtaatgaaatgcaaaaagatgacagctttgctgacttgccaactgtcacgttcaatcgcttggggccaagtggactgcttccgtatgtctatcatcccaagcatgggtttgcctacaaccagcaagtaacagaaaacgggttttgggttaaaagtgtcccttaccagaaaagttgtctaaagttcgttcgcaagctggttaaagaaaagatcaacgagttccaaaaagcgtttctccacttgtttaccggctcagagaagagtgtgttggtgaatgccgtgaatcaagatcgtgcagaagagttattcctcggtttggttgactatgtaaaagataacctcgataaagcggcatcaattcatgtcaacctctacgatgatgagctggttttcaatgcatttgaccagtttgcagaaacgttcaattacgaagaattaaagtcttggttggaattggaccgagagaaagtgcgagaaaatgccgacaccattatcgatattctgcgaacccggctaacttacagcaagtttaccaatgctcaaagtgaacgcgaagggcaagcctactcgcacctgtcttttttcagaaacaacgacaacgtgaagttaacgaccttgagcgttgacgacatgcctagtggtattgcgtgtgatggtctgctgacgggcgacgcttctaaaagtgatgaaggctcatacttcactgcatttggtttgcaaaacgttcaatatagtaaccaaccacacttggaaatagcgaagtatgttggctcgttaatagaaccagcatttaagcccagcacacaatacacgggggccaatgctcctgctcttgcggtcagtgaagactttaaatctctgctagcgcgctcttatgacagctcgatttggaccaccatcatcgacccgaaagtgacgctagacttcttccacgccaatcaatgtatcgtgcttattcattattctgatcagtacaccagctcagccagctacgatgcgataaccgtgacggcacagcgtggtttgttcgaaagggtggttgcacaaagtggcggcaagcagattaacgagttcaatgccttcaatggtgattggctactgaagatgttgacttgcaacgacaccattcgcaaagagcgaactggcattatcggcgcctataaatttgcgacgtgtctggtgcaccaatctgatatcacctgggttccgctctcagttggtgaaatgatccgcgtgtcgggtaacatcggcctgaaaatgaccgacagtgacttctcacgcaatgtgcagagatataaaaaaggcgcgatttcagatgatatactgctggtgggctttaaagagggtaacctttatttgcttcctgtcgaagtgaaaacaggctccacgccagactacaaaaaagcagtacagcaagcgaatgagcttcgccgctatctaacagagcttttgagcgacgagacactggcgtcgaagctataccgaggcttgtttatccgccaagtgttgatgcaaatcgacaaataccgtctgtacaacgtattcagcaatgactatttcgaagccctgctggcagagaaagaagagtggctacgcggtaactacgcgattgcggagcttgagaactatccagcaggtctagtggttagccaccttgaaagcggaagctgtttcgaacctggctataacatgcaggatggcgtgttgaaggttgaccttcctatgtctttgctgccttcactggtgcaacacccgcttcaagtattaatgaacgaaaaggacatcgcacagatctgccatgtgccggcggagtatatgttggtggggcagacagctttgaaaaaaagagagtcgctcgttccattagacgttgtggtcgataagccagaggatttaaaaccgaacctccaaacagaggagccgtcaaagttagctgcagagccaaccccagattatgcgagtgaatgccgagttgaaattggtcagaatacgcttaccggcgaaaaagttttctgggagtacgggcacaaggatttagcaaaccgtcacctgatcatttttggtagctcagggcagggtaagacctactgtatacaaggtttgttgatgagcttggccgatgctcaaattcggtcgctggtgattgattatacaaacggattcttgccgaatcaccttgagccggagtttattgaacgaacaaatcctaaatccaatattctttgtaatgagccatttggtatgtcgccatttagagctcaaaagcaagattttggcgggatttttctcgaagagaagcctcatatggtggctggaagggtagcctctgtttttaacaaggtatattcgacaattggcgagcgccagatcgcagttctcaatgaagtgattgaatctggtgtccaacgatatggtagtgcttatagcttacagaatatgttggatgacctaaacgaggaagaaacagcaggaccagcacttgcaagcaagctggctcctcttgttaagtctaacttgttttcatctgacagtgataaaagttggaatgatgtgtttgagagtgaacatcaccgctcaacaattatgcaacttgcgtcgcttaaccacgatatttcaatgctttgtactgagtttttactttgggatctatactcctacgcatgtagttacggtagtaaggaaaaaccgattcctattgtattggatgaagtgcagaacctcgatcatcgcttggagagcccattgggcaaaatgttaacggaaggacgcaagtttggggtatccctaattctcgcgactcaaacgctaagtatgctgcgtaaagatgagcaagatcgtttattccaagcgtgtcacaagctgatttttgcaccagcaaaaacagagacaaagacgtacgcgaaaattcttgaactgagcatgccaggtacaaagcaggctgagtgggaaaagcaactaggagacctatccaaaggacagtgtttatcagttggctaccatttggataacggtcagttgaagatgagtgttaagaaagtgaaggtttcctccatgctatcccacctgaacaattctaagggttga

SEQ ID NO: 146478 - DNA, 360 bp, Enterobacter cloacae; identical to SEQ ID NO: 78915

SEQ ID NO: 146479 - DNA, 2001 bp, Enterobacter cloacae
gtgctcattaaacaactagtgttacataattttcgggtatttaacggtactcataccattgatctggcccccagaaagcgcccacacgatttgaatccacgacctattgtactgtttggtggtttaaacggcgccgggaaaacgtcgatcctatcagcgatccgtctagcactatatggtcggctggcgtttggccttgccactcaacaacaggaatatgtcgagcaacttagttcgttaattcacaacggtgcgtacgatattgaacaacctgaggaagccgctgtcgaattgacctttacctataataagggcggccatgaagcggaatttaccgttacgcgaacctggaaaaaaggtaagaaagatcgcctatctctgcaacaggatggacagccactcagtgagctggattacgatcagtgccagggatttcttaatgaattaatcccgcatggcattgccgatctgttcttttttgatggcgagaaaattgcggagctggcggaagatgaatccggcaatattttgcgtaccgcagtgcgccgtttattaggtctggatctgatatccaaactgcgtaatgacttaatgatttttgttaagcgccagcaatccagccagttggtgggttctcaacaacagcagattgcagagcttgaaaaacaaagtaaagaattggcctgccagactgaagagatactggaaagagccgattttgccaaatcgcggattgagtttatttctaaagatattatccgttatgaaggtttgctaaatgctcaggggggagcttttgcccagacaaaagcgcaggaaaagcagaaagttgatgcgttattgaaagataaggaacgtctggaaaaagcactgcgtcaggaatgtgatgggccgctaccttatgcgcttgcgcccactattttgtctcgtttactgcaacaaattactgatgaaacgcagattaaacgggcaaaaagctttgaaaaagagctgagccagtttttaacgcaactcagaaatgatattgcatttcgttctgagggaactggcaaaatagcagctgaagcgattaccgataatctaaaagagtatatggcaactaagcctaaaggcgatttgctgtttgatatctctgaacgtgaagccggtatgctccaacagtcgattgaacaagacagcaaaaaggcatggcaacgcttcgatctttaccgtacccagttatcagagactgaacagcagttagagcaggctgctgcaaatattgcccgcgccccggaagacgaccagttaatggagctctttgagaagctacgcgaactggataagcaacgtgaaaaacagcggcaaaaatatctttcattgctggaagatgctaaacgaattaagcaacagcaactggattgcgttcgtcaggtacaaaaaatgcatgatgttgcccgaagtcagcatggcttgagttgcgcctttaaaaacgctcaagaaacgattaatttactcgatcgatacagtgatgtattaacgcaggcaagagtgaaaacactgtcagcgaatttcgaaatagcctatcgcaaactggcccgtaaagaagatttacaacttagtgcgcacattaacccagagacgtttgacgtagagctgattgatgaacaaggatccgtcataaaacgtaagctgctttctgccggtgaaaagcaaatttatgcaattgctattcttgaggctttagcaaaaacctcaggccgtgatttaccggtgattatcgatacgccattaggacgtctggattctcagcatcgggataaactgattaaccactatttcccgtttgccagccatcaggtagtgctgctatctactgatacggaagtggatgagcgttattttgttgatcaattgcgtgatgatatctctcatgcttatgagattgtgtttaatgcacataccaaatcgtctgcactgaaacctggctatttctgggaattaactaaggaggcgatctga

SEQ ID NO: 146480 - DNA, 1635 bp, Enterobacter cloacae
atgagtacattaactcaggcctatgatctggccgactatgaagatttcataaacgaagagcaatttgctgggcgtactctcgctgattttgtctctgaagttcaacgtgtctattgcgcagataaacgcccttgggtaattggctacagtggcggtaaagactcatcagcagttattacccttgtttaccttgccttgatgggccttccgccggagatgcgttcgaaggatgtgtttgttgtttcctctgacacgctcgtagagacgccggttgtagtagatctcattaaaaaaacgatgatccagattgaagctggcgctaaacgcgacggcttaccgatcacacaacatgctgtaacgccaaaaaccaacgagacattctgggtaaacctgcttggtaaaggctatccggcgcctacccgtagtttccgttggtgtacagaacgaatgaaaatcaacccggtaagtgactttatcaaagaaaaggtcagccagtttgatgaagtgatagttgtcctcggctcacgtagtagcgagagtgcctcccgtgcgcaagtcattgcaaagcacaaaattgatggctcgcgcctggcccggcataccacgctggcaaatgcgtttatctatacccctattgatacctgggatgtagaagacgtctggaaactgctgcgcggcgcgttccgctatgccccggacgatattgatgagtgggaaagcccgtggggtggaaacaaccgtcctctgtggacgctatatatggactcttccgctcagggtgagtgtcccttggtgatcgatgaaagtaccccttcttgtggtaactcccgctttggctgctggacctgtaccgtggtcaccaaagataaagcgatggagagcctgatcaagaatggcgaagaatggatgtctccgctgctgaaataccgtgatctgctggcatttaccaccgatccagtaaataaagacacgtttcgcaactataaacgtcgtactggcaaggtcagttatcagtatgccaaagatggcgaagaaattagtgccgagcgtaaacatgttcctggcccctactggcttaagtatcgccagcagtggctaaaagagctgctggtaatcgagcgtgatttaaatgctcaaggccatacgattacgttaattacccaaccggagctgcatgctatccgtcaggaatggttgaaagatcctaatgaaccagactggtatgacacgctaccgggtatttaccgagaagtgtatcagcaggatttagactgggtagtggacgatcagtcgcgctttgacgccagcgatgcagatttgttgatacagatagctcagggatttgacgttgcacccgagatggtcatgaagctgattgaactggaagtgtcaatggaagggctaagccgtcgtcaggggatttttgacaaactcggtaccattctaaaacaggactggggtagtctcgaagagatccagcagcaacaagcagcactacaaaaacgtaacgaccgggatattcaccaggaagaagtcaccaggctggaagctgaacttcaggttctacagcgaagaattgtcgatgccagtgaatcctctgttttagtcgaggaggaaaacgaacgtgctcattaa

SEQ ID NO: 146481 - DNA, 1086 bp, Enterobacter cloacae
atggctaacttcgatgcagactattgctactctttccccgctgtaaggggtatccaggctggacgaccattttacattgccacttgccctatgcgcatcatccctaagatctttagctttgatgagtcagacgtaccacctgagctgcgcgctcagcgtattttgaacaaatcgcgcattcccgaaatggttcgttatttgcttgaaaacccaaaagattacgttttctctgcattgacggcatccattgcggtcgatgtacagtttgacgagttcgaaaactcgaacaatcttggcacgcttcgcgtaccaatggatgctcaaattcttatcaatgacggacaacatcgccgtaaggctatcgaggatgccctttctgagcgtcccgaattaggacaggacaacatccccgtatttttctttgttgatgaaggcttaaggcgtagtcagcagatgtttgcagacctgaataaatacgcaatccgccctagcccatcattatccgcgctttacgatcatcgcgacgtaagctcgaaccttgctcgatatcttgccatgtctatcgagccctttattggtcttactgaacttgagaaatccagtataagtttgctttccaataaactgttcacgctaagcagcattaaacaggcgacgcgtgccctgcttggtaaagaccctaaagtaggtagcgttgaggacaatacgcatatcgctgcgctatactggcaggctattttcaaagtcatgccagactggcagcttgctgcacgcaaagaagtatctccggcacagctccgccaggattatgtgcatgcccatggtatcggtttgcaggctttgggccttctgggccgttcgctaatggctgaagaacctgagcactggcaggaaaaacttacgaagctaaaaacttttgactggcgtaaaagtaatcctgagatgattaagcgcgcaatgcagcatggcaaattgagcaaaaccggcaccgccattcagctaacgtgcaacgctttaaaaattgcgctgtctctccccctttctcctgaagaacaagagcttgaagctcagatggttgtatcatga

SEQ ID NO: 146482 - DNA, 246 bp, Enterobacter cloacae
atggcgttatcgcaaaaaagcctgggtattttggctggcatagatgagtttgcagcgagcgcacgtatcaaccgctacgagaaaggggttcaccaggcaagcatcgaagtcgtccggcatctcgctaaagttctcgaagtgcctgtagcatacttctatacagaagatgatgaacttgcctctttagtccgtctttggccgaagttggactcggagaagaaaaaaaacattcttcagcagctctaa

SEQ ID NO: 146483 - DNA, 1953 bp, Enterobacter cloacae
atggacgcagttgagcaagacgtcagattcgcatgggcagacttctatcaggcatttgcctctcagctactgacctggcgaaatcgaagagaggagctggtggcgggtattcaccgcattgctgctgagattggcagtatggcacacctgcaggacaagcccgctaatggcgctccccatcctttgaaagacatttgtcctttcaccactatgggtttatttaatcgctcgcttaccgttaccaaccgaagaaatatcgcagccagcctggcaaaactgataggcgttcgcgaaccgattcctgagtcgttcgacggtattccgcttctgaacaatcagaagtcatggttctttggctatgagaaatcacgtaagcctgaagacatcgatacgctgtgggaaatgttttctcaggcaatctccttcgccgacaccccaaacgccgatcccacggacttcctgttttcttatgacgccgcatctaacgtgcgcaatgttggctggaacctgacgatgggattgtactggctacgcccctggttctaccctacgctggatagccagtctcagtactacatccagaaagtcctgaatattaaaatcattaaaaaaggtgccaaagggcgctgcagcggacacaactatcagaccgtagcgctggcgctcaaaaaggcctttacccagccaaactatccggttcactccttccctgaactctccctggcggcatggaatatcgatttacatcagtcaaatgatgaagtcgagcggctgacatggaaagcgtatttgcttaataaaatcaaactactgtgcctgaaaaaagacagcccatatttctccttgagggagttaaaagaggcttatctggatgagattaaggcggattatcccaataacaatacggttgaatcgtccatttcatattatctgcaaaaactacgtgatgatgatgaactggagtttcagacccccggcaactatgaatacctcaacttcgataaaggtgaattccagagcatcaccgaggaaacggttgaagagaacgtgccagcggaaatcccccataagccttacgcgataagcaatttgatcgatgagggctgctttttagaagaggaaaaaatccaactcatccttcagcggttacaggccaaaaaaaaccttatcctgcagggcccgccgggaaccggtaaaacctggcttgcccgccgcctggcgtattgccttatgggcgaggaaacctctaagcgcatcagcgcggtgcagttccaccccaccctctcctacgaagactttattcgcggctggcgtcctaacaatgaaggacgtttggcattggtagacgggccttttctccatgcgatcgacaaagcagtaaacgatccgacaactaagtacgtggtcattattgaggaaattaaccggggtaatcctgcgcaaatttttggcgagacgctgacgctgatggaggcggataaacgcacgccgaatgaggcgcttgagctctcataccgatctgatatggatgaaaaaacctacattcctgagaatctgtacatcatcgggacgatgaatatcgctgaccgctcgcttgccctgctcgacctggcattacggcgccgctttgcgtttattgatcttaagcccgagtttaacgacgcgtggaaaaaatgggttaaccaacggtttaatgtgagcgtggaaacattagccctaatcgaatcccaaataactgcgttaaatgaaaaattgtccagggatgcggccctgggaccacagttttgtatcgggcatagctacgttaccccaccagcggggttgaagattgacgacggtatggcctggtacaagcaggttgtcgaaaccgaaatctgtcctttgcttgccgaatactggttcgatgcgccggagaaagtcctggatgccagaaaggaactcctcagcgtatga

SEQ ID NO: 146484 - DNA, 201 bp, Enterobacter cloacae
atgaccgatcccgtctttgcgctagaacccgatatcccgcgcaacgtccgcattgcgcgttggctgcttttccgtctgttaagcggtattcgtggcggctcgctcacgctgcgtgaaggggcacagacattccattttggcgagacatcctccgcgctgcacgccgacattcagatcctggcgtctactggcgcgtcttaa

SEQ ID NO: 146485 - DNA, 201 bp, Enterobacter cloacae
atggcaagggcgacgagaaaacgagacaccatgttatatgcggcgacggttgcaacggcttccacggtctctttttcacctaaccatttcatcctgttgagcagaataatccagccgcgtcagcacagtattaagtcaccttcgatcagcatattctgggccagtaaccaccggttcagagaggcgttaatcacccgctga

SEQ ID NO: 146486 - DNA, 1095 bp, Enterobacter cloacae
atgaagcagagcgctgttatcatcggtgcgggcataagcggcctttttgccgccacgctgcttgaaaaagcgggtgttgattatgtgatccttgaggctcgtgacagaacgggcgggcgcgtactgtcaggcctggaactggcgggcacctccgctggcattcatgtagatatgggggcagcgtggttctggcctgatattcaaccggacttcgcgcaactgatcgagcggcttaatcttccggtaatcgcgcacggtcgcccgggagacatgctctacgagcgccagttggattcgccccccgaacgctacccggcatgggagagctccccggcgtctttcaggctgaagggaggaatgcaggcgctgacggcggcacttaaaagtcagatcccggctgagaagattaaaaccggccatcaggtggtggcggtttcccgggctggcaaggaagtgcaggtccatacccggtccgaaggcagtaaaaaagccgtattttccggtgagcatgtcttcctcgctttgcctcctgccctggcagctaaaataaatttcagaccggcgatgccggaacaggtactgtcaaactggcggaaaatcccgacatggatggctccccatgcaaaatatgtcgctgtatataaaacagacatattgcatgagcggcagctttcagggaatgcaggaagccgcgtggggccaatggtagagatccatgacgtatccgagccagattcgggcaaaacggcgatttttggttttattggcgtaccggcaaaatcgagatggacagtcagcgaagctgttctcaaaagcctttgccgggagcagctcgtacgcttatttgggcaggacgcggcagaacccgaagctgagtatataaaagactgggcggccgatccgtttactgcgacggaatttgatctcctgcaggaggtcgggcacgcaatgcctgagcaacttcccgcctgggtagaatggtccggcgagataacaggtgtcgccagtgaatggtcaccgcagttctcgggctatctggcaggcgcaattgactctgcattaacgggcgttcagcgctggctacaacagaaataa

SEQ ID NO: 146487 - DNA, 1254 bp, Enterobacter cloacae
atgacatcaatgatggttatacagaagttccaccctgtcggaacgggtacctttaagacgggctttcttcgtcaccttagtacaggtgagtctttccaatgggtttatgattgtggcgcaacaagcaagacaacccttaaccgcgtattgagcacattaccccggaagctcgtgtcccttgacatgctggtgctctcacacttcgataatgatcatgttaatggcgttgaaactcttcttcggcactgctctgtcaagaccctggttctgccatactcagaatgggctcagtccgttcgggaaatttctgtcttgggcaagaagggctcatcaccatccacagccatgttacaactcaatccagtacaatggctggcatcaagaaattttgatgttcgtgttgaggaagttgtactcattcggaggggaccggatgcaacaccggttcccccaggcaatgaggggactgagccgaactcaagggagtttcaggaggatgaaccagggcaattcagtgaaaattacttttcttttgggtcttctttttccggtaatacaagcatacgaatcctcccccataatcactctatccaggctgtaaatggtgactttgagtttgtcttttataatgcggaaaaagacttttccgaattgggactgattgaacaacgatgcgggcagtggtatgcgaaacattcaggctggcccttgtcggatgtaaaaacggatattcagaacaccatcatgagtactaacctgcatcagccgttgtcaggtatgccagcgaactggagaaaaacactcaaagatcggtatgagtaccattttggtcattccggcaaagcaaaaaataacatctcattgtgcatgtatgccgcccccgtaagccaaaaattcagtatttgctgtataggcagtgatcgccactgttgtcgtttcaggtggagaagaactctccggccggccacgctgtgcaccggtgatattcatcttactgcggcagtgatttcagatattcagcaccatctgggggcgcaacggtggaaccgaattggtttgatgcaggtccctcatcacggttctcagcattcgtgggagcctggtaacgcagtgctactggcccctacgcaatttgtacattgtgcatcgggttcgaaacatcatcctcatcctgacgtgcaggctgacctcagcagttccagggtgcattgcgccgaccgaactcagggcgtgattatccgctacaggctgtag

SEQ ID NO: 146488 - DNA, 1017 bp, Enterobacter cloacae
atgagcagtgtaaagatagacaagtacattagatatagttttgcgcttgtggcgatagttgccatactcataactactttcacaacccccaatccaacatcttaccaatatacagtttaccgaatagttctggctctagctgctggatgtattggtgcagttctgcctggtctcctggaagtaaaatttaaagggtggttaaaagcatctggcgcagcggcgatcttcgctatagtgtatttcaaaagcccagctttgcttcaacaaaatcctgtatctgcaagtaaacctgtaccgcctaccgtgattgatacatatgctgttaatagttccaatcgcgatagatacctcgaattatttcgaacaggacagttcggtcagcgggacaagctgcgcatcggttgtgttgagtggagcgaatcatcgtgcgtggctgctggtaattttttgcgattgttaagcgaagctggctgggaaatcgattcggacactatagtcacaatgcaaccatccttgccagttgagggtgtatcgattgtaagccgtggcgatgatctgattgatttgccgaaagtccccccccacatgggccgttggagtcgatcagacattagctatgaaattttgacggcggcatttaaattgatgggagtcccggtttatttttccagtgacccaacattacaaccaggtactaccggagtgtactttggaccgaaaccgaaactggatgtggcaatcaagcaaaaagatgagaatgtacgacgtgagcttctccgctacgtcggtttgggaatggctattcagcgagcctgctctcagcagtccgtcgaactttgcacaggtgaactcttttcctgggaaacgtctgtatcttcgtttctaagtcagcagcgattcaactccgatgccgtaaacagatggcttaccttgccgcaggctaatgcggcttcggcaactgcagacatgaaaataaagctagatatgttgatgccatttgtacttggcatcgagtaa

SEQ ID NO: 146489 - DNA, 789 bp, Enterobacter cloacae
atgtctgttgataatttatcccgcatgggcactgccaaagtgacgcttctggtggatgaaactggtcataaggtaatcgaaaaattgcctgtgggtgatgtcgaatttagtttttatcaacacgcagccaagcatctcactcgagctgatatttccacgccaagaatgttgtttgccgatccaattacacgccggttaagactggaatatatcccacaccaggttgatcaggacgaagttggaggagatgaagtgttatcagttttgtcccgcttacatggctaccgacctgacccttcatggatttatcacaatcacacctggtcagaagcagccctcgaaaaatcgctcctacttttggcattatcggacaaagcagcaaaacagttacggtactttcaacaggcaagtgatgttctgtttagtggtcagtgtttaatttccggcgacagtaatgcgggtaattggggaaaaagggatggcggcgatttcgttctttttgactgggaaagattcagcattggtagcccagcgattgatcttgccccacttataaagggaatgggctctaaacaaaagtttattgagtttgctgagcgctatacctggttatcacataattataatcctaatgatttagctaaagaaattgcgattgctaaagcatggattgttacggaggtaattgtattgcttcatgaacggcagaaaaatgattttcaattgtatctcaactggtacagagaaaatctccccgcctggttagataacacttcaaaaatgctttga

SEQ ID NO: 146490 - DNA, 492 bp, Enterobacter cloacae
atgttattcaataaccaagactggaaactgtcagtcaccgacatcaatccctacgagaatactgtgagtctggacggtcagtcctatccgttgtccctcgctatcaagaccctcattccgggctacttgtcaggcctgccgtctaccagccgtgagtctatggagttactggaagctctggctgaggctggtgtagctattagtaacttcttcagtaatgacctgatgatcgcctaccaacgccgccagatgaataagcgtgtcgaggctgagcgtatcgctaaagagctggcgtctcagaaagagcgtacccgcgaaatgttcatgaccgaagacgaatggcagaaagagttacaacgccgcgaacaggtcaaagctgaacgccggacctatggtgagaacctccgcagagctacccattctgctggtcgttctaaggcttcaattatggctgacctcgatagtggcgctaactggatggattccatctaa

SEQ ID NO: 146491 - DNA, 201 bp, Enterobacter cloacae
atggctatgattgacccgcgcacacccgaaggtcgcatgactctccgttaccgtggctaccggactgaagtcctcctccgagagcttggtctagacccggaagatgagacccgccagcaccaatcacgggacgagctgatagcgcaactggtcgctatgaaactgccgtcagctagcaagctagcgccagcacatcgttag

SEQ ID NO: 146492 - DNA, 510 bp, Enterobacter cloacae
atggctattacaattcaatgctactcagagtccgacaatgcggccttcttcgttggagacctcgaccatgagcagctaccagcgccaacctatgatgagcctaaggcccgtacaggtaagccacctgtggtcatcgacaatcggtctgtgaggctgtggctgattgaaacaggatgtctatcctattcacagcttgctgaggcctacccatgggcagacgatgtgtttacagggctgtcacgtccttcaggtctctctaacagcgggggacttccggtctccaaggcctacctgttcgctgccttatatggcaccaacgatatcttctcccgcaatactgacatctcctacacggcaatcacgggtcgttccccgtctcctcgcttcattcgacacgttaactcggtccttcaggctacctctgtgagtctggctaaggtccttcagggccggaaagacttcgagatgtgggacactgacaaggatgagctgctgactgtaagtgcttga

SEQ ID NO: 146493 - DNA, 624 bp, Enterobacter cloacae
atgcgaaacgtccggcaccacctgagacgcccaacgctggtacggcgaatcatcatcgctcaaattctgctgcttactctcctgtggggcctttttttgaccttcatattatgggaggacttgcgtagccccccgatactcacgggcagtcagacgtacgagaccctttttacgctggtgaagcgtatggacgggcgcccgcaggatcgtaccgatatgctaaaagcattcagtaaggcgctgcgggaaagctacggtggcggcgatgatcccgcgctgtcaatcaacctcatcgttcgcaaatataacgcactcatttttgcatcggatggcgcgccagtggaggtaaaaaataccaggctgggagagatgcagcgcgttcagagtggaaatcgtacctggaccagccgcaccctcaaatcccctcattctgacatagaggtcacacttttcacccctgctggcggctggaacttctttatctatctgaattcgcgcggctactacaatgcattcctttcctgctattccccgcatggttgtcgatccgcattgcgatgcgcccctggagcgaggtggtcaatgaaatttcattacgcacacctgacgatctctcccccttaa

SEQ ID NO: 146494 - DNA, 156 bp, Enterobacter cloacae
atggtcgacgcaatcaatgactttcttgccagggtgcgtgaaagcaccgaaagggaacgcattttcattgcagatgccgcgcacgaactacgtacgccgctggctgcgatgcggataaacgtggaggcgctgcagtcctggatcatcatgcaatag

SEQ ID NO: 146495 - DNA, 675 bp, Enterobacter cloacae
atgacagataagatctcggatgcaacaaatataataagtgctgcagcaaattccatcatggctctcgtagcagtttatgccgcaatcaaagcaagaaactacttcaaaagcaaattccaagatgtaattgttgaggaactatcaaaaatcgtaaactcattcaaagaaatcgagaaaaataatttcatttttgaaatagcgttaccattccgtcttattcagcctaaaagcgagtggtcggacagttatttttataaaagcaaagtacaaggcccattaaacacaaccatatcaattcaggactgtttgaagagagaatttaataacatcaaagacgcatgtttaaatattaaacttcataatggcaagataagtaagaaaggagaaaaaaagttagttgagttattcgagttgctctttgcaattcagtcatcattagatgagtatcacttcgcatcaacaaaactttttaaccttaaagttgaaagagaaggtgatttcatcagcatgcatatgttccaagattataacaaattaagctttaatgaaaggctcaatttgtttgatagtcacatcgattaccatacaaaaaatattaaaaacttacatactagaatattagcctgcttggaagaattaaaggcactatatgctaaaagtaagttcgtaaaatga

SEQ ID NO: 146496 - DNA, 492 bp, Enterobacter cloacae
gtggaactgagtaggaaacaggttaacgtctcccaactagcggagctggtaggcatgaatcgtaacttagttgcgcggcgattgcgtgaactggaattagtcggcgggaacggggaaaacctgaaactatacgaattgggaccagcactgcaggcgttgttgacgccatctatgaaggaaaatggcgaaatgtctccgcaggacaggaaagcatggtatcagtcagaaaacgaacgcctcaaatttgaggaagctcaaaggcaattactgcctgttgatgaagtagctcgtgagtatgcgacgctggcaaaaactgtctctatggtgctggagaccctgccggatattctggaaagagactgcgctttgacacctacagaggtttctcgtgtgcaggcgattattgacgatctccgcgatgagatggctagaaaggtgcaggatgcggaaagtgaagaagcgtggccagccgtggccgccagtgaggaataa

SEQ ID NO: 146497 - DNA, 417 bp, Enterobacter cloacae
atgcgtctgcaggaggatgcgaacggtgatcctattaatgttatcccggcctatatccttgtgcctgccgcgctggaaggcgcagccaatcgagctgtgctgtcatcatcttcgctgttcccggtagaccagaacggtatgctgaaccagaacccaggcattatcaacgtcgtgaaggatatggcgcaggtagtggttgagccgcgactggacaaggccaacaacaaggagtggtacgtcactgcagcgcaaggcaccgacactatcgaggtggcatatctggatggaatggacgtgccgtatctggaacagcaggagggcttcactgtggacggtattgcatggaaggtgcgtatcgatgctggcgtggcggcgctggattatcggggcatggtgaagtcgagcggggcggcatga

SEQ ID NO: 146498 - DNA, 426 bp, Enterobacter cloacae
atggcgggcgagaacaagttaagcgacaaggcgttaaaggccttacatggtaaaccccagccgcgtcaaaagatggtagcagatggtcgtggactgtctgtcagagtgagcgttagtggcacagtgagctttgtgtatttcttcagacattccggccgacaaagcgcccccgtctggatgacgttaggcaagtatccagatatgacccttaaacaggccagagagaaaagggacgagtgccgggcatggctatctcagggactcgacccacggatagagaacaaactcaccaaagagaacctattcactccagtaactgtgaagaacgctattgattactggtttgataactatgccagggaaaagcgcaaagagactgtacggctctatcgccgttatgcgtctgcaggaggatgcgaacggtga

SEQ ID NO: 146499 - DNA, 552 bp, Enterobacter cloacae
ttgcttgcgggagttattcgcagcaatagccgtgctgcgcgtctcgtcaatcaactcctgctgctgatgcacagtgaggcacgcattgacgccgcgatggagtccgtgccgctaacgtcgctcataccggagcgaatggccgagctggaaccgttagcctcagcgcgcagaattgaactggaattcttcgccgaggagaacatccggattatcggcgtcaggcaaagtttgatatcgctgatagacaatctcattgaaaatgccgtgaagtacagccctgagggcggacgggttgtggtggatgttcggccacgtggacagtccgttcagctctgtgtttcagattcgggccccggaattccgcctgaattacgggagcgcgtgttcgacagatttttccgcgatcccaatcagatgcaaagcggaagtggtttagggcttgccatcgtcaaggccgtagcgcagcaacacggcagcagcataaacctgagtgcgtccgcagaaggtggcctcctggtgacggttgccttcccgaaccgcacgtttagctaa

SEQ ID NO: 146500 - DNA, 144 bp, Enterobacter cloacae
atgcttttttgtgattggtatcttagaaatgaaagattcgaaatgaaaggtaagaatgcgaaagaatcgaaaacaaaaaaaagcatggccgaagccatgctgaaagaggtttatagtaaactcacgtcactggtgccgggttaa

SEQ ID NO: 146501 - DNA, 1212 bp, Enterobacter cloacae
atgagcgaactgagttattttgaaaaactgctggatggggttgaagttgaatggttgccactgggtaatgtcactaaatatgaacaaccaacaaagtatttggtaaaggctaaggattatcacgatacgtttagcatacctgttcttaccgcagggaagacattcattcttggatataccgatgaaacacatggtatctatgaggcatcgaaaacccctgtaatcatttttgatgatttcacaacagccagtaaatgggttgattttgacttcaaagcgaagtcatcggctatgaaaatgattacttcaagtgatgatattagattttcactaaagtatgtttactattggctaaacacattgccaagcgagcttgtagatggtgaccacaagcgtcaatggattagcaattatgctcagaaaaaagtacctgtcccttgcccagccaacccggaaaagtccctcgccatccaggctgaaatcgtccggattctggataaattcactgcccttacagctgaacttacagctgaacttaccatgcgtaaaaaacagtacaactactatcgcgaccagttgctgagctttgaagatggtgaggttgagtggaagactctggaggaggtgctagtagataaattttggattatgcccgcaactccgaagtttgatgataatggtgaaattccatatatcacttcaaagaatattagtggtgggaacatcgattttgaaagagttaagcatatttcccgggacgattttttgagcatctccaaaaatagaccgatcttgaaaggtgactttcttataagcatgattggtactattggtgagattgctcgagtaaaatgtctcgatcctgatttttacggtcaaaacatgtacctaatcaggttgaatgaggaattacttcaccctagatattttctgcatttcttcgactcaccaagaatgaaattttactttaagtcagtaaaaaacaattcagggcaaggttatcttaaagcaaataacattgatggtttatctattcctttaccatcgattgatgagcaacaaaaaattgcctttatcctcgataagttcgacacactgaccaaccctatcaatgaaggcttgcctcgcgaaatcgagctgcgccagaagcagtacgaatactaccgcgatttgcttttcagcttcccgaagccagatacagtcaatcagtga

SEQ ID NO: 146502 - DNA, 645 bp, Enterobacter cloacae
atgctttccaccactgcctttctggcactggcggtgcagtgcgccgccagtattcacccgtccacgtcgcttgacgtggcgcgggtcgaatccggtttccacccttacgccattgctgaaattctgccagacagccggggcgtgatttcacatttccccacgagcctgtcggaggcgatccgcctcaccggacggctggcagcacggggcagacgctattcggtcggcctgatgcaaatcaccagcaccaatttccgccattacggcgtcacggccagcgacctgcttaacccttgcgtcaatctgtcggtatttgagcgcattctcgatgactgttaccggcgcggcggcaccctgaaacgggcgctcagttgttactactccggcaactttgaaaccggcctgcgaccagaatccgcctttaaccagaccagctacgtacagcgcattggctatgtcgtcccgtccacgcgggaagaccggcagcgtacccctgaccggaacgtacagccctctgtccgttatcccgccgttgtactgagcggcgagcctgtcggtgccactgcgccggtcctgacttccctccattatcccaacgccgtcattcgcggcaccgttcctgttgtcattcacgaggagaaatga

SEQ ID NO: 146503 - DNA, 588 bp, Enterobacter cloacae
atgatcccatcaattaattactccatcatagccaatgcattgcatgcactgaaagaaggcaatattcgccactgtgaatctctgggatttactatcgacgaaataaatgctcttgatcagttatcccttgatgaactgtttactgtcagccgggcggcggcaccctttgtttcgatcattgtccgccatgatgttctgcatcatttactggcgcaggcccgccaagaataccggcatcaacaggagattaaccgggctatccgcctgggtggctctatcgcgttgctcaaccactattttggcctgacatcaaatgaagtctgccttcgccgtaggttgctgggtgtcagcgtgccgtatggccggacacctgaaccggatgaaaagacggatgcggctatctggctgcaatggcaacagtgccgggtggaaaaccttgaatcgcctgatgctctgatggctatgatgcaggtgacggaagccctactgccgaagaccgaaggacttttactcactacggtctggaagcgtattgcactttgcgaacaggaagttgccgctgacaggaggacgtcatatgccggatga

SEQ ID NO: 146504 - DNA, 696 bp, Enterobacter cloacae
atgtcattaataaatcgtttatgccttcttgacaaaaaaacctttcttaacgggcataactttattattagcactgctggcaaatatatcatgcccacacagagagttattgatactccattgattggatatgaatatgttctaatacagagattacttgcccattcccttaaaatccccttacctgtaacaggagccattgattttaatcatggcataacagtcagcttacagggggaaatatatcaactattcgacagggtaacgtggaaaaaaagaataaaacaaaaaatcatgcaactccctaaaaatatttcacaagatgtacatgaagaaatattctctcagaggatacacgattacctggaaaaagagtatttcccggctcatgttctacctcgggatgcctggtttgtcattcgacacgctgaacttgataaattcattaacatagagattaagaacaaaatgaaaccattatcttcaacacgaatatcaacaccattatctcgttttttctggctggcctgcaaacataatgagacgatcagcccactaatccggcagccctataaacttctgtccatttttgaacagtgggcctttcatgatggtattacagaccatctgagtggcgatacgctgaaaaatgcgctggaacggggttctccttcttctacatccttatctaactga

SEQ ID NO: 146505 - DNA, 1248 bp, Enterobacter cloacae
atgaagccagcagcgaataacatcggactcagaaattatttacccatactgctcacgctgccgctggccggactggcggagcttgcctctctatactctattcaggcgctgctgccaaagctggcggaggtttaccatattccgcttaatcaggttggcctgatcctgtctgccgaagtcggctgtttggccctggccatgctgtttaccggcagcctttccgaccgctttggacgcaagcaaactatcgtcgtttcactgctgctaggcggcattttgacgctgatgtgcacgaccgtcagcgcctggccggagctggtgctttatcgcgctctgcttggccttgccgtcagcggcatcacggcggcggtcaccgtttatatctgcgaagaggtatctcccgttctggcgggcgtagtcaccggctattttatttttggtaactcgctgggtagcatgtcgggcagggttttcgccacgctgatgatggaacacgtttcgctgaacgttattttcatgctgtttggcggtctgctgatctttatggcgttttacgttctctatttccttccggcgtcgaaaaactttaccccgagcaccgcgctaaacctgacgcagatgttaaaaggcggtattgaacattttaaaaacagaaatatctctctggcctacgttatcggctttattctcttcggctcctttacctctatttttaacttcgtcgccttctatcttcaccgcgaaccgttcaatctctcatttacccatatcgggctgatccccgtgagctttgcgctaaccttcttctccgcgccgacgaccgccaggctggccgtgcggtttggcgccatgaatatgcttagcatgctgctgatggtgatgattgtcggcgccgccatcagcatttttgccaccaccgcggcggtatttattttcggggtggttgtcctctcggtggccttctttacctcacactcaaccattctctcctgggtgagcaggcacgcctctcatgctaaaggacaggcaacggcattttatctcttctgctattacgcgggcggggcggtgctgggctacctcaacggtttcgtttttgccaaagcgggatggaacgggctggcgctctccgtgatttccctgctggcgattgggctgctgcttagccgtattctgcatgctgccaataagcaaagagtaatggagacgcgcgagatggttaatatcgggatcgatgccgataattaa

SEQ ID NO: 146506 - DNA, 1422 bp, Enterobacter cloacae
atgaaacctaaaacgttgtacgataaaataatcgatgcacatattattcgacaattagaccaacagggtaatgtgctgctgtatatcgatcgctctattttgaatgagtataccagcccgcaggcgttcagcggattacgcgaagcgaaacgtcaggtctggcagccaaaaagtattttactcaacgtcgatcacgttaacccaacgcgccccgagcgcactaaagagatgaccgatccgggcggtgaactccaggttcgctattttgaatcgaacagccgggattttggcctcgagctttttggcgtgatggatgagcgtcagggtatcgaacacgttgtcgcccacgaacaggggatggtgctgccgggcatggtgattgctgccggtgacagccacaccaccacctacggcgcttttggcgcattcggcttcggcattggcacctctgaaattgagcatatgctggcgacgcagacgctggcctataaaaaactgaaaacgctgcgcgtccgggtggatggcgagctgccgtttgccgcgacggcaaaagatattgtcatgctgcttatcgcccaaatcggcgcggatggcgcgacgggctacgcaattgagttttgcggcgaagcgatcgctgcgctgagcgtcgaagggcgcatgaccgtctgcaatatggcggttgaagcaggggcgcgcggcgcgttcatggcgcccgacgacaaggtatttgcctatatcaaatccgcgccgcgcgtccctaagggcggaatgtggcagcaggctctcgcccactggcgcactctgcacagcgatgagggcgcggtctttgataaagaagtggtgcttgactgcgcaaacctgacgccgcgcgtcacctggggaaccagccccgatcaaggcggcagcatcaccgatatcgttcccaaccctgccgatgagcaggacccatccaggcggcgcgacatgcaacacgcgctggcctacatggggcttgaacccggcatgccgctcagcggcatccctatctcccacgcctttatcggctcctgcaccaacgggcgtattgaagatctacgcgccgtcgcacaggtgctgcgcgatagaaaaatcgcgccgggggtcaggggaatcatcgtaccaggctcaacccaggtacgcgcccgcgccgaacgagaagggctggcgaaaatctttattgccgcgggatttgaatggcgccagtccggatgctcgatgtgccttgcgatgaacgaggacgtactgatgccgggcgatcgctgtgcgtcgagcaccaaccgcaactttgccggtcgccagggcgcgggagcaagaacccatctgatgagcccggcaatggtggccgccgccgcggtagccggtcacctggtcgatgtacgccagtttttgcagcaggaacaatag

SEQ ID NO: 146507 - DNA, 609 bp, Enterobacter cloacae
atggaacctttcaacagcgttaccggcattgccgcaccgatgatggcggccaacattgataccgacgtcatcatgcccaaacagttccttaagggcatcgatcgcagcggactggataagggtgctttttacgaccagcgttggttagccagcggcgagcccaaccccgattttattctcaaccgccccgagtggcgcggcgcgacgtttctgatcgttggccctaactttggctgcggctccagccgcgaacacgcggtttgggggctacgccagctcggtattcgggcgcttatcggcaccagcttcgccggtatttttaacgacaactgccagcgcaacggcgtgctaaccctgacgctttcagcagtggatatcgacctgctgtcccaggtggcaggtaatccgacgagtaatcacatcaccgttgatttacagcaacaacgcattcaggcaggggaaacagccttctcctttgccgtggatgaactgaaaaagcagatgctgctgcaagggcacgatgcgattagctacacattgcaatatcagcaggaaatacgtgattttgaggagcgccactttaccacgcacccgtggcttgtggcgtag

SEQ ID NO: 146508 - DNA, 876 bp, Enterobacter cloacae
atgaaactggtcagttttatgcatcagggcggcaaaaatagccgcgataaaagttacggcatatggaccgaaaacggcgttatcgatctggggacgcggataggcgcacgttatccgactatcaaatcactgctggctggtgacgctttggtcgaagctgccgcttacggacagcagcagccggactacgcactggaggatattagctatcttccggttatcgaagatccgaacaaaatcatctgcgtgggcatgaactacgccgacaagcgccttgagtttgacgaaaagaataacgaacccacgctgtttattcgctttgccgattcgcagaccggtcacaacggcacactgctcaaaccggaagccagcgctgaatttgattatgagggcgagcttgccgtcattattggtaaaagctgctttcacgctagcgccgaacgggccctggagtacgtgggaggctacagctgctacatggatggctccgtgcgcgactggcagcatacctggtataccgccggtaaaaactggccgcagaccggctcgtttggaccctacttaaccactcaggatgagattgtcgatccacaggcgctggctatccacacctggctgaacgggcggatggtacaggacgataacaccagcaatatggtacataagatcgccgagcttattagctatatcagcacttttactcgcctgatgcctggagatgtgatcattaccggatcgccgggtggtgtgggtaaaaagcgcgttcccccgttattcttacgccagggtgaccgcattgaggtggagattgaggggcttggccgcctgagcaacacggtcagcgaggcgcgtcaggtggttgagataccagcctga

SEQ ID NO: 146509 - DNA, 921 bp, Enterobacter cloacae
atgatagttaccactgaaggcattaaagataaaggtgagtctgcctttattcctggcttccggctactggacgttgaactgggcaatggcatccgcctgcgcgctgcggttggcggtcagggtgagccgctgctgatgctgcacgggcacccgcaaaaccatgtaacctggcgcaagattgcccccacgcttgctcaacgctttaccgtcatcatgcccgatattcggggatacggtgacagcagcaagccgccgagcgaccccgagcaccgcacctattccaagcgcgagatggcaaaggatatcgttttgctgatggcgcggttgggctttaacgacgggtttgcctttatcgggcacgaccgcggcgctcgcgtcgggcatcgcctggcgctggactatccgcagcaggttaagcgcagcgtctttattgatatcgcgccaacggccacgatgtatgaacgtacggataaggcttttgccacgcgctatttttggtggttcttcctgattcagcccgcgccgctaccggagaagctgatagcctccgacccgaccttcttcctgcaaaagcacattagcggacagttgaaaacgccaggagcgacggagccggaggtatttgccgaatatctgcgctgctatcagaacccggaaacgctgcacgcggtttgcgaagattaccgggcggcggccacgatagacttggctgacgatgaagccgataagcatctgcgtatcggaagcccgcttttggccctgtggggtgcaaaaggcaccgtaggccaactttatgatgtaatatcaacgtggcaggaaaaggcgttgaacgtgagcggcgtgccaatgccttgcggacacagccctcaggaggagtgcccggaggagatgctcagggtcatcatgcccttcctttcctga

SEQ ID NO: 146510 - DNA, 981 bp, Enterobacter cloacae
atgagcactcatgacaagcagcgggcgcagtggccgcttatcgaagatctgaacgtttttctgaccgtggtgcgcaaggagagctttgccaacgcggcggctgagcttgggctatcgccctcctatgttagcaagcgtatcggcctgcttgaaaaaagtcttggcatgcgcctgttttatcgcagcgcccgcactatccggctcaccgccgacgggcataaggcgctgagcggagcgatctccgtcctggacagcatggacgagttcgtgtcggggcttgccgcctggcgcgacgccatcgagggaaatatccacattagctgctcgtttgggttcggttcaacgtacatggcaaacgcgctctccgcgctggcggaacgctacccggcgctaaacgttaagctcaccctgaccgaccaggtggttgaccttatcgaagagggcgtggatctcgagatccacgtcggcgacgatattaaagatctctacattacccgcaggctctcgctcaatcgacgggtgctgtgcgccgcgccgcagtatcttgccaggcacggcacaccagctcagataagcgatctcaagcagcacaagtgtctggtcatccaggagcgtagcgcgcagttcggtgtctggccgctcaccaacgggctcgacagcacgcaactgcatatcggcagccagctttcctccaacagtggcagagtggtgctgaactgggcgcttaacggccacgggattattcttcgctccctgtgggaggttcagcgctatctgacgagcggtgaactggtgcaaattcttccgtcgtggcatcagagcgccaacatctgggctgtttactccaaccgcacttcaggttcggcaaagctgaaggtatgcatcgatttcctgatggactattttcagcaaactcctcccgtcagcgacgcgctgtggggaaaaataacgtctgaggatgggaagagccagctttgttaa

SEQ ID NO: 146511 - DNA, 1269 bp, Enterobacter cloacae
atgtctcttaacgactcaaaaatccgcaacttaaaaccatccgcaaaacccttcaaagtttccgattctcacggtctgtatcttcttatcaaacccggcggctcacgtcactggtatctcaagtatcgtatcagtggtaaggaatcccgtattgcgttgggtgcttatcctgctgtttccctctctgatgcacgacaacaacgtgaaggtatccgtaagatgctggcgctgaacatcaacccggcaaagcagcgggccgctgaacgcattgcaggcacaccggaaaaagtgtttaaaaccgtggcgttgtcatggcataaaagtaacaggaaatggtcacagaacactgctgaccgtctgcttgccagcatgaacaatcatatctttccgattatcggacatctgtcagtgtcagaacttaaaccccggaatttcattgacctgctgaaaggcattgaagaaaaaggcttgttggaagtcgcgtcccgcacgcggcaacacctttgcagcatcatgcgccatgcggtccatcaggggttgatcgacaccaacccggcggcaaatcttgatggtgtaacggctccgcccgtcagacggcattatcccgccctgccgcttgaacggctgcctgagctgattgaacgcattgagggatatcatcagggccgtgagttgaccagactggcggtcatgctgacgctgcatctgttcattcgctccagtgaactgcgttttgcacgctggaacgagattgatttcagaaaccggatctggaccatacccgccacacgcgagaccattacaggagtgcgttattccggacgtggtgccaaaatgcgcacaccgcatatcgtgccgttgtcccgacaggccatctgtatactgaaacaaataaaggaaatctcaggtcatctggaaatagtattccccggtgaccatagcccttacaagccaatgtgtgaaaatacggtcaacaaggcactacaactgatgggctatgatacgaaagtagatgtctgcggacatggattccgggcaatggcatgtagcgctctgatggaatccggactttggcttcaggacgccgttgaacgccagatgagtcaccaggaacgaaacaccgttcgcctggcttatatacacaaagcagagcatcttgaagcccgcaaggccatgatgcagtggtggtcggattatctggatacatgccaggaagcatatgtaccaccttttattcgagtacgaaaaaatacccacgagacattttag

SEQ ID NO: 146512 - DNA, 216 bp, Enterobacter cloacae
atggccgatatcatcgataccgcagcagagattgaagagcttcagcgtaacgctgccctttccgctcaccgcatcaaccgaaacgccgtatcagctgaacgttgtgaagaatgcgacgaaccaattcccgagccgcggtgggctgccgttcccggctgccagacgtgcgcggagtgccaggaaagaaaagaacatgcgcttaaacatattcgatga

SEQ ID NO: 146513 - DNA, 198 bp, Enterobacter cloacae
atggttctggatgaagagcgtataagcatgaaaattcaggcgatggggcgggcggtcatggagttgtcactggcagatttacctatgacccagcaaaacatcatcgacaagctggagcagtaccggaaggaaacaggaaacgtgatagggaagggtgtgaacagggatgcagctgagatagtgcggaaagggcaataa

SEQ ID NO: 146514 - DNA, 285 bp, Enterobacter cloacae
atggaaaacacaactacccgaaacaaagcccaggctcgaaaaattgagtcctggatcctgaatcagattgctatgaaaggcgcctcaaacgtggccaaagcgatcgggatggataaatcaggcattacccgctggaaagaaaacatgctgcctaagctggcgatgctcttagcggttctggagtggggtgtcgtagatgacgacatggcgagactggcaaagcaggttgcggagattctctcaaatgaaaagccccaaacgagcggtaactcgttcagggcttaa

SEQ ID NO: 146515 - DNA, 411 bp, Enterobacter cloacae
atgagcgtgaagcgttatgacgtaatgagttacagcctggatgtggacggaaattcaggcccatttgtgaaacacgaagactactcagcacttgaagccaggtgcgcggaactggctgcggagttgagtgcagtagaaagaatctgcaacgaggcagtgttcatcacagatgataactatgagcaatgcccaccggaagtgcagaagatgattcgctctctggttgtgttgcagattcctgcgtaccaggctttcctggctgaagtgcgatccgccgcggtagacgaagtttgcctgaaaattagcaatgcaattgttaattgctatcaggacgaacaaattgggcttgatgcagcagcaactatctgcggtgaattcgccgcccagcttcgcaaaggagtgcagtcatga

SEQ ID NO: 146516 - DNA, 192 bp, Enterobacter cloacae
atgagcaacggattccctgaatggtggaagcacgggcagaaggtacgcacgcgcagagatggcatcctgacgctgaatattgcgcctgacgccgaatactggctcaccaacgatgaaggcaaagaggtctacgtattctcggctgacatcctcgggccggtgaaaaacgatgcagaaggagccgcccaatga

SEQ ID NO: 146517 - DNA, 552 bp, Enterobacter cloacae
atgaatagcgagactttatctacggcataccagtttccctgggctgctgtaattaccggcttaaccgggcttataggtgcccttggtggtgcgttcttggcaaatctatttgctgaaaaaagatggaaaaaccaagtcgtacatgatgcagaaaaagaacatcgtaaattaatgcgtgaaaagggagaagagacatttagatgtctaaaaaagtgggaaaaggagttgttttttttcaatgcatcacggatcggatacattcaaggtgtcataagtgaagaaaagctcaataaaaccactgatgaaaaggtatctcctgacacgcatgtaactttagatgtacttgtctcaatttatttcaacgacctccgcgcagacttaagccaaatacattcacagaccagtaagctacaagtattgtttcatcggtacagtcaaggtattcccaacatgaatggtgctgagcatatgaaaaaagaagcggctgtatatgaaagacaacttgaacattttcaaagaaaattgaggctggccctaaaagattatgtttaa

SEQ ID NO: 146518 - DNA, 189 bp, Enterobacter cloacae
atggactattggtttatctcttatgaaatggtaaatgcgcaaggtcagaggggcaaagggcatggcttctttccaaaaaatgacgatgaaaacattgaggaattcgccaaacgcatcatggatcaagttagcagcaatcacggctgcgatccggataaagtagttttaatatcattcaatcgcgtttaa

SEQ ID NO: 146519 - DNA, 294 bp, Enterobacter cloacae
atgctaactcctaagcaaaaggctatcatctgggctttaggtatcatttttggcgtacctaccagcatttatggtatccaatggactttaactaaattcgcgaagcaacaagtaaattgcctttctgatgcatcacaagctgtcatcgaattaactgaaaaatcgttaagtgaacaaggcgatgggagtcaactttcaaaagacttcaccacttgtagaaagaatattgacccaaataaagggacatttgatttcttcaaggaagagattcataggcacaagtcaaaaacctga

SEQ ID NO: 146520 - DNA, 138 bp, Enterobacter cloacae
atgaactggattacctggaatatgaaccgtgtccccgttatcaacatctccccctcccaagcaacggaacggcgtttagttggatatatgaaccagatgctcgtcgttccatgcatgacgacgatttttgttaagtga

SEQ ID NO: 146521 - DNA, 303 bp, Enterobacter cloacae
atgaatacagaaaccagccagaaaatgacctatcaggagcgtgaagcattgaaggggtttactgaaaaacgcgcattacagggcgacacccaaagcctgcaaatgaccttgaggatgatcgcccactggatgaggcagccagcagaaattggatttacagaatatgcaacacactggacggcagcacaggccggacgtgatgacgggaatcactcgaccgcagcaatggcggagcagtggcctttaagggaagaaatgaaaattagccccggaggtagtgactacatgaggaaatatctatga

SEQ ID NO: 146522 - DNA, 2454 bp, Enterobacter cloacae
atgcgtaatatcgacattatccgcgaagtgaccagcgccgccgctggcaaatggccttatgtgctggctggcctgtctatcgacgtgcctgattcatcgcgccgccattccccatgccctgcatgtggcggtacggatcgcttccggttcgacgacaacgggcgcggtaactttatctgcaatcagtgtggcgcgggcgacggcttagacctgattaagaaggtgaacaactgcgacaccacagaggcggcacagcttgccgctgatgtgctgggtattgattaccgggcagcgcaaaccgacccgacggcagcgagccagagaagggagcaactggaagcttaccgccagcagcgtgagctggagcgccagcagcaggcagcagaggacgcagagcagcgaagggctacgtttgcccgtctgtatgccggaatgcgccagagtgtcacacagggcgaatctgagtacctgcaatcaaaagggctgaccgggtttaattacccggttatgtccgatggttcgctactcctgccgctggtggatgaatccggcgcagtagtggcggcacagaccattacaccgcagggagagaagcgacttctgacaggttcagcaaagcgcggggcataccatgccgtaaacgcgccagaatcgccgcagagcgttttaattgccgaggggctggctaccgccctgtccgttcaccagatgcggcctgacgcgctcacagtggcggcaattgacgccgggaacctgatccacgttgccggagtaatgcgccggaaacacccgcagtcgcaaattattatcgccgcagataacgaccaccctacagcagcctccgaaaccggagccaccaatatcgggaaggaggccgcagagaaagcggctttatccgtggctggctgggtatcaatgccaccgacagactacaaagccgactggaacgaccaccaccagcaaaacgggctggaagccgctacagccgcatttagtgattcgctgtaccagattcagggggaagccgtgaaaccacgattgcaggccattgagggcggtaaatcccgccgtaaagccgatgccggagatattgcacaaatggcagccagccagaaagcgcggttgctttcatctcgctgggatatgttggcggttaaccctgatagtggcgctgtttactgctacgaatctggcgtatgggtgaagctaccagacagcgaattagaaagggttatggtggcaattttcgacgagcacgaagcccactacaccgaaaaggggattaaatcggttgtcgcaaccatgaaactgcaaatcccggtaattggtgagcggagcggggatctgattggttttgataacggcgtttatgacctcgccacacagacgttttccgcccattcgccgggtaactggctgatgaaccacaatgggatcacctacaccccgccagcgccgggggagaatatttccaccagcgcccccaattttacccgttggctgaatcatgcaacggctggcgaccatcataaggccgagcgtatcaaagcagccttgtttatggtgctggcgaagcgtcacgactggcagctattcattgaggtaactggcgagggcggcagtgggaaatccgtattcagcagcatagcaaccacgctggcaggtgaacacaacgccgccagcggtagcatgatgacgctggacaccgcacggggacgggcgcagttcgtaggaaaaagcctgattattatgcctgaccagacccgctatgttggagagggtgcggggattaaggccattacgggcggcgatccggtagagattgatgggaaatatgaaaagcagttcacaaccgtgctaaatgccgttgttatggcaaccaataacgagccgatgacattcacggagcgaaacgggggcattgcccgccgccgcgtgatattcccgtttaataacccggtatcagacgcagacaaagacccggatttaaccgcaaaaatcaggcgagaaatcccggtgattatccgccacctgctaaccacctttgccgaccagaacaaagcaaaggcactattacttgagcagcgcgattctcaggaggcgctagacgttaaacgcggcacagatccggttatcgatatgtgtgcggcactttttttcatgaacgaacccaaaggcatgatgatgggcggaggtacatgggcaggccagccagagccgaggacgtatctttatcatctttacctggcgtttatggagtatcacggtctgggtaagccgctttccgtcaataagttttcacgcgccataaaatcagcagcaaaagagtaccgagccagctacctgacgagaagcattaacggcagagcgcaaaccaacgtgggctataacgagatggctgaggagttcattccccgtgcttacggtgtggagagcgggcagagtgatgattga

SEQ ID NO: 146523 - DNA, 264 bp, Enterobacter cloacae; identical to SEQ ID NO: 77415

SEQ ID NO: 146524 - DNA, 129 bp, Enterobacter cloacae
atggggattttattacgcaaaaaaggcgatggtgccgggtacctgggtcccgatacctggctgagcggacacacgatgggccagccacgttgtttttataagtggcacgttattttttgctcatcctga

SEQ ID NO: 146525 - DNA, 501 bp, Enterobacter cloacae
atgaagaagaaaaattttggtaatcctactaaaaagaatttccttatggcattgcccgacacagcatttgaaaataagggtattccacacagatgtaagtttaattttagcttcttcgaccattcacaagaagcagggcagaatttcaacgattgggaccataattcgctagttaaattacttgaaaaattaaagcattattctaatgaaaatcttgagcattggcggcatgcaagatgcggtgccggtgggcttactatttatgagaactataaaaacttccctaataaatccgattttatacaccctaaacacgttcctcataatgttgaatgggcaagatttagactagaacagaaggttagacttataggatttgtgctacccaaagaatgtgaaaatattatagatacagcttgtcaccttacatatgatccgaacacattttttgtagtatttttggatcaggatcatagattttacaatattgagacagaataa

SEQ ID NO: 146526 - DNA, 285 bp, Enterobacter cloacae
atggatgagtttgatattaattttcatcctttcatgctgccaaaacttcttgatctctttgaaaatgtgcacaccaacccaaaaggtgcgcaatttttattcacatcacataatactgaaattattgatacattaggaaaatatcgaacatatttagttaataaagaaaacaatgaaagttattgttatcgtttagatgaaattaaaggcgatattttgcgtcatggcagacctatttcgccaatttataaagacggtaaaattggaggagtgccaaagatatga

SEQ ID NO: 146527 - DNA, 276 bp, Enterobacter cloacae
gtggttatcaaaaaacttgcccttagttcccttagaatgcttcttctcatcgcgatattcgctattgtgtcatggttagatgttggttacttaactgagcatccattaataagtaatgaaacagccattaaaatttcctatttgtttagcgacaacccagcacccgaagatatttactatagttatgattatgcattgattgcgtccaacgttcttatctctctctttttatacgttgtaacaatgaagttaattaaattaacaaggagtaaataa

SEQ ID NO: 146528 - DNA, 366 bp, Enterobacter cloacae
atgatcgctgacttcaattttattaaagaaaaagaggtgctcgagtggatatgctgtacaagaagcttacgcataagtataccttgcttagatctcgcaatggtcgacccaacacgtcagttagtctttgcgttaagcgactcaaagccactaccaaccgttttgaccattttcagtgctcagggcgaaaaactattttggtctgcacctcctgaaggtgcggctttctattacttaacattcaaccggtcaaaagaagtggttgtagtctgtagctatgcggaaaagcaaaacggctggcatgattggttttattcctggggtatgaagcgtaacgcgttgtctctatctggccctgcgtattaa

SEQ ID NO: 146529 - DNA, 735 bp, Enterobacter cloacae
atgggaatgaaaagccgcttaaaaaaagaacgcagagcgtctagtcatcaagatgattcgcattcagctttacatgaacaaggctctgcctatactccaccaaaaaccatcttcaggttttttaaagagaaagagcacgctgaagctctttgcaaaggggatgtgtggttaactactcttcaaacatgtcgcgaatatgatgatcctcttcaaggagatgctaaagaggcaacacatacatacgatggaagtactgctgttttacatggcgatggttcagaccacgactttgtcacaaaagcagcccgtcttggtattggcgttagtccagactgtaaagacatacaaatatcgggtggctttcactctttctccattcccaatgcatatgttttgtgcacgacgcaggaatttaatccatcaaaactaagtgatactttcggtaattattgtgtggagatatccgaaccaaaggagtttttcgaattagttaccgcaaaattacatcaaactgtttctttgaaacatggatacatggggcctgtaacttacgataagagagaccacatggtgcatgaggagttacctgctccgatcggttttgttaagccaaaagatatatattctgaacagaaagaatttagatttctctggctaccggctgacaaaagagacatcaaaccattgctgctaagctgccctgaagttgccaaattatgtcggataattgcatga

SEQ ID NO: 146530 - DNA, 453 bp, Enterobacter cloacae
atgagtgactttaagccttttgacgacaagctcgccgggcagcttgcttccctgtcaccggcaggacgtcggaagctggccgcagagattgcaaaagagctgcgtaagtcgcaacagcaacgcatcaaacagcaaaaagccccggacggctcaccgtatcaggcgcgaaagcgccagccgctcagggcaaagaaggggcgaatcaaacgggcgatgtttcagaagctgcgcactagccggtacatgaaagccagtggccgtgaaaatagtgcggtggtagagtttaccggcaaggtgcagcgcatcgcgagggttcaccagtacgggcttaaagaccgcccaaacccgcacgcacaggaagtgcaatatgccgaacgtcagatactaggttttaattcggcagataaccagcttgtcgaaagatcgataattaaacacctaagcaaaatttag

SEQ ID NO: 146531 - DNA, 681 bp, Enterobacter cloacae
atgaattttagttccggcggaaaaataaatactgaatatgttgcaactgtattaataggcctagctttacgccaaagtaaatatttccgattagatgatgaaaaagtaatctttgagtataacactggaaatttcatcacctcgacagtaccattttcaaaaaaaattaactctgggaatattttttccaaaaccattacaagaattcacacaaatacaacaagaaaaggccgaatagatattgccctcttgggaaacaacaatggttttgattacccaaagtgtgctatcgaggtgaaaggtgatgatcctagcaaaacactcttacatcaagacataagaagaaatatagaatatttcaaacacacggggagcacaggaacatcaaatattactctggctttaaattgctcattcgaatcattcaataagaatagtagatctaaaagatcttgtatcacaacgactgatagggacaataaaattattgacttcacaaataaatacctaggccacatcaatgagataagacatgaaataccgtctggagtctcagtgtgcattgaggtattttcagcatctgaggaattagcagaaccttggtttacgcaagatgaatatgaacagatagaggaccacattcatctcacattaggagtaataataaaacttgaacgttaa

SEQ ID NO: 146532 - DNA, 1482 bp, Enterobacter cloacae
atggcgctggtcaacgcttttggctatgtgctgctggaagaggagctgtacgacaaaaactacgtcgcacgctttactgaagggcttgaagcctatcggcagacggtcaaagagtatgcgccagagcgggttgaacacctcaccggcatttccgccagtgacgttcgtcaggcaatgcgtacgttcgcggcggccccttccgccaccgtgatgtggggaatgggcgtgacccagtttggtcaggctgtggatgtggttaaaggactttccagcctggcgttgctgaccggcaatctcggccgtcctgccgtcggcgtcggtcccgtgcgtggacaaaacaatgttcagggtgcctgtgacatgggcgtgctgccgaatatgttccccggctatcaggatgtgaccgatcccgccgtcagacagaagttcgccgatgcctggggaattgacgtcaacaagatggacgatcgcgtcgggacgcgcattaccgaagtgcctcacctggcgctggaaggcaaggtcaaagcctattacatcatgggggaagatccgctccagacggaagccgatctcggcctggtccgcagcggttttgacgctctcgattttgtcgtggttcaggacatctttatgaccaaaacggcggaagtggctgacgtgctgctccctgccacctcctggggggaacacggcggcgtctttacctgtgccgacagggggttccagcgttttggccaggccattcaggccagcggcaacgttaagcgtgactgggagatcatcagcctgctcgccaccgaaatgggctatccgatgcactacgacgataaccagcagatctgggacgagatgcgcgcgttgtgccctcttttctatggcgtgacctatgaaaaaatgggcgaaatgggccacgtgcagtggccgtgcccgacgctggatcatccgggaacgccatacctgtacaaagacaatcagttcgacaccccaaccggcaaggggcagctctttgctgcaccgtggcgcgcaccggcagaaacccctgatgatgactaccctcttgtgctctgcacggtgcgtgaagtgggacattattcctgccgatcaatgaccgggaactgcgccgcgctgcaaagcctggccgacgaacctggccgggtacagatgcatccagccgatgcggataagctgggcatccgtgacggccagctggtgtgggttcgttcacgcaggggcaaggtcatcacccgcgccagcatcagtgagcgtatcaacgccggtgcggtctatatgacctaccagtggtggattggcgcctgcaacgagttaacgcaggacaacctggaccctgtctctaaaacgccggaaaccaagtactgcgcggtaacgctggaagccattgaggaccagcgctgggcggaggattttgcggcgtcgtcttaccagacgatgaaaacgcggttgatcaatgccgtgaacgtgtaa

SEQ ID NO: 146533 - DNA, 2532 bp, Enterobacter cloacae
atgatggcaacgaaaaatataaaaatgcaacccgcgcgtctggctgtttatatcaccttcgcgctgacgcatgctgtatctgtggcgcatgcccgggaaacctttaacgccgagctggtggagctggataatcccgggatggcaaaagccgatttatctgcgtttgaatccggttcgcaggcaccagggaaataccatgttgatatcattcttgacgaccagcttattgagacgggcgatattgattttattgcaggcaacgatgagaagggaaatgacagcctgttgccttgcctgagtattgcacagctaaaaagctggggcgtcaaaaccgcactgttccccggcctgacgagcgaaacgacatcctgtgtcaacctgcaggcaatcccgcatgccagttccgattttcagttcagcgcgcagcggctggtcatcagtattcctcaggccgcgatcgatctgcctgcacgagggtatgtttcgccggaacaatgggatgaagggatcaccgccgcgatgctcaactacagcctgagcggggcgaacagccgggcaaaacaggccggcaataagaacagtaacagtcaatacgccaacttacgcccgggcattaacgttgggccgtggcggctgcgcaactacaccacctggtcgcgggatgaggcgggccaggacacgtgggataccgtctacacctacgcacagcgggccattatcccgctcaacgcacagctcaccctgggggatagcgccgcgcccgcagacgtgttcgacagtatgccgtttcgcggcgggcaactggcttccgacgacgacatgctgccggattcgctgaaaggttatgcacccgtggttcgcggtatcgcgcggaccaatgcccaggtggtggtgcggcaaaatggctatcagatttatcagacctatgttgcgcctggtgcatttgaaattacggatatgtaccccacgggcggcgcgggcgatctggatgtcaccattaaggaagctgacggcagtgagcaacatttcactctaccgtatgcctcgttgccggtattacagcgcgaggggcgcctgaaatatgcggtgaccgggggccagtaccgctcttataaccataacgttgagaagacgccgtttgggcaaatcaccgggatctatggtctttcgcggggcgtcacgctctacggtgggttgcaggcgtcgagcaaataccagtctgtcgcagccgggctcgggaaaaacatgggcgatttgggtgcgatttctgcggacgtgacccaggcctggtccaccccgcaggacggcaaaaaatccaacgggcaatcctggcgcgcgcgttacagcaagaactttgtggggaccggaacccagttttcgattgcaggctaccgctactcgacccgcggttactacggcatgcaggagatcctcgattcctggggtgacagcactgcgcttcaggaccggcgtcgcaaccgggccgaactgacgatgagccagacgttaggcaacaatctgggttcgctgaccctgagcgcggcccgtgaagactactggaattcgggtaaaacgatggcgtcatacagcctgggttacaacaactactggcacaacatcagttacggactgacctggacttacagtaaaaacggcagtgcgggttcttatgatggtaataaacgatacgacagcgatcggctcgtggctttcaacgtcagtattccccttgagaaatttttgccgcaaacctgggctaactatggcgtgagcgccagtcagcataacggcaccacacacaacatcggtctcaacggggtggcgctggaaaaccatgcgctgaactggaacgtgcagcaggggtacgggtcggatggcgtgggctacacgggcaacctgaatggtgattataaaggaacctacgctgaactgacggcgggctacagctatgacaaaaacagcgagcgccttaactatggcctgcagggaggcgttctcgctcaccgggaagggatcaccttctcacagcctctcggtgagaccaatgtgctggttagcgccccgggtgcgcacgatgttgatatccgtaatcaggcgggggtcaaaacggattaccggggctatacggtggtcagtaacctctccgtttaccgtaagaatgagatcgcccttgctccggaaagtatgccggatgatgttgagctggagattaatacccgcacagtgaccccgacgcgtggcgcgatcgtggtggctgattatcaagcgaaggtggggcgccgggtgttgtttaacttaacgcataacggccattttgttcccttcggtgcaatggcgagcctgaacggtgtcgataacagcagcgttattgttggcgataaaggacaggtctatctcaccggtctggatgcgcggggaacggtcgttgtgacctggggtacggaaagcgaccggcaatgccgcgcaccgttcgtcctccctccgccatcatcggcaggcggaattaccgaactcaacgtcaattgtctttag

SEQ ID NO: 146534 - DNA, 621 bp, Enterobacter cloacae
atgagaaaactgtatgctctatttcttgttgcagcagttccgactgtagcactggcggccccccccctcgaggaattacaacacgattggtctgtgtgccagtatcaaactctggaagccaaaaaagagaactgctttagttcacttagtcagaaagcgcatcaggcaagtcagatgaaaaacaactcaagcgcaccactgttaatttggtctgcaatcattgatagcagctgggctggcgcaaaaggtggtctgggagcattgagccttgttaaacaagcccgcactaacctggagaaagcgattgaaattgaacctaacgcgcttcagggatcagcctggacaagcctgggggctctttattatcaggttcccggctggccaatcggttttggtgataaagacaaagctgatgaaatgttgaaaaaagcgctggccatcaaccctgacggtatagaccctaactatttctacggcgattaccttctaaaagagaaaagaacggatgaagccaggcgttttctaaccaaagcactgaaagcaccggctcgcccagggcgcgaaatcgctgacaacggacgccgtcgtgatattgaaagggatttgcaaagcattccataa

SEQ ID NO: 146535 - DNA, 807 bp, Enterobacter cloacae
atgaatctgcttaataaaaccgttctgctaaccggtgccagcggaggaatcggtcaggcgctggcgcgagagctggcgcataaaggcgcgagactctatctcgtagggcgtaatgaaaaggcaatgtcgcttttaaagaatgccattcctcacccggagcgacacaatatcgccctaatgcgcagctattccgacgaagagatattagggctggcgaacagtctgtctcagaatggtgggttggacattctcatcaataacgcaggaagcagtcgctttgcattgcttgaacagcaatcattcgacgatattcgtgaacagatccgaaccaatatcgagattcctgcccttctgacccgggccttgctggataaaatgaacagacctggcatcgtgcttaatattggttcaatttttggggaaatagggcatccggcgtggagtgtatacagcgcaactaaggctgcgacacaccgtttttccgaagcacttggccgggaattgcagggaagcggtattaccgttttgtatgccgctccacgcgcaacaaaaaccacgctcaacagcgaacaggtttacgcccttaaccagaaactcggtaataacaacgattcgccgatttatgtcgcatcccagcttgcacggcttcttgaaacggagcagaaacggtatcgctttggaattatggagcgtctgttcgtcaaaattaatgcctggtttcctcacgtcgtcgacggagcattagcaaaaaaattacctgtcattcaggaattcgccagaaaatcgttgaaaggagaacacaaatga

SEQ ID NO: 146536 - DNA, 666 bp, Enterobacter cloacae
atgagcttttatcaggaattacagaatcagaccgctgtagaacgtcaacgtttacttaattcacctgttattgcgcgttgccagacaggcgatatctcggcggagatgtatatcgcgtttttgacacaggcttattatcacgtcagtcataccgtcccgctactaatgtgtgctggcagctgccttcctgcctctcacgaagccgtacgtggcgcaatcgctgaatatattgatgaggaatatgggcatcaggagtggatcctcaatgatattcgtgcatgtgggggggatcctgaggcggtaagaaatggtatgccgggcctgcccatcgaaatgatgatcgcttacctctactaccgaattgagcgggtaaacccgatgagcatatttggcatggtgctcgtgctggaaggcactagtgtgtcaattgcaacagctgttgcggctcagctggaaaatactctggcgctgcctgagcaggcaaccacctacctgcgttctcatggagaactcgatcagggccatctgcaattctttgcgtccctcatggattcaatcactgacaagtgcgatcaggaggccatcatccacacggctcgtcgaatttatcatctctacggacagatgcttgaccaactgggagataacgcccatgaatctgcttaa

SEQ ID NO: 146537 - DNA, 1443 bp, Enterobacter cloacae
atgtttcttaacgcactgaaacagcaagctcttcaataccctgatcaaactgctcttaggggtgaaacaacgttatggagctggaagcaatatttagaggcagtcgtaaacgccgcatcgttgctccacgccctggggattagaaggctggcgcttgagcttgataatagtccggagtgggccattatcgatcttgcctgtatatctgtcgggatcgtcattgtacccattcctccctttttctcggaaacgcaaaaagaatgggtgcgtgcttcagcgtcgattgatgcgcaaattggtggtgagagtatgtctggatggcacagacatgatttcccattcggtaagctgcaggttagacagttaactgccccaacgtcgttgcctgtggggacatccaagattacctttacctcgggaaccaccggtgaacctaaaggcgtgtgcctgagtcagaagggaatgttatggaccgcgcaaacactcgctaccgctctgcgtccgatcgcaccggagaaacatcttgtcagcctgccgctcagcattctgctcgagaatttgtgcggaatctatatcccattattaatgggtgcagaaacagtgatattacccacggcccagacaggctttgagggttcaagtcaatttaaccccaaacgttttttacaggccttagtgacatggcaacctgaaagcctggttcttgtacctgaaatattacgggtgttagtccatctgcatcaggtggcacctgaaagtacacgttctctgcggtttgttgccgtgggtggcgggaaaattccgacgccgttaatggaactggcagcaaatgcaggcttacccgtttttgaaggctatgggttatcagagtgcggttctgttgtcgctcttaatttgcctggttcttccaaaaagagcagcgttggcaaacctctgccaggtataaacgttaccgttgatcccttacagcaactacacgtaacgagtccagccaatgccctggggtatctcggggaggaatcacaaaatacaacggttcctactggcgaccttgcaagcgttgatgatgatggatttattcatattattggccgtttaaaaaacgttcagataaacgcatacggtcgcaatttttctccagaatggcctgaagcagaagcgatggcatgccctgctgtgcgccgtgtagtcatttttggtgacggtttaacacgtaacgttgcgcttgttgatgcttttgaaggacaaaaggagctggcgcgtcaacagttaatgcgtatctccgcgcatcttccagactacgcgcaatttcaccgattgctgtttacgtccgaaatatcttctcccgaaatgattaccgcaaatggtcgccctaaacgaagcgccatctggcagtccctgaaacatattattctcacctgcagccaggaggaagacgcatga

SEQ ID NO: 146538 - DNA, 648 bp, Enterobacter cloacae
atgcgaataatgcccccctacactcttaaatggcttcacggtgaacacgaacagaatgatatttcagcgttaatccgtgaaaactatcagcaggtttatcaggcttcgatttcccgttgcatgccatggctgattggcctttacgatgcaaatggtgaacttaaggctgccagtggcgtacatatcgcctctcagggatctctttatctggaaaaatatctcgatagccccattgaggtaacgctttcgtcacggctgtcgcaatctgtttctcgcgccgcaattgtcgaaattggaaattttgcagcgagggatggtgcaagtgcacgaatcatgtttgcagcgctctgccaggtccttactgagtatcaattttcatggatcgtgtttaccggtacgaaaaaaattcgcaatacctttcatcgacttaatttgaatcccatcctcatcatgccggccaatcccgctcgccttgggaatgatgcacatgaatggggaaaatactatcaatatgacccacaaattatggccggtgaactggctggcggtcattctgcgctaactcagggcagtctattgatgaagttaataaacactttacccgaggctccatggactaatatgtcgggagaacatcatgtttcttaa

SEQ ID NO: 146539 - DNA, 540 bp, Enterobacter cloacae
atgaacagaaattacgccagcagtcagatcgcattgcactggcttgtatttgtagccattattatcgcctatgcagctatggagttaaaagggctggcggttaagggtagcccgatccgtgtaactatggcgatagtgcactatactgcgggctttagcgttatgttgctaatgattatccgggttgtcctgaaaatgacacatcgcgaccctgaaattataccaccaccacgctggcaaattgtggcgtcaaaaataatacacggattgttgtatttaatgtttctcctgttaccgttgctggggattgcatcgctttactttgggcagattgaatggtccttttttggaataaaaatgcctatagccacctatcttaatacagatgcacagcataccctcaaagaagtgcatgagtttattgcaaatgccgggtattttcttgtcggtttccatgctctggccgcattatttcatcattacttcgttcgtgataacacgctggtgagaatgttgccgataatacatcgacataaataa

SEQ ID NO: 146540 - DNA, 1206 bp, Enterobacter cloacae
atgaatgatatttcgagtgaaattgatcttgttgaggaagattgcggggattactctgatacaatcgcttttttaaaaatttgcttggttttcattaaaaatcagaaagtagaagatttgaagcgtttagttttgatggcgaaaaaagatctggatttttattgtccattaattccaaacgcagcaatgaagtatattccaattgatttttatagcccggaatgttcaaggaaaattgatgagatattagggtttatagataaatataagcccgagaacgttaagaatatcatagattgcgaacatcactttccaacaattaggtatataagttttagcaggggtgaatttaccatcgataaatggaataatttgtgtcgtgattatcccagtaatgcgctgagtttatttaatgactcctattttacgcactcagaaattaacaagatgggtaatgaatcagtgcttgaattgatttctcctcttttaagtttacctgatgaatataacgaggattttgtgtcgataattcctcgtcttggtacagtatttgattttctccctgatagggaatccgtgatcagacacagaataaattcattccacatcaaaaaaacaacgagtcaggctgtgagagcccgaaaagatattgcaccattcactatctttttggattctgaaaaaaatatacttataaactttgttcattctctttttactattgcactacatgagaattattcgatgccttcgttggttcaacttgtaaagaaaaactacgatgaagagtttttgaatgcctacggtttgtcatctgataacttactggagagagcgctgaatattaacgagagtaaaatgtttcgttcatcatgtttggcactctatttggcgaaaaatgtgaaagacaagcacgcatttataacaatattttttgaacgagggttggataaattatcatttgaactgtacgatgatgaaacaaaaagaattttaatagctgcgatatacgccttgttaattaatgttccattctatgacataaggctaatggaatttttaggtgaactttctcttctcacacgtgaagactttgaagcaagggtgatacttcagaatatttaccaacggtggcgcgagcgatcattcgcacctgtcaatggtgcgaacattttagataactggttagattatagttatttataa

SEQ ID NO: 146541 - DNA, 2130 bp, Enterobacter cloacae
atgctcaatatatcgtgggaccctgtgttgattgctgtctcttatctggtggcgtttatcgcctcctttgtagctctggacagcgccgggaaaattcccctttccagccgaaaagcggctttgttctggcggattgccggaggcgtaacgctgggcatcgggatctggtcaatgcatttcatcggcatgctgtcgatgcaaatgcccatgatgatgagctacgatctctggataaccctggcctcacttggtgcggcggttatagcctccacaacggccattaatattgccgttacgggcaaacacctctccctgtttagactgacagtcgccacgatcattctcagcgctggcgtggtctcgatgcactatatcggtatggccgcattgatgctggagggaagcatcctctgggatcagcggattgtcggtttgtccgtggtaattgcggttgtcgcctccggtgtggcgttgtggctggcttttcgtctccgggataagcacaaaggggtctttgtaaatcgcatactcgcggccttagtcatgggtgccgccatctgcgcaatgcattatacgggcatgagtgccgcgcatttccatgagatggcacgcacgcttcccggcgggatcggcgagctgggattatccatatgggtttccgtcaccacactctcacttcttggcgtgatgttaattatttcgctaatcgattcgcactggcgcaccacccggctgacggacaatttgcgacaactcaatcgccagcttgagcttcaggctcgcttcgatgccctcaccgggctcgcaaaccatcatcagatggatatccgaatgcaggactgtcttcgcagcgccttgctgagcaagaaacagtttgccgtgatcttcctgaatgtcgatcacttcaaacgcgtgaatgatacctggggccacagcgtgggtgatgagttattaatcactattgcccagcgcattacgtcccggcttacccgtgagatgacgctggccagactgggcggggatgcttttatcctcctggttcccgaatgtgatgatgaaaagcttaataccctgctcaccaccctcctcgcggatatgcgccgcccgctttcactctgcggtcacacgctaaacaccaccatcagcgcggggatcagcctctatccgaaagatggcgaaacgctacatgaactgaagtttaaggctgatgcagccttacaacatattaaagaggatggacgtaacggctgggcaatttaccgtccggagatgtcaacaacagtgccggcgcaaccgggttttctgcaggcgctttctcaggccctggaacgcgatcagtttgagctctggtatcagccaacctggcacgcggaagataagacgatccacggttttgaagctcttctccgctggcgtcatccggagcaaggcgttttgctgccgggactgtttttacccacgctggaacaaacgggtttgattattccggttggcaactgggcgattgaggccgcgtgtcggcagcttcatttctggacggaacagggtttcagtcagtggacattgtcgctcaatttatcccccgttcagttcgaacagccggatatctttcacatcgtctcgtcgatgctggaaaaatataatctgtctccctcccggctgattctggaggtaacagagagtaccgcgcttaaaaatctcgaccgcagtatcgagctcctgaacgcctttaaccatgcgggtgtcaccgtctctattgatgattttggtactggctattctaacctgctgatgttaagcgttctcccggcaaaagagctaaaaattgataagagttttgtcacctctatgctggaaaacgagaaaagccgtaagctggtggaaaccattattaatatcgcccggaccatggagatgaatgtcgttgctgagggcattgaaacagacgaacagcaggcgatactgaccagccttggctgtgactatctgcaggggttccttttctcccgcccattgcctgcggaacaggttccgtggctgctgctacagaaaaactcagataaacaaattatacccatgagtaaaattcatacggatcccgcatttatttcacaaaaaaatcatgcctga

SEQ ID NO: 146542 - DNA, 642 bp, Enterobacter cloacae
atggacagtgcaaaagaaattgccagagatatgctggatgccatcaatatcgatgggtctggcttctggggggccgtagcgaaaggttttatctctttccctgtcagtcttggatatctcgggtatgattttattgatactgagcatcgcagggaaaacctgggcgataaattcaggatggcaggattattaaagagaaatgtttttgacagagacatggttcataaaattataaacttctttatagaggattttacatctcgtatagatgtggtgaaaatatctaatgtgatcaaggaaatttctgggggagccgcagggaaggtgctgttttcacagttgacgggcgttaatcttggtttggctatttcatcccgtgctgttactgtgtttttttcaggatatatggcaggcatcctcctttctcttggtgcagaagtatcaagagcaatttacacctcccggaatcttaaggatcacaacccgaatatgtattacaagttaaaacaggcaggggatttggatcttttatattttgtggttgaagatattgtaaagccgtttgaagaagtctgtaaggttagtgagataaacccacaaaaatttgacgaaatatgtaagtattttatcgctgggctatag

SEQ ID NO: 146543 - DNA, 654 bp, Enterobacter cloacae
atgaatacgatggatctggatttaatcaataaaacgttttatccgggctggctgatggtcagccaactgcgcagtgggcaggagattcaggacggtgatgcgctttaccgccgggcctgccgctgggtggcggaggcccgcgaggcgttaacggacaggggatatagcgccgccgcctgcgatcgcatgctgtacgcttactgcgcgctgctggatgagagcgtgctgaaccgcgacaggcaggacgatggttaccgcaaatggcgcagggatccgctccaggcgcgctttttcagcaccctgaatgccggggaggagctgtgggagcttatccgcaccgttctgcgtgagcccgcgccggatgtggcggtgctgacctgcctgtaccggaccctgcaactgggctttgtcggccagtaccgcgagcaggatgacgagcggcgggaagacgtggtgcgtacactcagcgagtgcgtcccgccgtttgcgctgacggaggacgcgccggtggtggtgcgggcatcgcgcctgcgcagcggatggcgggtgtactggctgggctggacagcaggcattgttgtgctggcggcgatgtggcttatcttctcgtcatccctggcacagatggtggcccggatcgcagggcagggataa

SEQ ID NO: 146544 - DNA, 1341 bp, Enterobacter cloacae
atgaaaatctttcgcccgttatgggaagacggggcctttctggccccgcagcagttccagcagcagtctcgctgggacgcacacgttgcggatgccgtctcaagaatggcgctggcgcacccctggggcgtgctttgtgcggagttcgatgatagcgcgctcacactctcacggcttaacgccgtccgtctggcggtacgctttgcggatggaacgctgatcgatacggatcttgcggataacctgccaccggtatgtgatttatccgcgaccgggctggagagcgttgaagtgctgctgtgcctgccgctcctcagcgcgaacggcggcaacctggatgacggttgcgacagcgcccgtccacgtcgctggcagtcggagcgggtaacggtacaggagctggctggccatgagcgcagcgatctggctgtactgcgccatgcgctcacgctgcgtctctccacccaggaaaatgcggcatacctgacctgcccggtggcgagagttacccgtgatgcgcagggacagtggggcctggatcggcgttttattcccccgatgctgtcgctgtcggcaagccccacgctggtcagcgaactgggcgatctcctgcaccgcctgcaggctcgccgcaagcgcctgatggcgatgcgacgggaaagcaatgaacggatggcggacttcgtggtggcggatgtttccctattctggctgctgaatgcgctcaacagcgcggagccagtgctgacggagttgcaccagtcgccgtcccgccatcccgaactgctgtaccgggagctggcaaggcttgccggcagcctgctgactttttctctcgaacataacgccgacgatattccgctttaccagcatgacgcgcccgagcaggtctttccgccgctgtttaccctgctggaccggctgctggaagccagcctgccgtctcgcgttgttgccatcgtgcttgagcagggtgaggacagggaaatctggcgcgggcgactgcacgacgcgcggctgcgtgaaggggcggatttctatctctcggtgcgctcctccatgccgaaccatgagctgcagacgcgtttccctcagctgtgcaaggcgggcagccatgacgatgtatctgaagtcgtcaatattgccctgagcgggatggtgattaaaccgctgagccatgtcccggcggctatcccggtgcgcctggaaaaccagtattttgcgctcgacctttccactgcggcggcccgcgcgatgctggaagcaggaaactgcaccttctacacgccggagtcgctcggtgacgtgaagctggaactgtttgcggtgctgcgctcatga

SEQ ID NO: 146545 - DNA, 540 bp, Enterobacter cloacae
atgaaaatatcgttactgcctgctgctttactgactctttcactatctgctggcgcagctccgcagatgtgctttgatcaggccgggaaagattaccaaattgatccgctgctgcttatgtcaatttcgattaaagagagccatcttgtaccggatgcgataaatggatcaaacaggaatggaacggaagatgtctgcggtatgcaggtgaacagttcccattacggtaaacttaaaaacttcaatattacccgtgagcgcctgttaaatgatccatgtatctgcgtttatacgggagcatgggtactggcgcacaactttcggtcatacgggaaaaactgggacagcgtggggatgtataatactggaccgagcaaaaagctcattgtacagcgcaaggcctatgcacaggatatcaaaaatatatatcgtgtattactggccagaaaaaagttactttcagaacgcctcgcgccagctgcgggaaaggagcatgatattaaaattgcagaaacagcatcgtcacatagcgtgcagtaa

SEQ ID NO: 146546 - DNA, 303 bp, Enterobacter cloacae
atgtggcgtgagggtgaaagagttttgcttccggggaaaacaaccggatatagcatgcgaattcctgaaaaccttgcagatgaaatcagggcaatggcgaaggtgcataaccgtagtctgaatgatgaaatgctcacccgtctgatgaatacgctgggttattttacggaaaggttacttgaccagaatgaggatgcgcaggcgcttaaagttctttgcatggagttcgaggtgttcctgaaagaaaaaataaaggaggtggagaaaagtgaccttccctgggatgaaaaaccgtccctgtga

SEQ ID NO: 146547 - DNA, 603 bp, Enterobacter cloacae
atgactacgccaattcttgaagcccgcgacctcagcaagcgcttccctggtccgaaaaaactcttttcaccggcccggtttgtcacggcggtcgatcgcgtttcgcttgcagtgatgccgggtgaaacgctggcaattgtcggcgagtctggctccggcaaatctacccttgggcgtctgctgctgcgcctgctcgccgccagtgaagggcgcgtgttttaccagggtgaggagattaccgacgcctcgggcgcccgtctgaaccagctccggcgtgagctgcaaattattttccaggatccgtttgcctcgctgaacccgcgcatgacggtggagcagatcgtcggtgagccgctgtggctgcaccagaatatgaagaaagccgaccgacagtatcgcgtcgccgaactcctcaaaaccgttggcctgcctgccgcctggtccgggcgctatccgcacgaattttccggcggccagcgccagcgtatcggcattgcgcgcgcgcgctggcctcgggaccaaagctgttgcttggcgatgaacccgtctctgcgctggatgtttccgtccaggcccaggtcgtcaatttgctggaaagcctga

SEQ ID NO: 146548 - DNA, 156 bp, Enterobacter cloacae
atgatcgcttcccgctttggatgcagagtaagggctacttggcgcataaggtgtctcttcagtaaagaggtcatctgcatcgtgcaggtcaccaaatacctcatcggtagaaatatgatggaaacgaaaagcctttttacgctcatcatcaagtga

SEQ ID NO: 146549 - DNA, 261 bp, Enterobacter cloacae
gtgaagagcattcttcattttggtagcatcaatggcatagcgaagatcgtgtccagggcggtcagccacaaaagtaataaggtcggcgaaactggaaatttctttgggttttttatcgataattttatcaagtattgcacaaatggtttttacaacatcaatattttttcgttcgttatggccacctatacaataggtttcaccattctcgccctctgtcgctactttatacagtgcccgggcatgatcctcgacatatag

SEQ ID NO: 146550 - DNA, 840 bp, Enterobacter cloacae
atgcaccttcgctttggtgagactgaatcagcctttgattacatgatggccacccgcgagtatctcgagcaacacggcaagccccttgcgttctacagcgacaagcacggcattttcagggtcaataatggtggttcaaccacaaccggtgttacccagtttggccgcgtgctttctgaactggggatcgaactgatttgtgccaacagtccgcaggctaaaggccgcgtagagcgagcaaatcagacacttcaggatcggcttatcaaggatatgtgtctcgagggaatcagcagtattgaagcagccaacgcctggctggataccttcattgccgacttcaatcgtcgcttcgcaagaccagcaaaataccccaaagatctgcaccgaaccgtggctgaaagcaacgaagagctggatgatatctttgcctggcaggaactgcgtaagctgtctaaaacgctgacattccgctatgacaaaatgatatatctggttgaacctagtgaagaaaatactcgcatcgctggcgaaaaaataacagtcttcgactatccggacggcacgctggcattcaaatacggttaccgttcactcaaatatcaggtgttcgacaaactggaatgtgtcgaccaggggcaaatcgttgataacaagcgtcttggggctgttctgaaactcgctcaggacaagatggacgaactggagcgggacgggaaacgggaccgtagcaagaagatgcctaaaaggcgggcacaggcccgggtgcaggaacaagtaagagctatcaatccggtgctggcaaacccagcggaattcagggccagcctgaaacgttag

SEQ ID NO: 146551 - DNA, 354 bp, Enterobacter cloacae
gtgaatgacaatcagatttctgttcactggtcagatctaccgaaagatgagctaacccgtttctgccaggatgtcgatgccggcactcagggtaatttcctcattgcaccggtcaaaaaattgccccgccgcaaacgcggtgagcattccacaaaagccaaatgtgagaacccggcctggtatcgcccggagcattataaaaagctctccggacagctcggtcatgcctacaatcgcctggtgaaaaaagacaaagaaaccgggcaggtcagcctgcgcatgcatgtttctcgtcaccctctctatgtcgccggccgccgtaaggcgggacgtaaatatagcttccgtccgtaa

SEQ ID NO: 146552 - DNA, 1452 bp, Enterobacter cloacae
atgagtcgatacatcgaagggaagcgtcggacacagatggtgttgatgcccgaatcactggatgacttcgttggtgaagacaatccggtgcgggtgatcgacctgtttgtcgatgaactggacttgcagggtctggggttcgcgtctgcgcaacctgcggtcacggggcggccgggctatcacccggacttgctgctcaagctgtacatctacggttatctgaatcgagttcagtccagccgccgacttgagcgggaggcccagcgcaacgttgaagtcatgtggctcacggggcacttggcgcccgacttcaagaccattgccgatttccgtcgagacaacggcactggcattcgcaacgcctgcaagcagttcattgcgatatgccgcgaactgaacctgttcagccaggcggtggtggccatcgatggcagcaagttcaaggccgtgaataaccgggacaagaatttcaccacacacaaactcgagcagcgcatcaagcagatcgaggaaagtatcgaccgctacatgcacgccctggataccgccgatcgcacgcagctagcggagacggaagccaagacgaagaacctgaaggagaaactcgtccggctcagaaagcagatgcgttacttgcaggagatgggtgagcgcctgcgccaggcgcccgatgagcaaatctcgctgaccgatccggatgcccgctccatggcgaccagcggccgtggcaccgggatggtcggttacaacgtgcagatcgccgtcgataccgagcatcacctgatcgtcgcgcacgatgttgtgaatgtcggccatgatcgtacgcaactcgcctcgatggccatgcaggcgaaggcggcggtagatgaagaaaacgtggaagtgcttgctgatcgtggctactacaaggggccggaaatcctggcctgcgagcagtcaggcattacgcccttcgtgccgatgacgatgaccagcgataacaaggcgcgtggcctgtttgacaaacgcgacttcgtctatcaacccgatcgcgatgcgtaccgctgccccagcggtcagttattgccgcgacatcatcagtctgtcgagcaagggttggtcatccacacctattacaacctgagcgcatgcatgcagtgccccatcaaggcgcgctgcacaaccgcggaaaaggaacgccgagtccggcgcggggagcatgagaccgtattggagtccatgcagcgtcgcctggatgcctgccccggcaagatgcgacagcggcgcagcacggttgaacatgtgttcgggacactgaagttctggatgggcgccacgcacttcctgacgaaaactcgaccacgtgtgcagaccgagatgggcttgcacgtgttggcgtacaacctacgccggatcattagtctgtacggtcccaaaggcgcaatggatgtgctgcggtgggccgcggcttga

SEQ ID NO: 146553 - DNA, 672 bp, Enterobacter cloacae
atggagcgccgcgctctggtgcccgagatggagaagctgccacggtcaatggacttgcagcgattcgatgcctggcgcttgggccgcactggctggcccatggtggacgcgtgcatgcggttcctgcaccaccacggttggctgaacttccgcatgcgggcaatgctggtcacggtgggcacgcacacgctgggcttgccgtggcggccggtggcggactggctggcccagttgttcgtggacttcgagcctggcatccactacccgcagatccaaatgcacagcagcatggctgccagccctgtcctgcgcctgtacaaccctgtcactcaggcccgtgaactggactcaaagggagacttcgtccgctgctgggtccctgagcttcagcaggtccccgatagttggattttcttgccatggagcatgccgacgccggcacgcctgcgctacggcttggtcgatggtgccgactatccgctgccgctggtgcagttcgagcaggcgcatcgatgtgtgaaggccgatatcgccgcgctacggtcgagcctggatctgcagccggcgcaagagttcaaggagcgagccgggcgtctggcgcacgcccgccccaaggagcgcctgcagcgacaggaagacgcggccaggccttcacaactcaccctgttttag

SEQ ID NO: 146554 - DNA, 1461 bp, Enterobacter cloacae
atgaatatactgaagagtggcatacagaaaaaatgtgttgctgctgcgctgttatgtgcatcggtaacgtctttgcctttatacgctgaaaccacggccaactggtgggaaagatggcaggataaccaggccttcaatgaagctctggatgaactcggtatgagttatcaactgttatctgaagatccacaaaaaaccctcacccgttcagccgacccgactgatgttctctactggcaaaagcgcaccatgcaaatttatggtgatgctgacaaagacatttattatattccagccattgaagatcatgatgaagctcgtgccagaacaggcttcacaggtcgcaatccctattttaatacctattattatggtgaagagggtgatacgttcacattgaccacctcttcccaacccgatgatgtggtctgctacgcaggactggaaaatcaatacagcggtacaatcaccactaaatatcaggtgcagttaaatgccaatcactcaacgcaatataccctgagtgaaaatggattaatgctgctggcctgctgggataaaagtggtacctatagccatatgaacacactcgttcgtgtggatgtcacatcgacgaccgcgaaaaaacacccgctatttgttttcggacttaacacaaaagaagagtggaaggccctgagccagcagagtacaccgaccgggcaaacgctgctgtttgacgggcgctctcggtatgtcgtgaataattccaccgctaaagcgtcactgaataccaatgtgctgcaaatgctgcgcgaacaattaagctacgtcatggactatgatagggttaacgggcttgatgggtcatcgtatttacatcagcctctgcgtggtttgaatttcggtatttttaacagctgctgctggtctcagggaggagccggacgtattgggatcggctttggcaacagcttaccaaccgaaaccagctggggccattggcatgaatatggtcaccaaaatcagatgacctgggcatgggacgggttaacggaagtgacaaataatattatgtccgtttcagcctgccgtgtgttacgcggagaagtaacggataaatcctgtcacgaaaatctgtattacaacaatttctcctgggatcagcaggccgtcggttctttcctgaacgctggcgaaacacatcagtttgatactgacaatgacgtcttccgtaaattaatgatgtttacccagctgaaaacatcgtggcccgatctcttcgcttatattggcaaaacctaccgcgaaacctataacgagggtaaaggcaaatctctggttgcaaccaatcaacaaaaaattgatttctttgtggtcaatgccagcaaagcagcgggacgtgatttacgtgaattctttacacgctggggtttaggctattccgctgatgctgactcacaaattgcagccctgaaataa

SEQ ID NO: 146555 - DNA, 645 bp, Enterobacter cloacae
atgatgaatgttgtgattaacgataaggacttattctttcggtttgggctgcttaaacttcttcagcaaattttctcccttgcagaaacggatttcattgttagtgataaactggatgcaacgacagttcatgacgttgacgttattgttatgaatttttcggtaggcgaaacggttatttgtcatcaggttctcaaaaaaaggaagaaaaaaagtttattgataggcatctatccggagaaaaaaaatcctcggttcgcaagactaccgttgtgtgtcaagaacagtgtttttattgctcgtgacgattctatcaaagcgatcaccgacaaaattcattttgctgctaagagtcttaccgtgtcgcgagaaggggagtatgcctttagctgtttagactgcgcgtgtagagtgttgtcgccacaacaaatgaaaattgctgttgggtttttccatggacaagatacgaaacagattgcgaaggtgttaagtatcaatgccaaaacagtcagtgcccacaagcgacagatcatgcaaaagtatgatcttgactgtgattttgagctgctgactctcctgaatcgaatggggcatcaacagaatatgcgatatttatttagtgagcgattaatcttcattgtgtag

SEQ ID NO: 146556 - DNA, 660 bp, Enterobacter cloacae
atgattagtgctcttcgctttcagccaattttttccgttaggcagctaaacattttaggctatgaggtcttaagccagctcaaaagctcagtggacaacgagatttatttcagtgcgctggatattccagcgcacattactcttctggaaaaacaacttaccattttgaatcaacttgatgataatgaaaaatattatataaacctgcctgtttcaatgctgtgcaacgtaacggcaattcattttatattaagttctttaaataaaaatatcatcattgaacttcaggatcctgctaatcttgataagcttaatggttttgaacgcatggcgttgatgagcaatcttcatcttattcattcgaatggatttgaagtatggattgacgatctcacaccagcactattacgggtgctatcatcttttatttttgcatttgatggggttaaagtggataaaaattttttctggcagcagttagaaaatccgagcttattgcgttcctttgtttactgttctagtctgttaactaacaatatccttattgaaggaatagaaactatcgagcactacaatatagccattgagtgtggcgcaacgcatttacagggttatttgtggccagagcatcactataccttaccattggtagtgggatga

SEQ ID NO: 146557 - DNA, 558 bp, Enterobacter cloacae
atgaaataccaaacgtcattgcagaaaatattgtcagatgaccctgtaagaatgcagatcctatatgcagttcgagaactggaactcaatgatggttggattggagcgggatttgtacgagacgctgtttgggatcacttacatgggtatgggttaagtcctgtttctggtgatgtagatgtcgtctggtttgactgtgagtactgcaacccagaccatgatcgctacctggaagacaggcttaggcaacaattaccttcgttagactggtcggtgaagaatcaagccagaatgcatcaacgtaatggtgatcatccctatacctcaacgggaaatgctctactgcactggcctgaaacagctacggccgtagctgtcagattggggaaggaaggtctcgatatcgccgcaccttatggactttctgacttatttgaactgcgtttacgaccgactcctgcatttgaacgtgaaaagctggactcttttaaacaacgagtcactgcaaagcaatggttggaacgttatcccaggttacagctcatcgtttccttataa

SEQ ID NO: 146558 - DNA, 255 bp, Enterobacter cloacae
atggtggatgaaacctttatcattatgcagctaatccttggggatggattgagctgctgggtcttgccatcgatccaatcgctaagcttagtgagcgtggatacagtactgttgatcaaacccctacaggtgggctggattattcgggaagtaatgacttgtataataaagctggcattaatcctgttgtttatattgaatataccggagattatttgcaagatttccatgctgcaaatacagaggctggattga

SEQ ID NO: 146559 - DNA, 1590 bp, Enterobacter cloacae
atgactctcagcacatcacatcatattcgcgaacagtttgaacactgtctggcggtcattcgccaggcgtcggttgaaattttgcttctcctgaatgtacatgtttctgagggaaaagatccacgctggctcctggaacaactggatagcgcacgtttagcgctcgggggatgggcagccgttgcgaagacgctcaatctgaatgatgccgagatgtcggaatttacgctgcagctgcgcctgctgcagcagcgcgttccacagtatgaaagcgggcaggatgtcagcgaaaaccagctgattgcggcgatgcgctttgtgaccacgctggaacttcttcgtttgcagcaaccgttgctgacttacagcacggagctggcaacgggtagcgaactgcagcaacagcaggcgcacaagcaggttcgcgccattgagctgatgattaaaggacttattcagcaggcctggcccgatcaggtgcggctcagtaatcatcttaagaccttatttaatgccgaccgggtaagacgctggctgaagctcggggagatcaacgatatcctgagcgggatgatgttcagtgagctggcgcagatgctggtggataaaaaagagttcagccggtattacgcctcgctgtttaacgatcctgccatgctgacgctcctggtagaaccgcgtaaaacgctgcaaaccttccttgatgatattcggcaaattcgcaacaacatcacggttcagaaaacgttaagttcggcgcaaattcagctgctggataactactacatgcagatttcccgaccggttcaacgtgcattcgaagaggggagaacgcgcgtcaacccagccggattgatggcggtggacgccagtgaactgcacactttctgggaaaaggcgcagaaaatggatcgggttaccggtggcgatctgtttgaggttcgtgacacgattgaaaagccgacccagcgcgcgccgcgcacgcccgaacagcgtgagcagcttatctccggtgcgttatggggcgcggttggcgtgatggtaatcgccatcctggtgggcggcttctggctggtgaccagcagcaaaccgcagtcatcggccgaacacactgcgcaagcggctccgccgaaagatatgcgcgaaaccccttctgcgcgcgagacgctgacccgcatgggggtgacctgggacgacaataatttccgttcagcgattaaccgcaacgatacccgtgtcgcgcagctctttttgcagggcgggatggactggaaactgtcatggaccgaagaggcgatgtcggcaggccatgacgacgtgctggaactcatgctgcgctaccgacggaacatgacggaagagaagccatgccgtcgctttatcaacacgctcagccacgcgatgtcgaacggtgaatccctgacctcagtgcgtaaagcgtatctcaaagcgttctgcaccgtgcccgccgtggtgaagcgccagcagcacgatctggatatggctacgcggcgtgcgcagtcgcaaccggatgccaccacgaaaaaatggcagtccattcagactgccatttatgaggttatccgctga

SEQ ID NO: 146560 - DNA, 873 bp, Enterobacter cloacae
gtgctggaaggggcgcccgcgctttctgaacactggacgctatttaaaaccaacgaaggaatgtttgacgaggcgcgaactagccaggccgcgacccttattttcgccctgagtcagaataaccaaatcgaaaccattgcccgccagattcatactctgcgccgccagcgcggtagcgcactgaagattatcgttcgtgaaaccagggccagcctgcgcgccaccgatgaacgtttgctgttgcggtgtggcgcaaacatggtcatcccctggaacgccccactctcccgctgcctgacgcttatcgaaagcgtacaggggcaacaatttaaacgcattgtgccggaagatatctctacgctgctctcaatgacactgccgctcaagctgcgcggcttccagccgtggaccacgttctgcgaagcggtagccaatatggtgaataacacgctgttaccgccagacggtaaaggggtgctggtggcgctgcgcccggtgcccggtattcgcgttgaacaagcgctaacgctctgccgcccgaaccgtgccggggatattgtcaccatcggcgataatcgcctgttgatgtttttgtcgttctgtcgtgtgaacgatctcgacaccgcccttaaccacattttcccgttacctacagccgatatcttctctaaccgcatggtgtggttcgaagacaaccagattgcggccgagctggtgctattgcgggaagtcgggccggaaaaatggggcagtccgctggcgggtacaagcgatgagccgaaaatcatgaatgccgagcatgacgggcaagtctggcgacgtatcccccaacccctgcgactgttaagtgaagagacggggagcgcatcatga

SEQ ID NO: 146561 - DNA, 198 bp, Enterobacter cloacae
atgatgtccatcgccgatattattgaactcgttatcctttgcgcgctgattttcttcccgctgggctatctggcacgccactggctgtaccgcattcgtcttattgcaagaataatgtttattaaacctcgctacgttaaaccggccggcatattgcgtcgggaatcgttcgtcaaggcagaccgaaaacatgactaa

SEQ ID NO: 146562 - DNA, 1680 bp, Enterobacter cloacae
atgactaatcaaacgctgacgccttccagaccctcgacgctgtggcaacactggcgcggtttatccggctggaatttctattttttggtgaaatttggtttgctgtgggcgggctaccttaattttcatccattgctgaacctggtgtttatggcctttttgttgatgccattgccaggtccgggcctgcaccgcctgcgccactggattgccctcccgattggtttcggcctgttctggcatgatacctggctaccgggtatcgatagcattatgagtcagggctcccaggtggcaggctttagcgccgattacctgctcgatctggtaacgcgttttattaactggcagatgattggcgcgctgttcgtgttgctgatcgcctggctgttcctggcgcagtggatacgcgtcacggtatttgttgtcgctattatgatctggctgaatgtgctgacgattgtcggcccggccttcaccctgtggccgcaaagcacccaacaaaacacccttgccacaacgggcggtacggtggcgccgaccgtcgcgaataccgcggcaacacccgtggtgggcgatattccggtacaaaccgcgccgcctacctcagagaacctgaatgcctggctcgccagtttctatgcctccgaagagaaacgccagacgccgttcccgacacagttgccggcagatgcacagccttttgatctgctggttatcaacatttgttcgctctcctggtcagatattgatgccgcaggtttgtcatcgcacccactgtggtcacatttcgatatcgtctttaagcagtttaattcggccactgcctatagcggcccggcggccattcgtctgctacgcgcgagctgcggtcagacatcgcataaaaatctctaccagacagccggcgcccagtgctacctgtttgataacctggccaaactgggcttcacccaacagttgatgatggatcacaacggcgtgtttggtgatttcctcaaagagatccgcgacaacggcggcgtgcaggtgccgttgatgaatcaggcaggcttgccgccggttctgttgtcgtttgatggctccccggtctatgacgataccgccgtgttgaaccgctggatggagaacgaggcgaacaataatggtcagcgtaccgcgaccttctataacctgctgccactgcacgacggtaaccatttccccggcgtgcgccagacggcggattataaaattcgcgcccagaaattgtttgatgagctggatgccttcttcacgcaactggagaaatccgggcgtaaggtgatggtggtgatggtgccggaacatggcgcggcgctgcagggcgacaagatgcaggtttccggcctgcgtgatattccaagcccatcaattacccacgtcccaacggcaatcaagttctttggtatgaaggcgccgcatgaagggcctgcgattgagatcaatcaaccgagcagcttcctggcgatatcagaactggtaacacgcgtgctggatggcaagatattcaccgaagatcgtgtgaactgggatcagttgaccagcggcctgccgcagacagcaccggtttcagaaaatgctaacgccgtggtgattcagtaccagaataagccgtatgttcggctgaacggcggcgactgggtgccctatccgcagtag

SEQ ID NO: 146563 - DNA, 999 bp, Enterobacter cloacae
atgtttaaacgcgttttcgccatgatggtgatgatggttagtgtgcttttttcctcgttttcacaggcgggacaggcctgggaagcgtacaaagcgcgctttctgatgacggatggccgtattgttgataccggcaataaaaacgtctctcacacggaaggccagggtttcgccatgctgatggcggtggccagcaatgataaagcggcgtttgaccgcatctggggatggacagataagacgctcaggaacaaggacaatggtctgttctactggcgttttaatcccgtcgagccggatccgattgccgataagaatgacgcaacggatggcgatgcgttaattgcatgggcgttgttaaaagccagtcagcgctggaatgataacagctatgccaccgcatcggatgccattacccaggcgatgattaaacatacggtgatcaattatgcgggttatcgggtgatgctgccgggggcgaaggggttcaatctcaacagttatgtgaacctgaacccgtcctattttatcttcccggcatggaaagcgttcgccaaccgtagccatctggtggtctggaatgatctgatccgtgatagcactacactgcttggcaaaatgggctggggtcaatcgcatttgcctaccgactgggtatcactgtcggcggatggcaaactgagccctgctaaagagtggccgccgcgcatgagtttcgacgccattcgtattccgttgtatctctcatggtggaacccgcaaagttcgctgctgacgccgtggcgcaactggtggcagggttatgatcgtagccgcaccccggcctgggtgaacgttacaaccaacgataccgccccgtacaatatgaatggcggtttgctggcggtacgtgatttgacgatgggtcaaacgtctggcgagccgcaaatcaacgcacaggatgattattattctgccagtctgaaaatgttggtctggctggcacagcagcaacagtaa

SEQ ID NO: 146564 - DNA, 480 bp, Enterobacter cloacae
atgacgtcgagtacggctaatcctttactgctgtcttattttcaacggcagcaaacgccggccggttggtttgacctgctgtcggtaatggttgatggcatggtgagaaacgtgggggaagcggaaagccaacccttcttgcgccagatgggggcatcgctggcggaacgttttcctctgcctgcctcacaaaccatcggcgaactcgaaaccaacatcaacgcgctgcttgcggagtttaattggggctatattgatattgatgccagcgaagagggattatcgttccgccatcaggggttaccggtctcccgggatgagaacagccagacgcgttggtgttacgcattttgcgccatactggaagggctttattcccgttggctgcagggacagggcgggcaatcgcatctcgcttttagccgcgaacggctttactccgtatcggacgttgtgttccgctacgctaacccacaatga

SEQ ID NO: 146565 - DNA, 4041 bp, Enterobacter cloacae
atgatgataaaaaccgcccgccgtttgacgacgctgtgcctgtccagcgcgctcactttcggtataccagggctggcccatgccgccgcgaatgatgccgcgctcaaagccttatttgaccaggcgaattactggcatgagaaatcccacgatgacctggcgatggagtcgctgcgtaaagtgttgatggtggatgccaataacacccaggcgatgtacctgatggcgttatgggcgcagcaaaatggcgatctgcaagtctcgtcccagtggcgttcgcggctggcgcaggtttctcctgacgatccggggttgcaggcgctggataatgccaaacaactgacgcaggttccgcaggggcaattgagccttgcccgccagcaggcgcgcagcggtaacgtaccggcggcgctggcgacctggcgcagcatgtttaacggcgatacgccgccacccagcctcgcccctgagtactaccagacgatggcgggagataaaactctttatccgcaggccgtgtcgcaactgaaaaatttcgtgatgcataacccgcaggatacctcggcgcgcattgcactcggcaaaatcctgacctggcgtgaagagacacgccgcgacggcattttgttgctcgaaccgatggccagcggcagtaaagaggccgatgacgggttgcgtcaggcgctgttatggctggggccgcaggcaggcgatgagcgcttctacgacacctggctacagcggcatccgcaggatactgatgtccaaaactattaccgtaaaaatgtcggcggcgcggcgaaaggcgcgggctataccgcgctgaacagcggtgataacagtgcggcaaaaaacaaatttgagcaggtgctgcaaaccaaccctaacgatgctgacgcccttgccgggatgggctacatcgcccagcgtagcggtgattacaaagcggcggcacagtatctgaatcgggcagccagtcagggcggggatgcttctgatgagcgtaaaaatcaggccgcagacgcggcgttttacggtcagctcgcccaggctcagcaggcattgaaagagggtaatattagccaggcgctggcgctttcggccccgctggcacaagagagcggggagcgtggcacggcaggaaaactgttccgtgcttctgtactgcggcagaacaaagacttttcgcaggccgaacagaccctgcgaggtcttctcaacgagcagccgcagaacgccccggcaagggaaaacctctattacgtcctgcgcgaccagaataaaacggaagaagcgcaggcgatgctgcgcactttacccgccagcctgcaggaaaaactgcagccgcgtgtggtcgcgggggcgcctggcgatccgattcgccgtcaggcacagcaactggtccaggccggtaatactgaccaggcgatttcggtactgcgccagggcgttgcccgcgtgccggatgatccgtggttgcgtcttgaccttgcccgcctgctgcaaaaatccgggcaggaaggtgaagcggccacggtgatgatcccggcgggtcgcgatggtgctaacagcaattcactgtacgccgctgcgctctatgccagcgaaagcggggcctggcagcaggccaactctctgctggcgcgtattccgccgtccagccgtaatagccagatgcgcgatctggcggaaagtgtgaattacaacctgcaaatggcgacggcagaacgttacctttcacaagggaacatgaccgcggcgtccaatacgctgaaagcgctggccagtcagccgccgaaaagcccggtcgatgcagggaaactggcgcggatgcttgcccgttcgggtgacatcaccaccgccgtatcgctggtgcgcaacagtattaaagatggcgtagaaggcaacgccggggattatgccgatcagatagcggtactgaaccaggcggggcttactcaggaagcgcaaaccctgatgtcgaacccggagctacaggcgcgcagtacgcctgctcagcttgcggggatccgcaatggctacgtgattaatgaagccgacaaactgcgtgaagagggcaactacgccgcggcgtatgacaagctgatccgtgcgctgcaaagcgacccgcaaaacaccgatttgatgttcgccatgggccgtctgtaccagacaggcaaaatgaacaaagaagcgggcgtgctctatgactacctgatgacccgtgataccgaggatcaggcggcacgtgtgggggctatcgacgttgcgctgtccgagaataacgtgcagaaagctactacccttgccagcggtctgcgtagcgacagctcaccggaacgcatgctgttgctggcgcgtctggaagaggcaaaaggcaaccaccagcaggcgatgacctacttacgtagcgcacgcggcaagctggtggggctggagtcgtctaatagcgccgctacgccgacgattggcggcatactgttggcagataatccgtttactaccaccagtaaaacgccgccgcagtcgagttctccacaggcgttgtacggcactattctgccgtggcaggtcgcgcaagtggctcgtgagccggggagcagtttaccgggcacaacccgtaccgatttgccggtcgagaccgcgcaaagccgcacgctgcgtcaggttgataacatgatgcaggagcttgatgagaagaaagggatgtggttgcagggcgaggtcgatatccgtggccgtgacggtgagtcgggcaccagtaaactgaccgaagccaaaacgccgctgacctggtcaagttcgccgtttggtgagtcgcgcttcgagtttaccgccacgccgatcaccctgagtgccgggagtgcttctggcgatgcctggcgacgctatggctcgaacccgctggcgaatgcggcatcaaatttagcatcgacaatcaataatgagatcaattcgctggcgagcatgacagcagatcagaaagcgcaatatttggtgttgcatccggctgccgctgcattggatgggcttagcgaggtctcttcggccgattttggtcaattcacatcgagaggtttgacgaaccttgccgcgctaaatgccgcagaggggggggcgctacgaaactatctgaaccgttcctcactaaaggctgacgtctcgcagccaggcgatgtttcaacagactcgcaaaatgggaacggtgtagagcttaatatggcgcttagcggtgacagctatcgcctggatattggcagcacgccgctgggccaggatctgaatacactggtcggtggggtgaaatggtcacctaagttatctaactacctctcattgatcttcaccggcgagcgccgcgccgtgactgatagtttgctctcgtatgttggtttgaaagacgcttactcaggcaaaacctggggccaggtgactaaaaacggcggtaccgtgcaattaagctatgacgacggtgacgcaggcttcttcgttggcggtggtggttacagttacattggtgaaaatgtggcgagcaacaccagtatgaacgcagacgccggagtctatctgcgcccatggcatgatgatttccgtcaactgcaaacaggtttaagcgtcagttggatggatttctcgaaaaacctcagttacttcactttcgggcagggcggctattttagcccccaaaattatgtcagcgtgtcattgccagttgatttttcacagaaaattgacaactggaagcttagccttggaggctctgtggggtatcaatcctacacccaggatgctagcaattacttcccgacagactccgcaatgcaaagcgctttaacagattacgtgaaaactggttttgcaaaagaagcgcagtacggcagcaaatcgcaaaacgggattggctataccttccgggcagggattgattacaacctgaacaagaacatgaccgtcggcggtagggtcggttacgacacctttggcgactataacgaaagtactgccgggatctggttccgctatatgttgggagataaataa

SEQ ID NO: 146566 - DNA, 2295 bp, Enterobacter cloacae
atgaaacgtctgacaacactggctgtgctggtcggcgcactttttatgatgccgctgcatgccgaagacacctccatcgagtcgctactgaaattaaacgagccggcggagacgccacccgtgccgccgccgggcgcaccggtatttattccttcggtggttaacagcatcagtctcgcgcagatgggtttcccggaagggatttccctgacgggtggtcagttccaggggggcgcctcctttaccctgcccgtggaccaggtgattaccacggcgcgccttgaactgaacctgaaagtgtcgcccgcgatggtggcgcgcaatgccaccatgcagttgatgctaaatggtcagccgctggggacggtaccgctgaccgtgaccgacagcgacaccgcgcgttatcagttggatattccctccgcactgatggtgtcgagcaacaacctgagctttaaaatcaacgatggcgatgccatgcagtgccagcgcgacctgagcgataaatatcgcgtcaccatcatggcggattcccgtttcgagctggaagggcagcaactggacattggcgctgatttaagccacttcccgcgcccgttctttgacagcatgcaaatgaccccggcggcgatcgccatggctttcccggcgaagctcagtggcgataccttaagcgccagtgcgctgatctcatcgtggatggggatccaggcagactaccgtggcgtgtcgtttgccgcctatcatgaccgcttgccggaaaagaacggcatcctgattggtcatccgggcgagcaaattggtggcctgacgctgccggctaccgagcagccgctactcaaagtggtcgataacccggcaaacccggtttataagctgctgctggtggtgggtaaagatgatgccagcctgcgtgcggcggcatggcgtttaacccgtggcaatttcgccatgcagacgccgtcggtggatgtcaccacccaaacgatcccggcgagtaaaccttacgatgcgccgcgctggatccctaccgatcgtccggtaaaactgtcagaactgatccgtaaagatcagagcctgaccaccacggggctgtggcacgatgcgttgcgcgtagcattccgtgcggcaccggatctgttcctgtgggatggcgaaacgattcctctgcacattggttaccgtttcccgacggaaagctggattgatgaagaccgttcgtggctcagcatgaccatgaacgatactttcctgcataacctgccggtgaataagcagggggcgctggaaacgttgtggcataagcttggcggtgatgcgcgccaggagaagtttgatatgccgctggagccgtacatgatctatggcgacaaccagctctcgctgtacttcaacattcaacccaaggcgagcgccccgtgtagcgtgctgctgaacaataacattaagagccgtatcgaagacgactcgtggattgatctcagccatacgcgtcacttcgcgctgttgccgaacctctcttattttgtgggcgcgtccttcccgttcacccggcttgcggattattcggaaacggtgctgatgctgccggaaaaaccgactgaaacgcagattgccacgcttttagatatggcggcacgttccggtaacgcgacgggaacggcgctgggccgcaaccgcgtgttgctcggcgtacccactggcagggcgggtgttgaactgctaaacgaccgcgatgtgctggcggtcacgggcctggatcagcatgactttaaccgcgcgatcctcaatacctcgccgtttgtgatgcacgactcgacgttgggcgtacgtgagccaacgacctgggagcgtatcaaacgctggatagcaggggactgggcatcagacgggctggaagccgaccgctacttctcctccaacgaagcttggcgcgggtttgtcagcttccgttcaccgtggaataacgatcgtctggtggtactggctatcggcagcaatgacgagcagctctcacgtctgcacggtgacctcgcctcagcgaaaattaacgccgggatccgtggcgacgcagcggtgatcaccaatgagaacggcgtgcgcagcttccgcgtgggtgagcagttcccgagtggcgagatgccaacgcaaatgcgggtgatttggtatgcaaatcagcactcggcgctgctggcgattttagggctgctatttggttgtatcgttggctcggtgctctttgtctggctgagaaaccgcgcgaaacgacgtctggatttggacaaccgcaaataa

SEQ ID NO: 146567 - DNA, 2115 bp, Enterobacter cloacae
atgaaaaagttcctttatgttttgctggtactggcaatgctacctgttgcgctgctggtcatcattacgcctatggacagccagaaacagtatatttttggtctgctcagtatcggtgtgctgtttttaatggggtttagcaaaaaacgcagtgtgtctgtcattatggtggtcatgtcgattttattatcgacgcgctatatgtatttccgcctgacgcaaaccctgcattttaattccgaaattgaaaccattcttgggatggggctgtttctggcggaggtctacgtctgggtcatgttgctgctgagctatctgcagacggtctggccgttaaaacgcgaaattgtgccgctgccggatgatatgacccagtggccgacggtggatgtctatattcctacctataacgaaccactggatgtggtgcgtgatacggtgctggcggcgcaatgcattgattatcctagcgataagatgaatatctacctgctggatgacggcaaacgccgcgagtttgctgtttttgccgcagacgttggcgtcgggtacatcacgcgtaacgacaacaatcacgccaaagccggtaacctcaaccacgccatgaagctgacgcagggtgagttgattaccgtgttcgactgcgaccacgttgcgacacgcatcttcctgcaggcgacggtgggtggtttcctgaaagatccgaaactggcgctggtgcagacaccgcactatttctactcgccggacccgttcgagcgtaacctctccgttggacgtaacatccctaacgaagggtcgctgttctacggaccgattcagcagggcaacgacaactggaacgccacctttttttgcggctcctgtgcggtgattcgccgtagcgcgctggaagagattggcggttttgccgtagaaaccgttaccgaagatgctcacaccgcactcaagttgcagcgccgtggttggggctcggcattcctggatatcccactggctgccggtctggcgactgaacgtctggtgctgcacgttatccagcgtacccgctgggcgcgtgggatgacgcagattttccgtctggataacccgctgtttggtcgcggcctgactatccaacagcgcctgtgctatctgagcgccatgctttactaccagttcgcgctgccgcgtattgcgtttttgaccgcgccgctggcctatctgttgtttaacctgaacatcattcactcctcagcgagcctggttttcgcctatgcgctcccgcatctgttcctcgcgatttacgtcaactcgcgcatgaacgggcggcatcgctatagcttctggggggagatctacgacctggtgctggccttccacattgcattgccgactgtggtgacgatgtttttcccgaaacgcggcaaattcaacgtgaccgacaagggtgcgctgctggacgtggggtactttgattttagcgtggtgcgcccgcatttgattatcgccctgctgctggcggccggagtgattgccggtatcgttcgcgcctgtgctcatgactactttggcgtggatccgcgcgttatcgccctaaacgtcggttgggggttgtacagtctgatctttctgttggccgcgattgccgttgcgcgcgaaacccgacagacgcgcaaaaccattcgtattgatgcggaaatcccggtactgctccaccatgccagcggcgtggtgtcgcgcagccataccgctgacctgtcgatgggcggctgccgtattgtggcaccggatgatcgccatctcgatgatgagattgaagagattgagctgctgctgcaatccggcgcgatcctcattccggtaaaaaccatcgccacggatgaagaatcgattcgtctgatgtttgaagacatcccgctcgcccgccgtcgtgaactggtgcgcgtggtgctctcccgtgcggatgcatggattcacccaccgaaacctcaggacaacccgttccgttcgttgggaaccattatgcgttgtgtgtttgacctcttctggctgacctggaaagaccgtcgagaaaatcgccgtttgcgcgccagccaggaccaggccgcttcccaggaggagggcaacgcatga

SEQ ID NO: 146568 - DNA, 804 bp, Enterobacter cloacae
atgccgttgatttgtgtttgttcaccgaagggtggtgttgggaaaacgacgctcacggctaatctggcttacgcccttgcgcgttctggcagtaaggtcctggcgctggattttgacgtgcagaacgcactgcgtctgcactttggcgtgccgctgtctgacgagcgcggttatgtcgccaaatcagccgagtcctcggactggagtcagttcgtattgaccgcaggcgggaatatctttgtgttgccttatggcgaagccagcgaagatcaacgcctggtatttgaagaacgtctgacgaatgacgaacattttctgattcgtggcctcaacacgttgctgaattatccgggcctgatcattgtggccgattttcctcccggtccctctgctgcattgaaagccatgtcgcgcctggccgatctgcatctggtcatcatgcaggcagataccgcctctctttccctgttgcctcacgttgaaaatcaccgtctgaccggggatgtcctcaatcgaaaagcgggccattacttcgtgctcaaccagagcgacaaccgtcgtcaggtcagccgggatgtcaccgcatttatggaacagaaattaggtaatcaacttttaggcgttattcatcgtgatgaaagcgtcatagaagcgaatgcctcgcagcagtcggttttcgactttagtcctgcatccgccgctgcattcgatatcgaactcattgcaaaaagagtcgccggaatcttaggcgtaaaaatcggagacggcacggttcacagtaaaccgaaaatgtctggcttctaa

SEQ ID NO: 146569 - DNA, 588 bp, Enterobacter cloacae
atgaaccattatgatgatttgcagaggtttaaggataagacccgcaaccaaaaatacgaattcaaggatctgtcggcgcagaacctctctcctgaccatggaagttgggcgatcatgaatcagctagctcctgcaacagaggagtctaaactggcgatgggtggtcacgtttcgctgccgcaaccgcaggctgtcgccccggatgtcttcgcgagcgacgaacgtcatgagcgcgtcgaaagtatcgatactatcgacagtattgaaagcgccgaaaccagcaccgaaaccagcaccgaaagcgttcttcctcctgtcgacacagacttaccggcggtgaccgccccgtctattttccgtgaagttgccggacaacttgcatcgcaatcggcggcacccgttgcgccttctgcccaaccggcggctaacccggttgtaccaacgaccaccaccgcacctgctccgtctgcgacagcgcctgctgattattcccggctgtttgcaacgaaagcgccagaagcaaaacccaccgtagaaaaaaaccaacctttacaatctttgctagaaaggatcgcttcatgccgttga

SEQ ID NO: 146570 - DNA, 462 bp, Enterobacter cloacae
gtgcacgtgaagcatatcggcagtatcgagaagcggtggctgcttgcaaaggcattttttgcccgaggtggtaatgtcactggtgattatggtgaacatctcgtaaagcaactttatgggggtgaattattgccaaactcccataaaagcgccgatgtaagattaagcgatgggacgctgttgcaggtcaaaaccagagtcaataaaacccagttaggcggaattcgctcctgggatttcgattacctgatcggcattcagcttaatgaagatgccgaagtagtgatggcagttcgtgtccctgtgggtatttgtcgccaaattgccggatatgccagccacgataacaaatttgtgattcatctcaatggcgtgcttcttaaaacgcctggcgtagaaaacgtcactgaagagtttcgtcaatgtaatccggctttgttgaataaatcgaacttttgctga

SEQ ID NO: 146571 - DNA, 240 bp, Enterobacter cloacae
atgacagaaacacagatctacgagaacattaagcaagccatcaacagcgcaccgcgaaatggtcaaacggttgaaatgcacctccagatgatcaaatacgccgaccacctgaaaaacgtcactgctaaagagttttgcgagggtgtgggacttaaagccagttttggtactgaattcagcaaaatgaggaatctcaccgagcggcttaaagccgctgggcttgatacctcgaagctgtga

SEQ ID NO: 146572 - DNA, 1080 bp, Enterobacter cloacae
atggattgtttggtctctgcgtcaaataatgttcagacaaacacagcatggtgctcagtaggcagcaattggaaggaatgggctaaaaatcccaaaagagcacgggtattattacttaaaggaggtccaggacaaggtaaatcaacagtaggacaatattttgctcaaattcaacgtgcagcatttattttgtcccctgatgggccaaacgtaaccataaattataaagaaaaagctaatgaattaagtaataaagcaaagaatgaaggtttttggccagcaataccgagaattcctttattcgttgaattaaaagattacgcaaattggtatattaaaaagggtgaaggcgaatcaaggaatatcgttgaatatgtttgccaaaaaattcaagcgcgcacatccaagaaaattaatgagagtgtattttgtgaagcattaacaaacggtacttggttcattaatttcgatggtttggatgaagttcctaatgatgtaaaagatgatgttgctaatgaagttatcaattttaccaatgaattaattcctagccttgactgtgatgctcttattttatgcactactagaccacaaggttattctgggcagttcgataatctatttccggcgacagctaatcttgttccgttgccaccaaatatagctttaaaatgtgcaaccgcagttattaattataaccggagcgaggaggagagtgctcaatcattattgatcttgcaagatgcaatgtcttcggatcaagtacagggaataatgaccactcccttacagtcccacattatggccgtagttgtgcgggatggtggcagaccgcctgaaagaaggtgggagttatttaataatttttatacagttatgaaaaaaagagaaagccaaaaaaactttccaaataagaagataagtgcattgctcagagagaaggagcaactattaaaatcggttcatgatagattgggaattagtctgcacgcgaaagcagaaaaaagtgatggagctgaagcaaaactcaatagagatgagtttagagaactggtatctaaagctgctcatttgtcttag

SEQ ID NO: 146573 - DNA, 705 bp, Enterobacter cloacae
atgttacttgatgaatatctggatgcaggatatgccagcagcgctctgtgcaatcgggttgtatgggttgatattttcaccgaagcacaacatgcaggtgaagtccctcctgggtggaatcctcctgaagcgaccaagaaaccatctgttaaagtaaaacgagctcgtgtgtcattagacgagtggaagaaaattctggagcagataccggaggatcgctacacgcacaaagcaatgctgcttgccctggttactggccagcgccgggatgatattgcaaatatgaaattctccgatattaaagacggttacctgcatattgagcaaagtaaaacaggatcacggatcgctctgccactgagtcttcgttgtgaggctataggtatgacgcttgatgacgtgatccgcaaatgtcgggacaggtttgtcagtccctaccttcttcatggaaaaaggaatatcaaagcgaaaccagtccccctgcttacactaacgaatgaatttgccgctgctcgcgatgctgccggaattgttccaccggagggtaaaaccccaacaacgtttcacgaacaacgctcattatctgaacgtctataccgagctcaaggcatcgatacaaaaattttgcttgggcataaaacacagtcaacaactgacaagtacaacgatgatcgcgggaaagagtggactaaacttgtcgtttaa

SEQ ID NO: 146574 - DNA, 444 bp, Enterobacter cloacae
atgaaagaaattgaaatagaaattggtgataagtttaaagtcggacaacatgccccagactcagacgaggttttttctggttatgtgtcttcggttgggcctttcaataacagtcttgaaaatgcattaattttttctaggtactatcaaggtgagcgttcaaatgctattacaactgtatttgtggattttataataaaggatgaggtcttgaagagtatatttgatccaaattatacaattcatgaaagaacgatagaaactactggtgaaaaagagcgctttataaaagttgccgatatcattgatcgcttagggaaaaaaggcgaaataataagtgagctgaggaatgtagttgataatttgtattttgatatttatgagaggaacattgacttaataaagtcaaaagatgatgctataaaagatctctttggtttctag

SEQ ID NO: 146575 - DNA, 1674 bp, Enterobacter cloacae
atgtttaaacgtataaaagtcataacccttttaattactgttctgatcgttttgggtgcgatgcagcttatcgcagcgggcatctttattagcgcgctcaataacgacaaagacaattttaacgtgtcgcaactctccagccagaacgtggcggaatttaccgacgcgtggaatagcctcaaccagacgtgcgtcacgctgaaccgcggcatgctgcgcctgcaaagcagcatggcgaaccagatcaacggcggtcagctgaccgaactggtcaacacggccaatacgcagctggcggacgcgaaaagtcattacgataaatattttgcgctgccggaaacgccgggcatgaatgaaccgctcgttgaccgtctggaagagcagtatcgcatcttttcttcgacgctcgcgcagatgaacaagctgctggcggaaggcaagcttgaagagatgttcaagcagaacgccgagaagaagcaaaacgcgatgcaggtggtctaccgcgagtggcgtgccgagcaggcgaagctggccagccagggcgtgaaggataacgaaagcgattaccagcgcattatgtggatcctctccgccattatggtgctggtgctggctgtgattgtgattagctgggtggcgatgcgccgcgtgctcctgctgccgttgcatgacgtcatggggcacatccgcgcaattgccgcaggcgatctgacgcagcctatcgacgccgacggcaataacgaaatggcgctgctggcgcgcaacgtacacgacatgcagcagtcgctggcccgcatggtcagcaccgtgcgcgacagcaccgacaccatctttaccggcgcgagcgaaatctctgcgggcagcaacgatctctcttcgcgcaccgagcagcaggccgcgtcgctggaagaaaccgccgccagcatggaagagctcaccacaacggtgaaacagaacgctgataacgcccgtcaggcgacccagctggcgcgtaccgcgtcggaaaccgcgctgaaaggcggtgaagtcgtggatggcgtcgtgcgcaccatggatgaaatcgccgccagctctaaccagattgcccagataaccaacgtgattgacggtatcgcgttccagaccaacatcctcgcgctcaacgcggcggtggaagcggcgcgcgccggtgagcagggccgtggttttgcggtcgtggcgggtgaagttcgcacgctggcaagccgcagcgcccaggcggcgaaagagatcaaagcgcttatcgagaactccggcaaccgcgttgacgcgggttcgcagctggtgcgtgaagcgggtgaaaccatgaaagaagtggtcggtgcggtaacgcgcgtgaccgatatcatgggcgaaatcgcctccgcgtccgatgagcagagccgtggcatcgaccaggttggccttgcggtctccgagatggataaagtgacgcagcagaacgccgcgctggtggaagaatccgccgccgccgccgccgccctggaagatcaggcgggcaaactgaacgaggcggtcgcggtgtttaaactcaaccgcgcccagtcccgcatggcgagcgccgcgccgaaggcgtcatccttcagtgcgccggagcctgcggtgagcctgaaagccgccccggccggcggcagcgacaactgggaaaacttctga

SEQ ID NO: 146576 - DNA, 426 bp, Enterobacter cloacae
atgatgtgggcgaccgcgcaggggctggtgacgctgccggtttcactggcgggttatattgcggcgtgcctgtggctggcggcgggcgacagcggtttcgcgctgcccttcggcccgcgccccggcgtgtttatcgcgctgatggtggctatcgcgctgtgctgctcatggattggcgcgctgtgctgctcatggattggcgcgctgtgctggaatatcgcaagccagcgtctgccgacggtgatcctcgggccgctgattgttttcgaaacgctggccgggctgctctatacttttttgctgcgccagagtatgccgccgcttctcaccctgaccggcatcgcgctgctggcgctgggcgtggtgatggcggtgcgggtaaagatcgtgccggtagcggcgcgcgccgcgcaggagacgccataa

SEQ ID NO: 146577 - DNA, 909 bp, Enterobacter cloacae
atgtcggattttccacctatcgcaagtttgcgtagttttgaagctgtggctcgccttggcagcgtaacgcttgcggcgaaagagcttcacgttacccattccgccatcagccagcagattaaagtgctggaggaaatggtgggggtgaagctgtttatccgtcatgggcgaggggtgcagatcaacgaagaggggcgtctctacgcgttacaggtgcgcgaagcgctgaatcatatcgcagatgctacccggttagtgcaggtgaaaccgagaatactggaactgacgctggcgatggtgccgtcttttggttgtcactggttgttgccgcgtctggagcggtttcgggaaaaatatccacacatcacgctgcggatccaggccagtctgacgataaccagcatgcagcaggaagggatagatgtggcgatacgcatggggaaaggtaactgggaaggaagcgactgccattatctgttttcagatgaactgattgtggttgcagcacccggttataacggcggcatcctcccggcaacgccagcagaggtggcaaagagtaaaatcatattctccatggagtcgtggaaaacctggtgtttcaatgcgggactggaaaaagatattgtgcccggcgggttatgcattaacgactcaaatttagtccttgaggctgtcagactcggtaaaggtatcgcgctggaacgtcgctctctggtacaggatgccatcacccggggcgaactggtccagcttacccctttcactgcaccttatccctggccttactggctggtgacatcgcagttaacggaagcgaaaccggaggtggctctctttagtgagtggctggatgaggaagtggcggcctggcgtcagttgacaggggcggtggaaagtaacggctaa

SEQ ID NO: 146578 - DNA, 1269 bp, Enterobacter cloacae
atgtcccttaccgacgcaaaaatccgtagtctcaagcccactgataaaccctttaaagtctccgattcccacggtctgtatctgctggtcaaaccgggcggttcccgtctctggtatcttaaataccgtattaacggcaaagaatcccgtattgcactgggtgcctatcctgccgtatccctgtctgacgcccgccagcagcgcgaaggcatccgtaagatgctggcgctgaacatcaacccggcgcagcaacgtgccgctgaacgcggctcgcgcatgccggagaaaatgtttaaaacggtggcactggcttggcacagtagcaataaaaaatggtcgcagaataccgctgaccgtctgcttgccagcctgaacaatcatatctttccggtgattggtcatctgtcagtgtcagagcttaaaccccgtcatttcattgacctgctgaaaggcattgagggaaaaggcctgctggaagttgcgtcccgcacgcggcagcacctcagtaacatcatgcgttatgcggttcatcaggggttaatcgacagtaacccagcggcaaaccttgacggcgtgacgacaccgcccgtcagacaccactatcctgccctgcaactggagcgccttcctgaactgcttgaacggattgacggttataaccagggacgggaactcacccggcttgccgtcctgctgacgttacatgtgttcattcgctccagtgaactgcgttttgcccgctggtcagagattgatttcaggaaccgggtctggacgatacccgggacacgcgaagccattgcaggcgtacgttattccgggcgaggtgcaaaaatgcgcacgccgcatatcgtgcccctctcagaacaggccatcgccattctgaaacggatgaaggatatttccggtgaaggtgaactggttttccccggcgaccataacccgtataagccaatgtgtgagaatactatcaacaaggcactgcgcctgatgggatacgacacgaaacaggatatctgcggtcatggcttccgggcaatggcatgcagtgccctgatggaatccggtttatggtcgcaggatgcagtggagcgccagatgagccatcaggaacgcaagaccgtgcgtctggcttatattcacaaagcggaacatctggaagcccgtaaggcaatgatgcagtggtggtcggattatctggatacctgccgggaagcatatgtgccgccgtatatccagggtcagggagacagccacaaagcggcataa

SEQ ID NO: 146579 - DNA, 441 bp, Enterobacter cloacae
atggaaataaacccatcaatgcctcgcatttcaaaaagcatcgcacctttaataaagcaatcttcaaatctgcaagaattaataccgcaaactctcagaactcattgtgtcagcgttcgtctgaataacgcagaacttcaacacctcaatacgaaacgcggttctacgagtaaaggcgaatggttacgtatggctttgttacagaagctgccaacaattgtgcctcctgtaaacatcgatacatggaaaactttgggtgagatcaatcagaagttaaaccgtattgctctccatatcgacagtaagagtaaagatagccagcttactcacaccgagcttttcgctgtgaagcgacaactgaaagagcttcgtcacagcttgttaagaacagatttttggagtaccgctcgtgaagggtatgcggaagatcaagaggggtaa

SEQ ID NO: 146580 - DNA, 1194 bp, Enterobacter cloacae
atgcttgagacgaatttagcaaaaccatttcttgttgtttatatcatttggcacccggatttcgccgctggtgctggactggctgaaatattgcggggacactttcgtcgggaactctatcagaacgttgctggaggaaccggtttaagtgttatttttcgttctgagcctctacctgaaacggggaagccgttgccgatcaatttttcagaatcagagaccaccgcagtccttatacttgcagaatcatgtatggcaaatgatcctgaatgggggacttaccttcgggagctatccgcgcagtcggaaatagctggactgggtacacatcttttccccattgctattgaagtagaaggattaaatcttggactggaagagcaggcattgcgctgggaccaatggatacaggatgggagtaacaatactgcaaatcttcatatacgattgattagtgagcttacatacgaattttgcaggatgctgcgccattacctggaacatctgaaacaaccagaaaaagatgaagatgatttgcttaattatctcaagaaagttcagatatttcttagccattctaaacatgatgaagatggagagaggattgctcgtttgatacgtgagcaattacatagtggacatgggttaagttcattctttgatgtccatgatatccctgctgggcttcggtttcatcaggtgctattgaaacagctggcgcaaagcgcagttgttgccatacataccgactcttattcctcgcgtgagtggtgtcgcagagagattatagaagctaaacgtaatagtgtacctttagttgttgccaactgtattagcgaattggatgaaaggggatttccttatatgggaaatgtccccatagtgagaatggatccccagcaggctgaacgaattaatatcattattgcacgcctgcttgatgaggttctgaaagattttctgtggcgttgtcgtatacaattggttaatactaaacaaagtgcagtgcagtttgttccacgtgcgccggagttaatttcacttgctggtttaaagttccccggtattgggcaacctacaattgtatatcctgacccacccttaagttcggaagaagagcgattatttgaagaagttaaacccggtatcaggcttagaagttttaccgaatggctggcagagggaacatcatga

SEQ ID NO: 146581 - DNA, 417 bp, Enterobacter cloacae
ttgctttctgatattgaacccattgaagggctggttaacgctattcgggcaggtagcgaacgcgcagagcgggtaagccaggcgttgttaaccccggaacctcaaagtacgggggaagaagacgaacaggttatcgcgctcacgcactccgaacgcaaagtattgcggctgttaggtaaaggatgggggattaaccaaatcgccacattgctcaagaagagcaataaaaccgtcagtgcgcagaaaaacagtgcgatgcgacggctgtcattacgcagtaatgccgatatgtacgcctggataaacagtacacagggaatgcgagagctgagtttgatgtcagcctatggagagttcgaggaatggaaaaaaccgattcaacaagacatatcgccgtcgtcgaaatttgcacgatga

SEQ ID NO: 146582 - DNA, 2184 bp, Enterobacter cloacae
atggctcagacagtcattacaaaagcgttcaccgaatggaaagcccaacaggcaattgataatcagccggttaatctggatgaatttatttttgcctatatccccgatttggatgtgacaaagccggttgagaatacagagggtttgccacctgccgataaaatcgtccatcgccaggcggtgagcaaatcaggtgtggttaatgcgaattccgttgtgtattccgtcactctgggcgcggacgtcggcgactttaatttcaactggatcgggctggcgaacaaagaaaccggcacgctggcgatgattattcacgccccgacacaaagcaaaattaagaatgccagcgggcaacaaggtaacgtcctggttcgttccatgctcatggaatacagcggggccgtttcggcaaccaatatcaccacgccagcggaaacctggcagattgattttactgcccgcctggcggcaattgacgaacgccagcgccgggagaatatcgatctttatggtatggcggccttttttgatagcggttatctggtcgccaaaagtggcgcacaatattacgtaacaaaaggcgcgggctacgttgccgggttacgtgcggaactggccgcgaatcagaacatcaccgtttcagctaagccggtaaaggtctggctggatgtgtcctggtcgggaacgctgacaagcgaatgggctgtaaagagcaaaattactgtggcagcgagtcttgccgattatgtggaaaacggtagccagcattatgtgtttgccgtggcgagcatcgacgcaagcggcaatattaccgatctgcgcccgaaaggctcccttaacgaccagtcaatcaaagagcatgaaaaatcacgaaatcatcctgacgcgaccactaccgaaaagggatttacaaagctaagtagcgcaatcaacagcgaatcagaaacggaagccgcgacgccgaaagcggtaaaggctgctaatgacaatgcaaatggccgcgtgccgtcagggcggaaggttaacgggcgagcgctggcggaagatatcaatatcacttcgcaggacatttttaacggtcaggccgtgctgattggaaatgctgctgatctgaatagttttactacaccgggattatattaccagtcctccaatgcgcaggcggaagctggaactaattatcccgaaaaagtggccgggtcgcttgaagtatacaaacatgcaggtgttacgcaggtataccggatatatgccgattcacgctcatatatccgtatttattttaatggtgcatggacgtcatgggtaaaacaatatgacgcagcaaataaaccgacaccgggagatattggcgcggtaccggcaagtggcggcagtgtggcacacctggaaaatgcaacgtattacaagactaacccggccggatggtatggcggtggggcttttgctgaccagtaccggaataatgcagcaccgtttcttgtcccctatggctttgtatcgacaaaagatgcttctcagtacctgccgattgttaagggaatatctcatacagcagtacatggatatgctgcatcggtaagttttggaatcctgcgctcaggaaaagccgattttggttctgccgttatccatatcatcggggataacggcgctagcgccatgtattcgtttgatgcaaccggcgctttcaatgctccccgccagatttatagcgccggagacattattgcagcgggtcaggttagcagtggcgttaatattgttgccggtcaggggctttttgagtcgggcggtgcggtaagggtttattcttcaaacaaccctccgacacaatacgcagttagagactggattactagcgtagggcttgaagctaataatccctcggccccttatatgcgtcaggagtctagcgggaatattgtccgtctggctacgcaaggctgggtaaatggaagttttgcaacgtcagcctggactattgctaacttcctgcaaggggggattaggctggcatcggctggggtcgccacaaacggaaataatgataatgaatttgcgtatgcccctaacggaacggtagttactgctgtacagcaaaaaacgaattacacagccgtacagtatcgatcacttcaatataacatcggcggaaactggtacacagcatgggtggcttaa

SEQ ID NO: 146583 - DNA, 132 bp, Enterobacter cloacae
atgaccactaacgaagccgattataagatgatttttgtatgtttcaatctgttatcaatgaagggcgatttgaggacgaaaaaaaacccaactagtgaggttgggtttttcttagttatcatcgctatctag

SEQ ID NO: 146584 - DNA, 270 bp, Enterobacter cloacae
atgacattattccgaggggtggagtgggatcgtaaagataacaatctgcatggctacggcttcatagctcaggaggtaaaaaaggtttttcctgaagccgtaaaagagtatggggaaacaaaactggaagatggtgagattgtagaaaaaacactggccttagacacatcaggtgtggctgcagctttgcaccatgaggccattctggccctaatggttaaggtcgatgatttgacgagtaaagtagaaaaactggaatcaggaagctga

SEQ ID NO: 146585 - DNA, 1206 bp, Enterobacter cloacae
atgtctcttcgtttcagacaaacctttactttgtttcctggcgttaggctcaacattggtaagcgtggagtaagtgcgagcatcggtgtacccggtgcaactgtcaatgttgggaaaaaagggctcagagcgaccgtaggactaccgggtacaggcttatcttatactacacccaccgtgccctatgattatgggcactcagttactaatccattaaatccgtcctccacagaacctcattttggagtgccggagacatccccaagtaacacaccatcgaacgctaaaatatatatgcccatggctggcatgaatgaaatttccagcgcttcggtagaagtcctgacaagttcctcccttttacctatacgagatttgattgctaaagcacgagaacaaagggcagagatcaaagcggatctacaagaggctcttgctgaagaatcaaaacaaaagaacgagctggttcgtcgcaaatcaagtctattccgttggttttacaaacggcgcatcgcagaacttgagacagagctccccctaacgcaagctgagatatctcgcctagtatcctgggaagacaatacaaaagtagccataacattcgagagcagtgatacttcgcagcgcgcatatgcagcaatggtccgcgcattcgatatgttaaaatcaagtgttaaaaaatgggatattactgccgataaagctacagaccagtttgtcgaaagaacattggcaacccggtctgttaatcgtcacccagttacctttgatttctgttcaacagatctcattcagtttacagggcgtgcgatgcggtttgaaaatgtgaatggcgacgatattttgctttatcctggagttgcagtcataccacgagctgacggggcgttcgctctgattgatttacgcgaattacaaatcagttcagaatatcgaagattccatgaggaagaaggtgttcccagtgattcacgcatagatgggtatacatgggcgaaaacgaataagaatggctcgccagaccgtcgatttaaagacaactaccaaatccctatttgcgtttatggcaatattaccttccattctcaaacaggggtgactgaagaatatatggtatcaaatgcagatgcagcgcaagcctttactgaagcagtaaagcgctatcagacctcactcacagaatccgaagcgttgggaatggcctaa

SEQ ID NO: 146586 - DNA, 573 bp, Enterobacter cloacae
atgcctaagaatgaaaaagataagcgaaatatgcctttttttgatgcctttaagactactgccgctattggtttgctgatgcagcaaacagccgcattacattgctctgaaggcccgcagccacatccatcgttttacactcttcaggcaagtgtggcagcgaacgcgcacatgattagccctgagatggaggagtccctcgaattcatcaaggggctgaaagagatgttacagaaaggttacgttctcctttctgatgctcacttaaatgagcgtgagtattatattcgcaagctggaccctgctcaaacggatctggttgaacttcagctacgcggacttgagggtggtttgaaaaacgtctttaagaattgctctgaggcggacaaagaacttctgaaaccgtatttgatgacgattgccgaagcccgctcagcttctacaaagttgaatcatttaattgcccaaatgactaaagctgctgacaatttcaccagcgagattgatatggaagggctgcgttcactggcaaaatatggcacagagacctttttctctggtcgtttccattga

SEQ ID NO: 146587 - DNA, 792 bp, Enterobacter cloacae
atgtcagaaccttcaatcgtcccttacgtaaaaaccactcccaaaccttttggtgtggacgtcgaatggaaatggccgggtggctgcgcggtgctagaactgcaatgccttcatgaagatggccgacttatgaaagaacgcaccttctggccagctaccgtatgccttatttccggcctcaaagctggtgagagattgcaggtgcgcctgcgtccaattgcagaagatggctcagcacgagattggcgagccggtgactggatcgaaggggtttcttctgtcgataccgaagagattattgaggcgctggacgaagagatccgtaacagctgcgcacttcatggccttaaaggtggctggtttgttgataaaaccggcaaggcttacatccacgaagcgctgattggcgatggcgtagtgtctacgggttataacgtgaaattgaacatcaacaatgatggcaaagagcatgctgccggtatggccgttggagtagaagacggccagagcaaggtagagtttaaagctgatcgctttaatgtgcatgaagccgcttcatccatcattggaaacgctgtggtatcagccaagaagatgaagattaagcttggcgatgaaatgacacaggccatcattgatgctgtacgtgaaagcgaattgttcacggcaattcaagtaaatatcgatgcacaaacagcctcactcaccagcctgcaacaagcgatgcacgatgcagtaaatgatgcaatccgcagcgcgctgaagccaggcggtctgctgtacaaacgataa

SEQ ID NO: 146588 - DNA, 630 bp, Enterobacter cloacae
atgacgtacaaaaagatcgcaaaaccttttgaatttaaaaaatgtttggttgaggactgcgaaagaagcgcgaaccgtactaatggcggtaaacgtggatattgctcaatgcactatctgcgagttaaacgatctggagaccctttggttgttaaacagactccatcacctgcaaaagactttattgaaacgcataaagattatgattctgatgaatgtttaatctggcctttccaccgagataaaaaagacggctacgggcgcattcatgaatcaggaactgagcggctaataaccgcctcaagggcaatgtgtatcgctgcccatggtgagccaccaacccaacgccatgaatctgctcacagttgtggtaaaggacatgaaggatgtgttaatccacgacacctttactgggcaaccccagaggaaaatcagggcgacagagtcctgcacggcacatcaaatagaggcgaggctcaatggaatcacaagctaactgttgagcaagtgcgggagatcaggaaacttatagactcccacacattgcgagaattagctgatatgtactcagtatcaaccagagctattcacagcataaaaaccagaaaaacatgggcgtggctcgattaa

SEQ ID NO: 146589 - DNA, 213 bp, Enterobacter cloacae
atgaccaaaatccgctttcatccatccgagctacacgacgcgtcagacaaatatatggatgaggtgttgttcctcgccaatgagcacaggtgttcgccagcgagcatatccatagatgagagccactgctctggtgatatagtcgtgctcatcaatgggaaatgggttgggtatctggatgaggcattctacgaaagaatgcacagcaattaa

SEQ ID NO: 146590 - DNA, 651 bp, Enterobacter cloacae
atgagcaaaccggactgggaggccatcgagacggcgtaccgggccggagtgatgtccctccgagaaatagcatcacagcacggtatcagcgaaggcgctatccgtaagcgtgccaagcgtgacgactggtcgcgtgacctgaatgcgaagattcagcaaaaggctgatgatctggtacgcaaacaggaggtacgcaggacggtacgcaacgaaagcactttgaccgagcgcgtactgatagaggcgactgccgaggtgattgccacggtacgcatggagcaccggggggacatccgccgggctcgtgaactgaccaacacgctattcgatgaacttggtacgcagtgcgcagatgtaagcgcgctcgagcagttgggcgacatcatgtttgaccccgacgataaagggcgggaccggctcaatgaaatttatcagaaagtgatcagcctgccttcccgcgttaaatccatgaaagacctgagcgacagcctgaagacactgatcggcctcgaacgtgaggcgtacagcatcgagaacaaggctgaaacgaaagaggtcacgcataacgtcatgctggttccaaccagtgacaacgtggatgactgggaagcggcagcgcagaaacaacaggacggggtgctcggtggatga

SEQ ID NO: 146591 - DNA, 150 bp, Enterobacter cloacae
atgagcaaaacagtcacgttcacatcaaaagtatctcttcgtccatacatgaagccgatcctgatgctgtcagccttacttcgctgggactggttgactaacaagtgcttcaaaatcgaaaccgtaaccagcgatacggtgcagctttaa

SEQ ID NO: 146592 - DNA, 480 bp, Enterobacter cloacae
atgctggaactcaataagcagcgcagggcatttctggatatgctcgcctggtcagagggtactgacaagccaaggcagaacaccaaaaacaggggttatgatgtcattgtcggcggatcgcttttctctgactacagcgaccacccacgaaaactggtcaacctccccaagttgggcatcaaatctaccgcggctgggcgttaccagttgctttcaaaatggtgggatgcgtaccggaaacagcttggactgaaagacttctctccagcctcacaggaccaggtggcactgcagcaaatcaaagaacgtggcgcgcttccgctcatcgataacgggcagattcggcaagctatcgatcgttgcagcaatatctgggcgtcattgcccggggcaggctatggccagtttgagcataaggcagacagcctgatcgcaaaattcaaagccgctggcggcgttgtagccgaagtacaaccatga

SEQ ID NO: 146593 - DNA, 324 bp, Enterobacter cloacae
atgcgaatgccctacaaacaagatttcatcgccgctctgctggcagctaaggagcagggtatcggcgcaatactggctttcatcatggcgtatttgcggggtcgctataacggtggcgctatggcgaagacgctgatcgatgcggtcatgtgcgcgatgatcgcctggttcgtccgtgaccttctcgacttcattggcctgagcagcaatctcgcgtatatcgccagtgtcttcattggctacatcggtacagactcgatcggcaacctgattaagaagttcgccgccagaaaagcaggggttgatgatgctggaactcaataa

SEQ ID NO: 146594 - DNA, 357 bp, Enterobacter cloacae
atggataccttacttgtatggatggtagaacgcctgcatgagtggcaaaaaaataagtccgaactcaggctgaaagctatcaagggattaaccaatgcaatttcgcctacagttgtatacacagaaaaactgagacgtggtgagccaaacgacacggaacaggaagagcatctttataggctttggtatgaagcatcatctgatgttattgattatgatcgcgatctggctaagagatgtttagaaaagtcagagtactggcttaactcgaagttttacaacacagataaagttaaagaattaaatatttccttggttggcatgaaatccactcttgaacaaatcaaacataactaa

SEQ ID NO: 146595 - DNA, 198 bp, Enterobacter cloacae
atggttctggatgaagagcgtataagcatgaaaattcaggcgatggggcgggcggtgatggaattgtcactggctgatttacccatgacccagcaaaacatcatcgacaagctggaacggtaccggcatgaaaccggcaatgtgatagggaagggagctaacagggatgctgcggagttggtgaggaaggggcaataa

SEQ ID NO: 146596 - DNA, 261 bp, Enterobacter cloacae
ttgccgtcagcccctcgcaaagagctgctggtaaatcgctttgccataattgccgctcttcctgagcccgcctatggtccgacgcatggtttactgtcgcgccgttcgactgaccgaatctccacttcgccgctggataacttcgctcagctgtcgatgtttcgtttcgatggattaaagataaccttagttatgagtgatggcaataacctaatttataatatcaatcacataagttataaattaatgataactaaatga

SEQ ID NO: 146597 - DNA, 162 bp, Enterobacter cloacae
atggtgacgttgtcacttattctcgagccgtggctgacctctgccgcgtccagccagcagctgccgctgatatgcgcatcgtggctaatgatgcaaggcagggtaagacgcgcgttgccggacacggttgcaccggcgaacaccacgctgttttcgtcgtag

SEQ ID NO: 146598 - DNA, 285 bp, Enterobacter cloacae
atgatatcaggtcttgatggtggaattttcatccttagctcgatggctaaggaaagagtcaaatcaggtctacttgacagagcaacaatagaaggctctaaaggcgagtataccgtgatttttgatggtttagagtgggaaggtaagcctttagtcttatgcagctccagacagccttatgaagcacgagtcttcaaaagcatcgatggtgcggcggcagaactactacgcattggtctaagtgaagcttcaatcaaaaacaccacaaaaacgaacgctaaataa

SEQ ID NO: 146599 - DNA, 327 bp, Enterobacter cloacae
atgagaaatattttagcggttatcacagcaatagttgttttgataagctttatttttgcattgcggcagccaattacattggtgtttttgtttgcttcctgtgcaatcccaatcgtttatgtggcgaagaataataaagccttggcaaaaatgcttattattatagggtgtttaatttcactgttatttgttaattcgatggtgccgatatttggcgaaagatatcaattttataagaaaagtagagatgagcacgataggctaatccaagagagatatcaggaattaaatagagaatcagctagagaataccaccgaaataattaa

SEQ ID NO: 146600 - DNA, 228 bp, Enterobacter cloacae
atgacggcaagcgagcttctgatgtggattgagttcgacaggcaaagtccggttggcgatattcgcagtgacattcaggccgcccagatagtctctgccgtttatggttctcagggggtcaaagtgccgctggaagatgcaatcctgcgctgggatggtggcgagaaatcagcaccagaagacccctttgctggtcttgaagaggcgctaagtgttgcagctggttga

SEQ ID NO: 146601 - DNA, 153 bp, Enterobacter cloacae
atggtaagcaaaacgctagctaagactaaaagcggcaacaaatctggttgccgcagccatgaatttttcagcgtacctggcggtaagatatttatatcttctgcaagtattgaaaaattagtttgtttttacggagtcaagaatcttcagtaa

SEQ ID NO: 146602 - DNA, 513 bp, Enterobacter cloacae
atggaaatatcaacagtaaaccaattgatagccgctggttccggtctaattggtgcttttattggtgcaggaatttctgggtggataaatcatagaataagtaatgacaaccacatacgggaattaaagtcctataaagctggcttcgttgcagaagtccaagcattacaatcaattatagctgaacgtggctatttgaaagcattccaagatttcgctcaacaccctgatattttggcaggggcgaaagtaacttatgagatactgatacccgataattacgcccgattttataatgcaaatttaaataaagtaggcttgatggggccgcagctttcatcgaaacttattcagtaccaccagttattgcaagctatagttcaagacctgcaaccggattcagcacctatgaaatacggctttgacaaagatattttagacgaaacaattcgcatattctctaaagctttaagtataggagatgagattttaaaagaaaataaatataaataa

SEQ ID NO: 146603 - DNA, 636 bp, Enterobacter cloacae
atgaaatactctctgatttacgccgacccagcctgggaatacgggaacaccgtcagcaacggtgcggccaccaaccactacgacacgatgaaactcatcgacatgaagcgcctccctatttgggaccttgctgctgatgatgctgttctggctatgtggttcaccggcacgcacacacgagaagctattgaactggctgaatcatggggctttaaggttcgcacgatgaagggcttcacctgggttaaattcaaccagctggcagagcagcatatcaacaaagcgcttcaggctggtggagtagaggatttttacgacttcctcgacctgcttaacgagcagacccgcatgaacggcgggaactatacccgagccaataccgaagacatgctgatcgccaccagaggtaatggtcttgagcgcaagaacgccagcgtgaaacaggttatctacagcccactaggtcagcatagcgagaagccagcagaggcccgtttccgtctggaaaaactctacggtgatgttccacgcattgagctattcagccgttgcgccgcgcctggctgggacagttggggcaacgaatgcgaaggaccatcgctaacttacatcaacggatggtggaccgaccaatga

SEQ ID NO: 146604 - DNA, 336 bp, Enterobacter cloacae
atgaacgatttcgctaagcgggttcagcgtcttgaggatgagcgcggtaaaaccatcactaccgaggtggagcttgtctcttacgtcaaagagcgcagtactggaaactctgaagctcgttactacgtaaagcacagcaaccagcagacggtgcttgagcagggaatggtgataaacagggatggttttggcaatcatcaagccagcatcatcatcactgatttccccgggcagaaaactccggaagaagcggcgcttaaactggctgattggttaaagcgccttggtgagtccattgaggctaatttcaaaaagccagaggtggatgatgcctaa

SEQ ID NO: 146605 - DNA, 993 bp, Enterobacter cloacae
atgccagatgaaagcacaggtcttcagatgttcgaagcagtacagaaatacgctaaaccagtcttaagccttgcaaaggccgttgggcctttcattctagcacaatcaaaactagctaatgagaactatgaaaacttcaagcttaacaaagaacgcttagaggctctttcagtattcttacgagaggaatcgcaacggctagctgaagaaaggtctcaacttagaaaaatcatgtttgcatcaaatggacttgagcgagttcaagctgaacataattataatttattaacacgggagttgaataagctttcaacaatcgacaaaataaaggattttataaatgatgatgaagagattcattcagccgaatcaatatcagatgtctggattgaacaatttaataaactagcatcctctcttaatgaggaatggcgtaaacaattgctggctaaagcctttgctaatgaattgaaaaaaccaggcgcaatgagtttagtcgttttaaatagcatagggaattttgatgaaaaaagttttcgttactttggtgcgcttatagatcattcgataagattgcaagaaatcaatctattacctattggttcaaatacaatgagtgttatgtacgacattgatggtgaacaagtatccagaagcacaatagaatatagccttgctcatttgaaccttttagatgtctctgataatagggttattaacgtaactgatataaaaccaacttacttcagatatggtcgtcgcgtccttgtagttacaaacaaaaaagatatcacatcatcgcccggaatccctgcgaagccttttaccccgctgggtaatagcatagctcaattgtacgatagaaaaataattccagatggtaataaaaatcttgatttcttctatgattttataagaaaagaaagagagattttctataatgtagctgaaattcagctatcagatttcgactatgaatatcttggtaactaa

SEQ ID NO: 146606 - DNA, 282 bp, Enterobacter cloacae
gtgggcaagtattatgacgattatgagcgggaagctgactaccaaaattgggtttattatcgcgagtcatcgcatgaagaccgtgaaacacaatgtgaagatgtcctgtcagatgaaaaacagatagtgaatgtgccagaggccgagccacagcaagctcagtcagtaaacgtgtttcgtgattatcctgaacatcaagcgctgattaccgcagcggaaaaaaaatacttcaaagctaaagggaatgtttgtaatgcggaggatgaccgagacgactattag

SEQ ID NO: 146607 - DNA, 468 bp, Enterobacter cloacae
atgacagaatcacgagaaatcaatttaacttcgggatctcaatatttgcgccagttcccgttggacaacgcccgcgttatccgtatttgcaaaatgtcggcagcacaggctgagagcattcgagatatgaataccgaagaactgcaagagcagattttcgtcaccccggttgagttcgcctatctgaccggtcgaaccttaaaaagcgttcgaaaccttatggaccgcgcacaattgccggttcatcgcgaagggatgcccggttcgaaacgtcctaagcgtttcatcatgctgcaagaatactgggccgccgtagcacattgccgcgcactaatcaccccagaagaaaagcactacatcgatcgtctgatgcgcgacaagaacacataccgccaggtaacagggaaaacgcttcaaactcataagcgcacccgccgaaattccttttcacttcaacgcgcctgctaa

SEQ ID NO: 146608 - DNA, 486 bp, Enterobacter cloacae; identical to SEQ ID NO: 144168

SEQ ID NO: 146609 - DNA, 330 bp, Enterobacter cloacae
atgtgtgatttatgcagggcggacgggaattacttccatacgccggaatgtgtgtatgaccagctggtcagtgagtaccccgtgatgtggctgcgggactcgacccggatcggcgcctgctacaccctccgtgaactgctgtcgccggaagggatggtgctggccatacagaacgcgccaccgatgaagggatggcggctgcgtatgaggtataacgaggccactgacgaagagatcgacacgcattgcggggactgtatagagctgctctccaggacggatgccctgcttgccttccggtcgttgcaggataacaccgcgtcagcttag

SEQ ID NO: 146610 - DNA, 822 bp, Enterobacter cloacae
atgggaaatacccctagttcatccgcagttcatatacctgttgataacttactcattcttcttgtgactttgggtccctcatgccagtatgtggggatattcaaaaacccccacacggtgaaggcgatgaccacggaaacccttaaaaagccagtcaatatcagccagtccaatgagctgactgaggccgcttactatttgcctctgcaggcaaaacgtgtgctgtggctttgcctgatgcagtgctacccgatgaaggatgatcccgattctgtttctccgatattcacagttactgtggcggattatcagaagttttttaaggtcagtgtggatactgcctctactgacgttaaaaaaggtgtgaccgcactggccgacagcagcgtggttttttaccctaaagaaggggagtttgaagaggtgaaacgcccctggctggctgaagcaggcctgaaaaaaggacgggggaaatggcagatcgagttcaactacaaggtgatgccgtatctaatggggctgaccagtcaattcaccacctactccttatatgactgcggcaaaatcaacagtgtgcgggttatccggctttatgaaagcctgtgccagtaccgttccagtggtgtatggatcacaacccaggactggctgtctgaacgcttcatgctcccggaatcacagcgcagtaactttgctgagatgaaacgcaccttcatcaatcctgcccttaagaaaatcaacgccaatacgcctcttaaagccgctatgacacagaatgacgacggccgactggtattcactatccttgattctaaaaactaa

SEQ ID NO: 146611 - DNA, 369 bp, Enterobacter cloacae
atggcggacgcatcgaaacttaaaactaaacgagggcgcggagggttgggttctcctccaggcccggatgaagtggctaccagcctgaacgcaccagaaatagcacctgtagccagtactgcggagctggatgcttcacatactgaaactgactcggcacaaccagagaatccgcaaaaagacgctgaggtttatacgcgtcgtgacggacgttctgcgagaaaaactaatagaacactggctttcgcaacgcgagttacccctgcgttcgatcaggagattcgatatattgctgatcgcgaggggctgaagttggttgaagtgctggagaaagcagtcgaagcctataaagaaaaacaagggtattaa

SEQ ID NO: 146612 - DNA, 393 bp, Enterobacter cloacae
atgcatgacggtgaagaaagaaaaaaactttcgttgtaccttcacccggaggacacggccgaccgtcttgctctggctgaaatagaatcaatcccccggaaaaaccggggggagttatatcggaatgctttgataactggccttataatgcatcagctggatgagagaattcctgcgataatgactgaattgttcaccagaaagctaaatgtagatgaggtcattaaccagatctctcaaataacaggatggaaaccatctgtagccgatataaaagacgtactgaaggctttgggcggccttcagaatacaacatctccagaaccctctgaggatgacggtgaaaaagctcgcctgaaagctgccagaacgaagatgaaaaatctcatctga

SEQ ID NO: 146613 - DNA, 930 bp, Enterobacter cloacae
atgccgaactggtgtgctaacaggctgtatttttatggtgaagaggcagacattgcggggatccgcaacctgctgtcgggggaactgacctcgcattttcttcgcgccgaacaggaagggatccaactctttgttgcaggatgtgccggcatactccggccagtagaggattttacttatgcaccttttcccgcattgactcaggcgggcaaagggagcaattcaccggaaaatattgctttcagtcgctggctgacgtcgctgcaggaagaggtggaactgagcaaagataactgccatttgttgcatcggctgtggctgaatacgggtattggcaataaacgatggtcatcgctgtcacgggaacagcagggggtgatcgaaaaactctattctgataaatattttgactggggatatacctggcgaaaaggtgaagtcagtgaatggtggaaccgactttgcgataacccgtcgtttttccccggacgaccgctggacttccttcatgttcttccgacccgtctcgatgttgaggttaatggatttaatggaaaactgttagagggcatcccgtctgcatatgactggtatctccggcggtacggtactaaatggccgcagggaagcgaggtgaacatttctttttcttgtgagaagggaattcaggtcgattttgataccccgtggagcccgcctgatgaagccctgattgctgaactcagcaggcagtatcactgcagcattgagcactggtatgccgaacaggggtgcgatttttgtggctatgcctgctatgcagaaggtgagcagttacagcagctgcaggattcgctggaatgggaactggctgaagaaggggacgatgtgtattccgatattatcgggcctgaatggctgatcaacaatatcgctcactttggcggatag

SEQ ID NO: 146614 - DNA, 231 bp, Enterobacter cloacae; identical to SEQ ID NO: 97387

SEQ ID NO: 146615 - DNA, 312 bp, Enterobacter cloacae
atgcacgttgtatcgagagcacctttcgatacagccaccaggcaattccccaatcaggcagcggcactagacgacgtataccggactttgaagagagagaactacacttcaccggacgaaatgaaaaaacgatttgcctcgctggacagaatgaaatatcgggagaagtggtgggtgatcgatgttggcggtgggaatttaagggtgatgttttttgctgattttgaacgtgggaaaatctttataaagcacataaccacacacgccgaatacgacaagctgacagatttttaccggagaactaaagaatga

SEQ ID NO: 146616 - DNA, 420 bp, Enterobacter cloacae
atgatgtacaccgatgctatccaggcggcaaacagcctggttagcattgtccccctcctggggggcaatgcctctcgcaaggactatgaagacgcgctgacgctggttgaatacctggttgaacacgagccagatcatccgctggtggacatgctggttgcgaaaattgcccagtatgaagatgaggcggaagagttcgcagagttcaacgaccgtattgcagcgttaccaagtggcgtggccctgctgcgtgtcctgatggaccagcacaaactgactcagagtgattttgaggaagagattggtaagaaatcgctggtgagccgcatccttaacgggactcgctcactaacactagatcacatgaaagcacttgcacggcgcttcaacattccgcccagctcattcatggacgcgtaa

SEQ ID NO: 146617 - DNA, 429 bp, Enterobacter cloacae
ttgggaagacatgacctgcttattcgcaccttccctaagcatttcactgaggaagaccggaaaagattcaacaagaaccgtaactcacagactaaccagggggcgatgcgtcaggagtgggataaataccagcgccgccagaaagcgctgggtaatcagattgcgcgagacagtacaaagctacgcaccctcagcgacaaactgttaaaagcccggaaaatgacgcaaaaacaacgggcaaaggcagaagaaagtcagcaaaagcttaaagccgagcaggataaaaacaaggtgctgctgcagcagctcgccgaccgtttcaaggtggaacgccaggcgtttattgatgcgatggtaatgactggtgtatcacgtcaggatgccgagaaacgcttcctggactacgtgaaaaacaaaggcaggggttaa

SEQ ID NO: 146618 - DNA, 339 bp, Enterobacter cloacae
atgaccgactgcgtgacccggacagttaaggacaaaacaatgtggctcgtgacattgccggagatcattacaaataacattacccgccaggaggaaaatctgatcgtcattctgtgcagggagcgatcgtgggggccaacttctgaccattttcccgacggattgtaccgggtctcctgcataatgatactgtacctggccgataccgaacagacgaagactcaggctttcactgcaatctactggcctcaacagaaggccctgcatctgtttacagatgagttcagactggaacggcgcctgcagggacacggcttgggtagctggttcacgcagtag

SEQ ID NO: 146619 - DNA, 1095 bp, Enterobacter cloacae
atgaaaactgtatttgtgcttggtgctggattttcaaaagaagctggcgcgcctatgcaggcggaaataatgggtgagatatttaaaatacaccaagaggattcaaactattttaatggttcagattttcagctttttgaaaacttacttactgaacaattatattataaacgtgagcaatttaaagatgttcagattgaagatatgttcactcctttagaccggtgcttggcggataatatccagtttagaggtctgtctattgagcaaatgacaaagacaagggatgctgtttttaatatcattggtttggccattaggaggatcttggaaagaaaagggaatagtaaggaatatattgaccactttgctgagtatttagtgaggaaatgtagcgagaggctgggtggtaattatagacagcatgatcctgtaagcgttattagtaccaactgggatattctactagataattcattgtatgattacatccaaaggaactacaacggacgtgcagttgttgattattgctgttatataagctccttagaagaaagggacgaaacggtaaagccgggtctagaaatgttaggagcaggtggttttaatgtgaaactgctgaagattcatggttcacttaactggctacaatgttcgcgatgcatgcgcctttatgtcgggtttaataaaaaaataggggttgcgagaggggcaacatgtaggcattgtgataaaaatcatgacgcagtaaataaagagaatagactgatatcaaatcttattatgcctacctttctaaaggatctatcaaatcctcaatacaaaataatttggcagaacgctggtattgaattatctgaagctgacaaaataatcttcataggttattcgttgccgaatgccgattttgaaatgagacaacttttatctcgaatgattaaacgaagtgttaaaattgaagtcgtaacatatgaaagagataaagaaaaagaaaaggatataaaaaaatattggcaggcgttttttggtgagcgtgaggttaaagttcatttatgtggtgccagtcagttcattgagcaatccttatatctttaa

SEQ ID NO: 146620 - DNA, 1257 bp, Enterobacter cloacae
atgacgttttcacttttcggcgacaaatttacccgccattcaggcattactcgcctgatggaggacctcaacgacgggctgcgcacaccgggcgcaatcatgctcggcggcggaaacccggctcaaatcccggagatgaatacctatttccagacgctgctcgctcagatgctggaaagcggcaaagcaaccgatgcgctttgcaattacgacggcccgcagggtaaaaccgaactgctggcactcctcgccgaaatgctgcgtgacgagctgggttgggatatcgaaccacagaatattgcactgacaaacggcagccagagcgcgtttttctacttgtttaacctgttcgcagggcgtcgcgccgacggcaccaccaaaaaagtgctgttcccgctggcgccggagtatatcggctacgccgattccggcctggaagaggatctgttcgtctccgcgcgcccgaacattgagctgctgccggaaggccagttcaaatatcacgtcgattttgaacacctgcatattggtgaagagacgggcatgatctgcgtatcgcgtccgactaacccaacgggcaacgtgatcaccgacgacgaactgatgaagctggatgcgctggcgaatcagcacggcattccgctggtgatcgataacgcctacggcgtgccgttcccgggcattatcttcagcgaagcacgtccgctgtggaacccgaacattgtcctgtgcatgagcctctctaagctgggtctgccgggcagccgctgcggcatcatcatcgctaacgagaaaatcatcaccgccattaccaatatgaacggcattatcagcctttcaccggggggcattggcccggcgatgatgtgcgaaatgattaagcgcaacgacctgctgcgtctgtcaaatgatgtgatcaagccattctattaccagcgcgtacaggagacgattgcgatacttcgccgctacttgccggaagaacgctgcctgatccataaacctgaaggggcgattttcctgtggctgtggtttaaggatttgcctatcaccaccgaactgctctaccagcgcctgaaaaagcgcggcgtgctgatggttccaggcgattatttcttcccggggcttgataagccgtggccgcatactcaccagtgcatgcgcatgaactatgtgcccgatccggaaaaaatcgaagcgggtgttaaaattctcgccgaagaaattgaaaaagcctggcgcgaagacggtcagtaa

SEQ ID NO: 146621 - DNA, 741 bp, Enterobacter cloacae
atgactattaaatacaatttactcatcgctgccacgttatttgcaacatcctcagcaatggccggtgacttttcactaggagcgggggctgtatttaatgagtctccttacaaaggctataacgaaaatactactgcagtaccgttaattagctacgaaggcgatcgtttttatgttcgtcagaccacgggcggatggatcctgtggaaagacgcaaaaaatgaactcagcctgaccgcatcgtggatgccgctgcatttcgatccagatgacaacgacgaccatcagatgaaacagcttgatgagcgtaaagcctctgccttcctcggcggcgcgtactaccgccacgaaagctggggttctctgaaagtggcggtctctggtgatgccacggatgaaagcggcggtatgatcggcgaggtttcttacttccgtccaatcaggatggaacgcctgaccctgacgccctctgtcggtattttctatagcgacgaaagctataacgactactactacggcgtatccggcagcgagtctcgccgctcaggtctggatgaatacaccgccggtgacagctggacgccatacgttggcctggcggccaaatatcagttaacacagaagctgtatctcaacgccagcgcggtctacaccgtattgcctgacgacgtgaagaacagcccgatgatcgaccgcgacgacagctttgcgctgatgaccggcctgacctggcgtttctga

SEQ ID NO: 146622 - DNA, 876 bp, Enterobacter cloacae
atggtggcttttatgaagtttcaggatatgaaaaatgaacaggagagtatattggcttctgctgtcggtcaacaaatgaaacagatcggtgaagcagttaatagctatataaatatccgttatgataagttgtcaaccttatccaatgctgccggaacaggaaccgatccgggtccaagaacctgttcaggttcagtatgtgaaattacttaccagacattgattaacgaaggtttgctactttcaacctacacaggcactaatgctaataaatcctcgtataaaatcatattaaaacgagatggaacttcacctaactatgttattaatggtcttataacgacatcgacggcatggattgaaggcggaaaaacacgttatgatttattagggaaagccatgcaaacagcaggtatagatagcggtatgactaaaacaacatctattgcttctgggcatagtggtcaatggacagaaacgtctgctaattttaataatatcacatccactggacaattagcatttcgtgtaggttataacagtgctttatattctgtttatttaagacgagatggaaccttgcctatgactggcgatctaaatcttaacggacataatattaacaatatcgccaatatcaatgccacaggcaatattacgacgacaagcgacctacaggcaagaaatattaaagctactggaaaagttgatgctgacggtgatatttcatcaggaagatatttgattgctaaaagcaaagatgaagatgcatcaataaaaattggaggcgatggcgctggaaatcataattttatgtttgaatctcaaaaaagaacatctgttgttttttttcaagcgttaattctacattgttaa

SEQ ID NO: 146623 - DNA, 1284 bp, Enterobacter cloacae
atgagatatattaaatcgcaaagagatttggataaatatatcagcatagaaaagaggcatcttctaaggcttgctcaagaaaatagagaacaaccgcaagttgatagcgatcaacaatctcttagagatttaaatgaactattagaaaatgttaactctaaagttaaagaaataagctatgtcaaacaggcaacagctgaacttaattcagagttaagaaagctttcatacaactatgaacgcttaaatattgaattggattcaggcgcaataggtgttgatcagttcatagaaaagttagaattaagttcaaactcaaatggacataaactccttcttggcggtgatggattaaataatcagatattattagctctctggaagtcaaaaagtgtcagggaacatgacgaaaatagtgaggttgtaatatattgtattgaggaaccggaggcgcacttataccctcatcaacaacgtaaattatctgagtatcttacaagtaaattacctgggcaatcaattgtaacaacacattcacctcaaatagctgtaaattatcagccagattcaattataaaaatatactctcataatggagcatcttttgcagcaagtaatggatgttcaaaatgtgtaagccaggcttgggataagatgggctatcgcataagcatcattcctgcagaagcattctttgccgatgtggtttttttagttgaaggccactctgagttgattttctataacgaattagcaaaagctataggatataatttagatttctataatataagtattttgtcagttgatggagtacaatttgaggtttatacaaatatattaaaagcttttaatataaaatatgttgttaggactgataatgatgctggaaaggtccctcataaagatgaatatcaatattcaggaatcaatagaagtcgccatttatgtgggcttccaccgttaaaaaatgaattggcaaaaatagaacaatctcaattaaataagcagtggattgtgcagtcaccaattttaaatgcatgtgctgtttttctatcatttacagatcttgagggcgatttatgtcaggagttttcagcacatgtccttgaatatagcggtaagagtaatataaatgaagctgctaattatttgagagataaaaaggcaacgcgtatgcgtgaattgatagctcttaagagggtaaatctacctgaacttgcaactggagatctcgttcggccattgcttaaggctatctctttagctaaaggtgaaatataa

SEQ ID NO: 146624 - DNA, 1623 bp, Enterobacter cloacae
atgatccaattcactcaggaacagcaaaatgccatagattttcctggcaatatggttttaaccgcgtgcccaggcagtggaaaaactactgtggtaatagaaaaaatagcaatggatttgagaggtatgaaaaactttcaaggcgtcattgcaatatctcataccaataaagctagcgacgaattactaaaaagatcaaaaaaatttatagtagatgtgaaatctagtttctttggaacgattgataaattctttttacgtgaattcattttcaatttcatgaatcattttgcatctagacccagttccttaaaaatcataaaatttaatgatttattgcctgagcaacaagctaaaatgttatttttattagctgatgggtttgttattttaaaagaggatgttaatgcgctaaatgaaatctacaccctttattctcaaggggtgtttgtacttgaaatggctccacttatgtctctttttattcttacgtattcacacgcttgtcaaaggtatatcaaagcgaaatataaatctatatacattgacgaatatcaagactcaggttttatacaacatgagatttttaaattaatttcaatgtttggtattaaagcagttgcagtaggagatgctgatcagtctatacacgaatatgccaagaaatattcaaagtatttgattgaactaaaaaatggcgataatggatttgaaccgtttgaattaacattaaaccaccgctgtcattattccattgttaattatgcttcaagattaataaggcctgaatgtactttaattgcaggtggtaatatacaagtctatcgggtctgtatcccggggtattttgaagaaattgcctcatggatcgatagtggattagagtcaataaaaaagtcttttggaataaaatataacaatcaaattgctatccttgcggtaagtaataaaagtgtttcatatatatcctcctgtctcaaagtgcaaaatagagcttacgtggatgataaattgtccaagctaggtactgatgtttctaggttaattatggatttgttacactatagatataataataaccacacagcacaagatattatagataattattctgaaagtggagttacaagacggcaggttaaattattgaggcgtgaaattaatctagtcagaaagattgatgattgtaacctcatcgcttctgtgcgtggagtcttaactctcttaggggattataatcttgagtcaatacacatagacggcattaatgaggtgcttcaggttgatgcagtaaggaataattacttacctattaatcaaaacgaagttcagattatgaatattcataagtctaaagggttagagtttgattgtgtatatcatttagacctttatgatcatgttttacctaaaagagaatatccagtcgggagtagggatgttatttataaaaatgaaaagcagtgtttgaatctacattatgttgcattaactagagccaaaaaatttgttgtattagttacatccacggagcgcattggttctaagggctacagaatccctgcattaccatctcagttttttgatcgtgcaggtttggagggtttgtttaaaaaattataa

SEQ ID NO: 146625 - DNA, 813 bp, Enterobacter cloacae
atggcagaacaacacttgactgaaaaccagattcaggccgcaaccggacacgtagtaacactcctcgcgagggcaaaaaaaccgcttcaggatgcggattggctcatgagtttgcctgcaaatgaaatagcccgcgagacggaaaaactgacaaaaagcctttcctccgactggcagtcccgaattatcgacctttaccaaaaaatgcaggcctgggtggaggccagacaggccgaagaagcagccattgagaaccttcgggctctacgccagcatcagaccgaaactgagcagaccagcaaagacaatcgggcgcagttcagggaattgcttaaccagagcggcggcatcgtaacgccgaagatgaaagctcttcgggctgagtatctggaacaacaggaaacagccacagaactggccgggctgattactgaaaaagaagagcagctgccggtactggctcaagcgaccgcgcgtaaggcaaacgtctatataaacttccatcatggcatcactgaggagcgtatcgatgagcttttacgagacttttttattttccacggtgctgaattgagcagcctactcaggatgaagtacaggcaattcgagcggaatagctcagtgcatataccgggtattattgaagggacaaatgatgcagatacgttgtatcgtgaatttatcctgaatctaatgctgaagtggacgaatgaaatattgccgttgagattccgggacgacgtgatgagtctgaccggttcagcaccggtatcaggatcacatgaagacagaaaaaaaagaaagctgttctga

SEQ ID NO: 146626 - DNA, 552 bp, Enterobacter cloacae
atgagcttagtaagatacaaaactaacccatttttggatgatatgattgttccagtaaagggacagaaagtgcagatctctaagctgggaaaagacaacaatatcttggttaaccaatcgacaggtgaggtacacggaacgcacgtaactacatatcgaaaggttgattcagagcagttcgtaaagcttttcacagccaatattgctttaactttccagttgtcatcagcaggtataaaagcattcggggttttattatgggttgttcaaaacaaagctctctcaaaagatgaggtcgatttagattcatatgccttagatgagttttatgaattacataaggactcagaacccccactgcgactaagccaccctacttttaaacgggggataaacgaattagaaaaagcccagattgttgcaaaaacacttcggaaaggtcgctattttattaacccaaactttgtatttaatggcgatagagttgctttcacaactgtcattgaaagaaaaaaagcagagtccccaaaaataaaagagatttcgtcttga

SEQ ID NO: 146627 - DNA, 192 bp, Enterobacter cloacae
atgagcgaaaaacagcgacgtgaaggttttcgcaaagcggaagcctcattaaggctcgaagggctggatcccagcggaacgcctcactatgagttagttaaagcgcgcattatttcgggtgaaatcagctatgaacagggacgaaaggagatttttgattattacgttcagaaagctcgctccaaagaataa

SEQ ID NO: 146628 - DNA, 1020 bp, Enterobacter cloacae
atgcgatcccacgtctggccggatggacgccggagcgagggggggggaagcatggcgaactacgcgataatgcgctgtaaaaagctgacgggaatgggcagtgtggccagcgctttgcagcactgctacagggagcgtgagacgccgaatgctaacgctgaacggacaccagaaaactactgctctgtatccgaatcaacggatcaggcaatggggcgtgtccgggagctgctgcctgaaaaacgccgtaaagatgctgtactggccgttgaatacgttatgactgcaagccctgagtggtggaaagaagcgacgccgcagcaacaggcggagtttttcgcccgctctgagcaatggctggagaagaaatacgggaaggatcgtgttgtggcggcggtggttcaccgggacgaggccaccccgcacttgtcagcgttcgtggtgccattgacgcaggatggacggctgtccgcgaaagagtttattggcgggcggtcaaagatgcgtgaagatcagagcacctacgctgaatcagtaaaaaaactgggtcttgagcgcggcatcgagggaagccgtgccacgcatcagacagttcagcactactacgaatcgataaaccgtggcacccgtagccaggtatcgatctcgccggaggcgctggagccgcgtgtattgcggaagggcattttcaccaaagacgtggaagatcaggcagccatagccaaacgtctaagccacgcagtgaacgatggctttgcaggaaccatcgctatggcctctcagagcgctcagaatgcaaaaagagcgcgggagctacagaagactatggattcgcagcaaaaacgcctacagagcgttacagagccttttaagggactttcccgggagcagatgacccatattctgacgatggcgcagacgttccagcaacagaatcacgatcgtgaaaaacagcgccagcttgaacgggagcaggaacgccagcaacgtcagaaaactgacagaggtattagccgatga

SEQ ID NO: 146629 - DNA, 828 bp, Enterobacter cloacae
atgtcacagcttagttttattgatgttttcgatatggcgagagagacgccacaacctgttgaaaaaccatgccagccagaaaaggcacatttttcggctgtccataacctgatgacggcccagtacaaccggaataaatttttcagcgtatttaaagatacgggccgacatcgtcaccgctgggaagtattcagcgattttctggcgctggctgcaagtgagcttgatattgccgggatcagaacgccgcaaagtatcgagcgatgccggaaaatatgcgaacgttacgaaccatctgatatcgagaagatgcatgaactctttagtctgatggtatccgcgcttgaggcaaagtttcatgattttctgggagcaatatttatggaactggaactgggcgacggaggaagagggcaatattttaccccttacagcgtccagacgctgatggccagaatgctgatgccaggtattaccgagactatcaggcgcgaaggcatcattaccgtcagcgatcccgccagtggttccgccgggatgctgatagcctatgcagaatgtctgcttgaagcggatattaatccttcagtgcatatgtttggtagctgtatcgatatcgatccggttgccgctgatatggcatttatccagctttccctactgggaatagcagctgaggttatcaccgggaatacactcacaatgcaattaagtcgggtacgctatacgccagtgtattacctgaataacttcgaagaaaaactagcaagccaggcgcgcattaaagctatgcttaactttatccgcgggatgcctgaagctgcgtag

SEQ ID NO: 146630 - DNA, 147 bp, Enterobacter cloacae
atgcaatttgaccctcaaatcgtcgcacaggcgaacgagtttgtaaatgccttgcgtagcggtaagcgcgcccacgttccgggaatgagcctggaatactggcagcagtttatgaccaccgtatacgcaggtctcggcctcgcgtga

SEQ ID NO: 146631 - DNA, 348 bp, Enterobacter cloacae
atgtacttacaccttactgaatcatctgccgttcccggtatgcaggctactgccgaagctgaacgcgtgtactggctacgccgtcaggaacaggccgtaacaaagccttctgaaattgacgtgcacgcctttcataacgcgctggggctgatgtatccactgaactggtcaacaagtgaaaacaatgactgggagacgttcatgatggcggaagtgacttgcggagaagtgaccgaaatttatgcccggaccggtgcgcgatatttccggtttcgggatgtatgccgcctgagccatgcgcaaattaaaacgcgcattaaggaggaattcaacctgtttcaaaaatga

SEQ ID NO: 146632 - DNA, 396 bp, Enterobacter cloacae
atgagcacacaaaacgacagcgtaaaagccgccaccagagaatctgccaaaagatgggggacagacccgaaagcgcgtctggcctgtgttatagcggaacaaaaggcatatctggccgagctttgcggcattaaggaaattcagctgactgagcatgaagaggctgaggaaatcagcgacatcctgtgcgccatgagtaaaaacgtctggtatgagggagttctggactggatgcgcgaaaagcctctgctgtcatttcatgttgttcagccctggttacaggctaaagcatatgccgtccagctttatggtgaaacggggctggctgcgtggacgtatgcagataagagccttaaggacaatatgatttttgaacgcgccatgctggcagagtaa

SEQ ID NO: 146633 - DNA, 609 bp, Enterobacter cloacae
atgaaaaaggttcttctctctgcagcaatggcaaccgcgttttttggcatgactgctgcccatgcagctgataccactgttggcggcggccaggttaatttcttcggtaaagttaccgatgtatcctgtactgtttccgttaacggccagggcagcgatgcgaacgtttacctgtctccggtaaccctgactgaagttaaagcggcagcagcggatacttacctgaaaccgaaatctttcaccattgacgtctctaagtgccaggctgctaatggcactaaacaggatgacgtaagcaaactgggcgtgaactggaccggcggtaacctgctggctggcgcaaccagcaaacaacagggctacctggcgaacaccgaagcttccggtgctcagaacatccagctggtgctgtctactgacaacgctaccgcgctgaccaacaaaatcatcccgggtggcagcactcagccgaaagcgaaaggcgacgcttccgctgtagctgatggcgcgcgtttcacctactacgtaggctacgccaccagcgcgccgaccacggtaaccaccggtgtggttaacagctacgcgacttacgaaattacttaccagtaa

SEQ ID NO: 146634 - DNA, 141 bp, Enterobacter cloacae
atgtaccgggtaaaacagctgttcggagggtcactgacactgcgtgactacgatggtcaggttgcagaggctatggccctggtacgagcgctgaacaaaatgacgaaagcaggtatgcctgaaagcgtgcgtattgcctga

SEQ ID NO: 146635 - DNA, 414 bp, Enterobacter cloacae
atgcgtcaccagcagtaccgtaaagccgtgcgcctgccacagggaaccaatcaaatcctgcatttctatccgcgtcagggcgtcgagcgcgccgagcggttcatcaagcaacagcaggcccggacggtgaatcaacgcccgtgccagcgcaacgcgctgcttttgtccacccgagagtgcggcaggccattcatcggcgcgattttccagcccaacggcggccagcgcctggcgggcttcatcccgccagttacccttaagaccgagcccgacattgtcgataaccgatttccacggcagcaggcgtgcatcctagaacatcatgcgggtatcgtcctgaatattcgaaagcggcgtcgttcctgccagaatgtcgccgccgttgggggcttccagtccggccagcagccgtag

SEQ ID NO: 146636 - DNA, 276 bp, Enterobacter cloacae
atgactaatcttaaatgcccatattgtgggagcactgatacaatagttcgtaaagcgggtgaattaaataagcagctcaacactgaccactttacccaacatacgtccggagtgatttcagccgatcaagttctaaagttaatcatggcgatcctaacgaccggaattgctttattcggatttctcaaggctagagagaaaagaaaggaagaagaggctaaaaataacgccagtatccttttatgtaaatcatgcaataaatgggaaaaaatctga

SEQ ID NO: 146637 - DNA, 228 bp, Enterobacter cloacae
atgtacagcaaactgttaaccgtatgtctgatgacgatgttgatcgggagttgcgcgaaaagtttacccgccccggtggtggttgatactgggtgtctgtggacccgaattatctatctgaccaacaacgacatcgacgttatggaccgccagacgaagaaagacatcttggcccataacaaagcgtggcaggcgaactgccagaaagaaaccagagcttcgcaatag

SEQ ID NO: 146638 - DNA, 627 bp, Enterobacter cloacae
atgaaccaatcacaatttcaaaaggcggcagggctaagcgccgagttagctgcgcgctggtttcagccagtaagtgatgcaatgaaagagttcggcatcgccaagccggtagatcaggcgatgtttattgctcaggtaggccatgaatcagctggcttcactctactggtggagagcttcaactaccggattgcggcactggctaacttcattcgtgccggacgcctcacaacagaccaggcaaacacgcttggccgtcgacctgaagaacgcactttaccgattgagcgccaacgcgccattgctaacctggtatacagcaaacgcatggggaacaacgctccaggcgacggctggttataccgtgggcgtggccttatccagattaccggcctcaacaactaccgtgattgcgggaacggcctgaaggttgatctggttaagcagcctgagctattggccgaagatgtttacgcagccagaagcgcggcatggttcttcgccactaagggatgcctgaagtattccggcgacctgctgcaggtgacgaagattatcaacggcggaacgaacggacttgaagatcgtcgcgctcgcttcggtcaggccaaaacggtactggtgtga

SEQ ID NO: 146639 - DNA, 396 bp, Enterobacter cloacae
atgtccgatcctgtttctggcactacggtagcggctggtggtctgatgggggccagcatgttcggtctggcaactggcatagattacggtgtggtgtttggcgcattcgctggtgcggtgttctacgtcgctacggcggttaatatcagtcgccttaagctggtgggctacttcatcacctcattcatcttcggcgttatcggcgctccactgcttggctcttacttctccaaatggacggggtatagcgacaggccacttgatgcgctgggcgcggtaatcgtagccgctattgctattaagctgctgacgttcgtcaacagtcaggatttgggtagcctgtttggaattctctcgcgtttacgtggtggaggggccagcaatggtaacaagtga

SEQ ID NO: 146640 - DNA, 804 bp, Enterobacter cloacae
atgaatcagttattcgtaattgatggcgtttccgtacgccgtgattttgatggacgttactgccttaatgacttgcaccgtgcagctgtagcctcaggagctaatgagcgaagcaaggagccagctaaatttctctctagtcctcagacggttgaacttgttcaagagttgaccgatacccaaaatctgggtaacgctccggttaacaccattcgcggtggccaggaacaaggaacctacgtatgcaaagagcttgtttatgcatatgcgatgtggatcagccccaaatttaatctgaaggtaattagaacatttgatgcgacccagacgggaacgccactaccacaagcaactgataaaattcaggcgggaatattgctgctggaatcagcagccagaacactgaacctttcaaattcttcgaaacttggagcttatcaaaagctccagcaggtagcgggtcttccagatctgatgccgcattacgcgatcgatgctccatctggcgcgcaggatgggtccagtcgtccgactcaatcacttagcgctctgcttaaatccaaaaacatccgcatcaccgccaatcaggtttatcacatgatgtcccgctttgggatcgtggaacaaaaagagcgaaacagtcgttcaggcgttaatggcgttaaaaagttctggtcacttaccgccaaaggctgcatgtacggcaagaacatcacaagccctgcaaacccacgagagacacaaccgcacttcttcgagtcgaagtttgcggaattgctcaaaattatcgacatcatagcctga

SEQ ID NO: 146641 - DNA, 282 bp, Enterobacter cloacae
gtgcgtgacaaaatcggctccttccgcgagcgcgaagagatggagcgctggctgaacgactgggtcatgaactacgtcgacggtgacccggcgaactcctcccaggagaccaagtcccgcaaaccgctggcggctgcggaagtgcaggtgcaggagattgaggacaacccgggctactacgccgcgaagttcttcctgcgtccgcactaccagctggaaggtctgaccgtttctctgcgcctggtatctaaactgccgtcgctgaagacgaaagacgcgtga

SEQ ID NO: 146642 - DNA, 141 bp, Enterobacter cloacae
atgtttgagtatagagcgccgcgttatgccgccttgcgggaggagaagaaattacagcggagatcacatatcgttaacaataaagcccataagttgtgcaaaggtcacgatttgcacgtttttgcagcaataaagacctaa

SEQ ID NO: 146643 - DNA, 366 bp, Enterobacter cloacae
atgagtgattttctgttagaaacgggccgccagacgctgatgctggagctgcaggaagccagccgcctgccggaacgtctgggcgaggattttgtccgcgcggccaacaccattatccactgcgaaggcaaagtgatcgtggcgggcatcggtaaatccggccatatcggcaaaaagattgccgcgacgctggccagcaccggcaccccggccttcttcgtgcaccctgccgaagcgctgcacggcgatctgggaatgattgagagccgcgacgtgatgctgttatctcctactccggttcggcgaaagagctggatctcattattccacgcctgcaggaaaaatcggtcgccctgctggcgatga

SEQ ID NO: 146644 - DNA, 258 bp, Enterobacter cloacae
atgatccttgattaccatccgaactggctcattcagactcagcattccttatccagcgatcttattaatctgggcggtgataagggctttgttatattttataccgtccttatcattgtatttagcgccctgatgaatatctggttcggtaaatgggactggggacatatttattatcctccgctgtatcgtaaaaaagaagaagcacgaagactacagcgcgagagagaagcgcaatggcagcggcaggatgaataa

SEQ ID NO: 146645 - DNA, 1221 bp, Enterobacter cloacae
gtggagacaatggaaattgaattcataggtcaggttgataactatttagcatggaaggattatcaacgaggtgggcggtgcataagattcatagcagttaaaaaggagtctttagaattttttgcaaatgatgatggggtttgcacatatacagtggatattagttactgggaactatcattggaaataaaaaaacatgtgaaatatgcattgaatgatggtggcgaaaataattcatggttttatataaaaggagaagttgggaaaagaaaaaattccggttatttttataaaacattcggtcgtgatgaaccagagtattttagtttgcaacaatgcaaaatgattactagtccgccaatcattaataaaaatattgagaatgaacggaatacagaattcgcagtagaagttgacatttcaagttcgttaagttttgaaaattataaaactggcaactctcgatgggatttctattcattccatgttgggcaggggatgtgctctcttataactaatggcaaagatggtattttactggatgttggggctggtaagcctatactgcgaggggattatctaaaaaatgattatggatatataaaaaaccacttatgggatatgttggctgagttgaataatgttcgtgtcataatatcacatcctgacagtgatcattggcgaatgctggcatgggatgttagaatatctaacaaggtaagttcaatatttattccgcataatacgaaaaaaattatatggaaagatatcacgataaataataaagtcacaaatgtttctggttctatttatttctatgggggcgattttgaactgtttgttttacgtagtttcccctccaaaaaaacagataatacggattgtttggttagtttatttaaaaatcatgatggtgagaaaatattacagtctggtgattacgtatattctgacatgaagaatgatctttgtccctttataaggcatctttctattctatcttatgatgcggttgtggttcctcatcatggagatgcggcaagtgcaaatgctatttttaaaccacttggacattctgcaaaagcattcttttcagctgggaaccatacaggatatggtcatccaacgaaaacctctttggataaccataaggcaattggttataatgagatatgtgataacacccttaccttaataaaatctgtcaagctaagtaattga

SEQ ID NO: 146646 - DNA, 894 bp, Enterobacter cloacae
ttggagttaacattaaaccttaaagaacttgcccctttcattggattattcgcactttattttgcagtaaggaattacagacgaaaatccggaatgtacattagagggaaattcaacatacatccaaccatttacgcggaagataaatacgtaggaagcataacccttgaaaatttcaaggataggtcagtaatcatctttaaaatatttataaaaataggccacaaccattacattgagatgaatgattttgaaggcgacccaaaaattctaaaatcatacgaatccttcacatacaattatgaacccgttgatctctactgttcaaacatggttagggtaaaattaaataaactccttacctccagaaattcaaaaataaatattgtactttccacttcccaaggaaaatatgtagtcaaaaaacgcattaaacgatgggatccggttttcgatttctttcgcaatcatttaaccatctgtatacagccaatgtacccacatgagaaaataggtcattacggaaacgaattcaaatatttagtaaagttaaccaccgaggatggatatatcaattcgacacctgtctactcgtcagacacccactaccctagatttggaaacatcgaacttacatcagaagcaatttcaacacgtgagaacctggaaaatttcctgcttgagcaagcaattaatggacatctgaaatgtactaaagtagaagtgatagatgctgaaagtgttagagagagaaactaccatcacaggttcaaagatacttttgaggcagaacatatcaattggtttacatataaaatccttggtagattattaactatcggtagcaatataaaactttcatatcaaaatcgtaaattacgaaaaaaaaggtag

SEQ ID NO: 146647 - DNA, 447 bp, Enterobacter cloacae
atgagtgaatttaagccctttgaagacaggctcaatggtctgattgctgccctgtcaccggcatcgcgcaggaagctggccggggagattgcaaaggagctgcgcaagtcgcaacagcaacgtatcaaacagcaaaaagccccggacggctcaccgtatcaggcgcgaaagcgtcagcctctcagggctaagaccgggcggattaaacgggcgatgtttcagaagctccgcacaagccggtacatgaaagccactggccgcgaaagcagcgccgtggtggagtttatcggcaaagtgcagcgtatcgcgcgtgtccatcagtacggcctcaaagaccggccaaatgcgcacgcgcaggacgtgcagtacgcagagcgccagctactcggactcagcatggcggataaaaaaatagtcgatgtattggtgttaaaatattttgaataa

SEQ ID NO: 146648 - DNA, 1092 bp, Enterobacter cloacae
atgaattatgagattgattttttagcagttggtgaaaaaaaaagcggcgatgcgatatgtatacgctggggaaatcttgaagggactcgtgaggagcagaaagtagtcgttattgatgcagggtacgctgcaacaggggctaaaatcgtcgaacatctcgaaaagttctaccataccaaaaccattgatttgttaatttctacacaccccgatgcagaccatgtcgggggattagaaacggttcttgaaaacgctgaagttagagaattttggatacatcaaccatgggaacacaatgataatttagcacaagaatttcgtgatggcagaattacagacgccagcatagcgcgacgcatgcaagaaaatttacagaaagcctatgacgcagtaaaacttgcacgtaagaaagaaattgaaattaaagaaccattccaaggcatgacatgggacaatgcgaaccttgttatagtaggcccaatacactcttactacgaaacattaattcctgaatttgcaagaatgcccgaaagagttgcggcagaatcaagctcaggctttatcaaacagggatttgaagcttttgttgaaaaagcaaaaaaaatcataaacattatagctgaatgggcgtctgatgaaggaattgacgataaggacactacttcagcacagaataactcaagtgtaattctgaaattagaattagatggtcacactctactttttactggtgacgcaggtattacagcacttgagaaagcaatagattttgtagatacaacttcattgaaattcattcaggtcccgcatcatggaagtaagcgaaatataggcccaagcattctcaataaacttattggaaacatacttccggaaggagaaactagggatatagcagcttttgtttcatgtgctcctggttctgacaagcatccttcacaggcagtgattaacgcattcacacgacgcggggtcaaagttattgctacagaaggtctggacaaatgttattttaacggaaaattatcgaggcagggctggacatctgttacgcctcgcccatttgttagtgactacaatatcgaagaatga

SEQ ID NO: 146649 - DNA, 486 bp, Enterobacter cloacae
atggatggtttgtgggagaaaatttcatcttacaatatttttaataatctttttcctggagctttgtttgtgtacctttttgaaagggcttcgcatgtggtattatctacggaagatattgttaaaaatattgttctttattattttttggggctggttctggggcgtctcggttctattataattgaacctttgttcaagcttttcaacttggtgaagtttgcgccctacgataagtttgttgcagccagtaagttggacagcaagattgatgtattgcaggaagttgcgaacatgtatcgcactctctttacagtttctgttgtcatgctcgttagtctttatcttatgtcgaaagtgactggtggaaattatattttatcacaaatggcatgttcgctttttgctctgctttttataatatcttatgtgaagcaaattcgctatattgtaaggagagtaaataaattaacagaactgccctga

SEQ ID NO: 146650 - DNA, 825 bp, Enterobacter cloacae
atgatgacggattcgattatccattatcacggcacgccagtatggggagacgccggtaacgttcatcgtgttgcagtgaatggtgctggcgcttttgtttcttttgccagacctgaccagctcgccgcctcgattaaatatgcttgcgccgttgctattgataatggggctttttccgcgtggaaacgtggtcttgttatcaattggcaggagttttatcggtggttattgccccactatcatcacccaaaggtgtctttctttgttattcctgatgtggttgagggtggagaagctgacaatgatgcccttatcgattcaatgcctcgctgtttccgggataaagccgcgcctgtctggcatcttcatgagtcattagaccgactggttgagctttgtaatgaatggcctcgggtgtgctttggctcatctggtgaatatgccagcatcaggactgagcgctggcatcgcaggatgcgtgaagcattcgatgcaatttatctgaaacatagctttaaaactaaaattcatggccttcgtatgctggatggccgtgtccttggaaactatccgcttgctactgcagatagcacaaatctcgcctgtaatattccaaaatttacaagcaaataccctgagataactcgattcattcaggaggcggattacaaccagaaactgagtgagcgtgaacttaaagccgccattcttattggtcgctgcgctattctgaaaaacgcgatcgagagtgtcacgcctcctgcaattcaatgctggtctgaaatgccaaagcatccgcaacagttggagcttttggtggcatga

SEQ ID NO: 146651 - DNA, 156 bp, Enterobacter cloacae
atggggaaaaaggggacggtgttcctgagtgaagcgctgactgatgagtacatcatgctggaagaacaggatgatggcctggaggccatcatcttcaacggaataacgcttgcgtactacgaccgaaaaacccagagtgtggtgcggatagactaa

SEQ ID NO: 146652 - DNA, 489 bp, Enterobacter cloacae
atgcccacgaaacccggactcattttgcggcaagagacaagtaaggtgcatgagccattgcataaccgcagagcttgtccgtcctataacatcgcagacgatttgtcgtgtgtaactggtgaggaaacagcacgaccatccgctttgcataattgcttacgactgcatgacgataataggacagaagcaattgtggctgcaaaggctttggtgttcatgtttttaacggtaacgccgggaagtgacaaaacttgttttggtgctgaccggggttggccaagccgcgcagtcattgattataggttggggctaatccggcgcggcagcttcaccagagccgtcctgacggacgatgacctgatggctgggttttcctgtgccagaatgctggattctctcttacgtcttactggtgcgcataatgtcatacgcgttatgttgaaaaggcagctgcgagaatctctacccgcagctgcctctttagcataa

SEQ ID NO: 146653 - DNA, 156 bp, Enterobacter cloacae
atgataaaaaatgaacaggaatattacgctgctctaaaagaagtctcaccgctttacgatctcgacccgccggatggttctgaggaagccagaaaactggatgaactgtctacgctgattatgcagtatgaggcaaaaaactatccacttgattag

SEQ ID NO: 146654 - DNA, 1290 bp, Enterobacter cloacae
atgaaaaagttacttgctagtttgctttgtgcattgtcatttcagagctttgctatccctgtcgaactgaataacgcgccagtcagggagtttgtttcatggtattcaaaaacaaccggaaagcctgtgattatttcaccggacgtaaaaggggaaattacagtttactcagcggatgttaccaaggatgaactgtctcagttttttacgtcggttctccgggcgaacggttttgacctcagtccgggtaatcctgctgtggttcaaaaatttaaccgtgatacgtatgaatattccgattcattctcagagccggttccggcatcctcttatgagggggatgttcctcctccaactggagactttttcactaaatctgagatgcgcgccaatttgattactcagacgtatccggtcaataacgtcagagcaaaggatctcgcaccagttattgatatattcctgaagggggaaaatattgcaggtactaaagtttatccttttgatggagcgaatattcttgccgtaacggcatcagcatcacaacataaagaacttgcagcattttttccctctgttgatgtgccaagaacgcaggttcttgttgaatcagttatttttgaaacaacggcttccgatggttttgatttctcctttgcagcgggagatccttccggcagtccagtggcgggaggaatcaatactgaccgcctcacgtccgttttatccagcactggcggctcctttggtatttttaacggcaacattctggggcttagcctgaaagcgcttgaaacatcgagcaaatcaacgcttttatcaatgccgcgcatcctgactatgtcaggccagccaggaacatttacggcagggcaaaatgttccatttgtgacgggacgggtcacgggagaagctgcaaatgttaataatccattccagacgatcgagcgtcatgatgtggggatctcattgaaggttgttccggtcgtgacacccggaggattgttaatcatggatgtttcaacaaatgcggacagtatttctgattcgcaaacggcttccgacatcatcacaaatacacgctcaatttcgacaaccgttcagctaaaatccggccagacagttctgctcggcgggatggtggataacagggaaagcgacagtgattcatctgtaccgtgggtatcgaaaattcccttaattggtgcgctcttcacgtccaaaagctcaaatgcaaacaagcgcacgctgtacattctcattcgcgcccgcgtcgttaacctgctttaa

SEQ ID NO: 146655 - DNA, 1062 bp, Enterobacter cloacae
atggctgtatatgttgtaacgggaaagcttggtgcaggtaaaacactggtcgctgttggtaaaatccaggacaaaattgtttctggttgcagggtggctacgaatctcgacttgcgcattcataagttaccgagagtgggggtatttgcaaaatcaccggatgttatacgaatacctgataaaccctcactggaggatttactggcaatcgggagaggtaataattcctatgatgaaaataaaaatggactattggttcttgatgaatgtggaacatggtttaactcacgttcatgggctgataaagaaagacagtccgtaattaactggtttttacatgccagaaaattgggttgggatattatttttcttattcaggatctatccatcatggataaacaagctcgtgtggcactggcagagcatgtcgtttattgcagacgcctcgataaaatcacaatcccattcattggctcaatttatagtgtaataacgggttcaaaacttccgctgccaaaagtacatgtcggaattgttaaatatggtgactctccgcagtcaatgactgtagaacgctggacttatacggggcgtgatctttatgccgcttatgataccaaacaggcattttcagacgcttatgagcattcatcattctcatacctgacaccatatctttcacatggacggtatgccgtaaagagggacgctacgttttatatgagactttccagaatctatttaaagaaatattcaagagtattgtgcctgttttgtggttttgtatcagcattcgcatacctcagtctgtccagaccggaagcgacaactcagataaaaccagcatcgccgcagattatcacatcccgttataaaccatcagagttgaaaataacaacatcgtatcgaatgggaaatacggttggttttgagtttatggatgctaagaagcaaaaaatcgcatctgacgatctaattaaagacggtttccgcatggtctatatagcaccttgcgcagtagagcttattaaggatgggaaacatgaaaaagttacttgctag

SEQ ID NO: 146656 - DNA, 1395 bp, Enterobacter cloacae
atgaagaaaataattatcgctttattttttgctcctttctttacccatgcaactacagacgctgaatgtttaaataaacccgcatttgatggcacattaagtaatgtctggaaagaaggagactcacgttatgcaaattttgaaaactgcatttacgaactttcgggtattggtatcggttatgataatgatacttcgtggaatgggcactggacgcctgttcgtgctgctgatggctctggcaatggtggtgatgataattcatctggcgggggtggtaatggagactcaggaaacaattctacgccagatacagtaacacccggtcagactgtgaatttaccgtctgacttatctgctctgagcattccttctaatgtggttaaatctgactcaataggttctcagttttcgctttatacaaatgccaattgcacaatgtgttcagggtattatctgtctaacaatgctgattcaattgctattgctaacattacggaaacggtaaagtatgattataaccagcctgatatgtggtttgagcaaaccgacagtgacggcaatcatattaaattactacagaacagttataaggctgtttcttataatgtggaatcaaaacaatctgacgtgaataacccgacatatattagttattcttattccgttaatgtaaagcaggtttcctatgacacatcaaacgtctgcataatgaactgggaaacttttcagaataagtgtgatgcctcacgtgctgttttgataactgatacagttacgccatcttattccagaaatataacaatacagtcgaatattaattatcagggtggcaatgggtcaggcgggtcaggcgggtcaggcgggtcaggcgggtcaggcgggtcaggcaatgatggtggcggaaccgggaataatggcaacggaaccggtgattttgattacgtcaaaatggcaaatgccaataaagatgcactgactgaatcatttgacttgtcagctttgcaggccgatacaggggtatctcttgatggttctgtacagggaacgctggattctttaaggggattttccgacagcattggtgggcttgttggcaacgggtcagctatttctggtgagtttgcaggttcatcatctgcgatgaatgcaattggtgagggtgataaatctcctctgctggactcatttctgaaagacggattatttccgaccttacctgaatttaaacaatgtacgccatttgtatttgctcccggcaaagagtacgagtttattattgagtgcaaatacattgatatgtttaaaggtatttttgctttcatattatatttctggacgttcgttactgtttacgattctttttctggaatattacgtaagggaaggggataa

SEQ ID NO: 146657 - DNA, 225 bp, Enterobacter cloacae; identical to SEQ ID NO: 130599

SEQ ID NO: 146658 - DNA, 291 bp, Enterobacter cloacae
atgagtgagttaggaaatctggaaacgactgttaccggaaaaatcaaacgatttaataatggcggcggttattattacacgacagtggtttctcctgccgctgacgcatatagctttcctccggtcatacgcattaagtccaagaaatcacttggccgtgtgggggatgaaatagaagatattcattgccgaattacaggctacgaacgcagctttccatatacagataaacaaacaggtgagcaatcccgtggattcaacgtagacatgttacttgagcttctggaataa

SEQ ID NO: 146659 - DNA, 1116 bp, Enterobacter cloacae; identical to SEQ ID NO: 130597

SEQ ID NO: 146660 - DNA, 456 bp, Enterobacter cloacae; identical to SEQ ID NO: 130596

SEQ ID NO: 146661 - DNA, 753 bp, Enterobacter cloacae
atggacgcagcaacgattagtacactaaatacgacagtaactgtcgtgggttttattgcaacaattgcatcactaatactcgcagttggtgcgatttggttatcaattattttttataaaatgtcagatgctgcatccaaagaaacaacaactgccgcaaaagatattaaggcaagtgttgagagattagagaatcttttcgataaattatactctgatacatttgcaatgatgaaagatactgtcaccgacatgcgacagcatatatggaaaaagccaggctcaaataatgaacaaacatcaattgatgaaaaaatagcaaatgaaataaaagaaagcgtaagtcaggaaattataaaggctgttgaggagcgcttaaaggatctaggtgacaactcaaacaaaatcaatgaattagaatcatccattaaaaagattcttgatagcaatttagaagcatcactcaagaaaaatattattatccctagaagcgttctaagaagacggttgttatcaattctgaaaaaatacagaaaaataaaagtggataaattatttagcttgatgaactccgtataccaggagtcttttgatatgaaagatactgagcttatgggggaaatatttagattgagagagtcaggaataatagtttgggatggttcaccgaattcaatatcgtcagatagtatcataagatattttggcgaagataataattcaagtgataacgaaaccagcgtagatatttag

SEQ ID NO: 146662 - DNA, 621 bp, Enterobacter cloacae
ttgacaaaatcatcatttgatcttgagtcaattattaatgctgctggagaattgaaatacgtcagtcagattaaaagaatactacattcacaacttaacaatcctgaggacgacttcgttaaattctttgcatccagagtttatgacgggatgctaacccaaaaagtaagagaatcttttctaaatcttacgaaaaaggccgcaagccagtacataaatgatcaagttaatgagaggcttaaatcagctattactggtattgctccaacccccatcgaacctccaatcgaaacacagcctctcgaagaagatgatcataaagatgaaaatgatattgttacaactttagaagagttagaaggttttcatattgtaaaagcaattactcggactgtacttgaggctcctcgcattacccatagagacacaaagagttattgtggaatccttgtagacgataacaaccgcaaacccctttgccgattgcattttaatcgctcacaaaaatacatcggtcttttcgatatagaaaaaaacgaaacgcgccaccccatagcgacagtagatgatatttattcctttgccgatattctgaaagcaaccgcagctctctatagttaa

SEQ ID NO: 146663 - DNA, 1263 bp, Enterobacter cloacae
atgagcaaattgacagacatacagattcgtacatggataaaaaacaaagaacatttcgcgggacgctccgatggaaatgggctatatatctgttttccagagacatatagcgccccattctggcgctttcgttacaaaatggcgggtaaagccagagtgatgctcatcggctactactccagcatttcacttgccaaagcgcgggaaatcgctaaagagctttccgctcgtgtcgctctgggccatgacgtagcgggcgagaagcaagaacgcaaagcagaagcgttgaagaaaatggaggaagaaaaacacgcactacgtgtttcagagttagccgccgaatactttgaacgccagatcctgacccgttggaagaatccagacattctgcgccgtcgcatagacaaggacatcaaccctaatatcgggcacctcagaattgaagatgttcgtcccttccatattgatgacatgctgcaaaaaatcgtccagcgtggtgcaccgacaatcgctaacgatgtgttgagatggactcgccgcatattcgattacggcataaaacggcatatgttggaaactaatcctactggcgcttttgaaatcgctgatgctggtggacaggaacaaagccgggagcgctggcttagtcgtgaagaactcgtgcagttcttccagaccatgccaaagacaaagggtttctcacgtcaaaatgagttaaccatgaaacttattctggttttctgctgccgaaaaatggagttttgcggcgctgcgtgggaagaattcgactttaaaaatgccatctggcatctgcctgctgaacgggtaaaaaacggcgatgcgatcgatatccctattcctgctcctgcgcttgaatggctacaggaacttcattgtatgtcatgtaatagtaagtgggttcttccggccagaaaaatgcagcatcgaatgatcccccatattcaggaaagtacattatctgtagcgttaggaaaaattaaagccaacatgcctaacgtccctaacttcactattcatgatttccggcgtacagcgcgatcacatctggccgcgctgggaatagatcccatagttgctgaacgatgcttaaatcatcgaatcaagggcgttgaaggtatttataatcgttaccaatattttgatgaacgcaaagcagctttaggactatggaacaatttactcgtatcgttagaaaaaggtgagaattataacgtaacaccattaagaaaagatattgcgtaa

SEQ ID NO: 146664 - DNA, 585 bp, Enterobacter cloacae
atgagaaaacaagaaatattgattatcgaatcacgcagtgatcaggatatttatgatggcagatgcgaaggcgatacattaaagcgcgtccttcaattacagggtgttagtgcaaaaagtatagaggtgattaacgaagaaatgtttattaaagccttaaacatagccaagcgagaaaatataaaatacattcatatcagtgcgcacggttttgatgagggtttttctcttactgacggtgatattgttacgtggcgtgatttcgaccgtcttgcatggccaattttacgaggcaagtgtatttgtttctcaagttgctctgttggcaatggagtagcagaattatttactctgcataaatctttctgtaatgcaattgttgctccaacaagaaatattagttggggggaagggttggttgcatattctgcattttaccatcgagcacaatcacacgaaaattcatcttcccagaatgtaaaagtaatgaatcatatcgttggtgcaggaacttttaaacttatcgagtcaccttatatatcacgaacctatacgattggagccttcatgaacaatattttatga

SEQ ID NO: 146665 - DNA, 528 bp, Enterobacter cloacae
atgaaaccgagttatgaagagcttgaagagcaactgaacagatcgcgacgtctctgtgatgccgctctggctaatgaactggtctgggaaacaaccatgatgcaggcatgcggtgaagatggtccgaagtcagtagctgataagtttgcggagcttgaagccagatgcgcagctctggctgcggagcttgaagccagatgcgcagctctggctgcggagaatgcggggctgaagtctgcgcaccctcaaccattctggcctgtgatgatgaaggctcttgatgcgtatgagaagcatcaggatgaaacgcctgagacaggaatgctcgatgcattctttatcctgcgtgacagcatccgcgttgatacggcggcgacagacgctttcctggctgaagtgcgggcgcagggtgtggatgtggctatcgagcacctgattaacaaattcgaaggcacagggcgcattggcgttccggtaatggctctggagtggttggcgcaggagcttcgcaaaggagtgcagtcatga

SEQ ID NO: 146666 - DNA, 147 bp, Enterobacter cloacae
atgacacagagtattggtcacttgattatatttcctcaagcaaaaccgttcactacattcttcttaccggtgagctatctgtcgggatattcttcatactttctgcttttctttttttttcagaaaggcgatggcgaaaacatttaa

SEQ ID NO: 146667 - DNA, 156 bp, Enterobacter cloacae
ttgtctacgggcgtggggtcagtccaccgtccgatgctgcgcttctacgtgaccggcggcaaagtggataacgcacgcaccgcgcgcgtgaacaacaccaaagacgagacgctcgacgacttcaacgtcggcgcgatgtgggaggcgtggttctag

SEQ ID NO: 146668 - DNA, 597 bp, Enterobacter cloacae
atgaataagttttacacaatgcttttcgcggctttgcttttactggccgggtgcgaccagcccgtaaaaacagaaccagccccgcccggcgggggcggaaccattgaagccattaaccacaccagctgggccatcaaccgcttcagcgttaacgggcagtccggcctcgatattatcggcccgtattcgggtggcggtggaggatgctgctttggcgtgagcgggccgtggaagcccggaatgacggtgcaggttgactgggaaacgggcgtcgcgtttgccagcgatgtgcctgagatcccgcagcctgatgaaccagataccaccgggatgaaccgggatgagcgttacaaggcatggcaggaatatgcagataaacgccgtgagtggcgagcaataatcaaagggttgaataaaaaacatactcaaagcgttccggtccccgattacaccggacaaaaaacctgcggtattaccgttcacttcctgccctgtgaccaggtgaaggtcaccaccagctgtgccgactacggcagccctgattatcccgtcaaagaccccgtgcatatggagaagcccaaagtatgtccaaactga

SEQ ID NO: 146669 - DNA, 2409 bp, Enterobacter cloacae
atgtccaaactgaaccctgataatgtctggtaccctcctgagtttccggaaagaggtagattacctagtactagatctcactttgggcaaaactgcagggaacaaggccgtctggaaacgcaataccataaccagctttgcacggctgccaaccgacgcgtcttgcctccctgctgtaaaacgctccatatcagccttttctttgacggtacgggcaacaacctgaatcatgacctctatgaatcgaccccgcctcatccgaccaatatcgctcgcctgttccgttccaccataggacaaggctatgcagggggaaccggcgcgcataacgcagagctggtcgatcaggaaggcgtcgcgcacaaccagtattacaaatactatattcccggcgtggggacgccttttccggaggtgctggatctcgacttcagtgatgcaggcctgaaatacgcagcttacggcgaggagcgcatcaactggggtctgcttcggctggtagacgctctgcgatgtacgcttgggcttggcaagctgagcgatgaggaaaactggcactccattcaggctatggccaccaactactcacactccaacgttcacggagaatacctccgccacagagagcttttccggctgttaaacgggttgggtaaaacgctggagaccgcgttaacgcagccaacgccaggcacctctaagctgctgggaatcaagctctatgtttacggtttctcgcgcggagcggcctcggcccgggcctttgttaactggcttaacgccctgctttcgccttcccgagcaggggccttacaacctttttacctggcgacaaaacagggtgaaattccgattagcattgaatttttaggtttgctggatacggtcgcttccgtagggattgcccatattgccccggtagcggaaggtcatatgggctgggccgacggaacgatggaattgccggacaatgcgctgattaagcgctgcgtgcatctggtttcggctcacgatcagcggttgtgcttcccactcgattcaatctgtcgtgctgacgggcgatatcctgaatatgccgtagaggtggtttatcctggcatgcactctgatattgggggcgggtacccaccagtcgatcaggggaaagcaaatgctaatgtcgatgatttcttattatcacagctttgtttaaacgacatatacgcagcagcctttacttcaggtgccccattaaaagtccaaaaagagtcgctccctgaagatttacaaaaagattcatggagaattatgccagaagccctggttgacgaatttagtactgaccccttactaatccaacgcttcaacgcctggcgccagctcactcttgatttacctccttccgaaagtggcgttcccgatgaacaggcaaccctctactcccccgtacgcgctcgggtcaatatcatcgaagcgcttgaaaaccaaatcggctggataaccgcctggcgcatcaatcgctacgcccaggaaacattccggagccagcgcttttatcacgacgccgcagccaataatcaaaatcaggataacgatcctggtaaaagggcggaacgggaaagagaacgcgaaaaactacaaaaagatgcagaaagagagcgaattaaacagctcggtagccatccgcagggtcagtttgtcatgcttaaaacaggcccaaaagactttgatgccttgctcgggcaaactcagcttttacaggcagcattcgagttcaaagaagattatcagggcgtttctcgtactcaggcaaaaagcacaacctacgccgtactcgattacttcaaaggctttgtttttgcctttaaccaggatgatattcccgttgagtttaaaaagatcaaagaggcggggaaacaacatctggaaacactgtttccaccacaaggggaacagagcaatgccaatgacccctcagggctgactagagcgctttttgatgaccaaatccatgattcccgggcctggtttatgcacagcgcgttgggctcgcgcgaaccctggggcagttattttatctaccgtatgatctatttcggcgaagcgacgagtaaacaggtaaaaccactctccatgctgggctatgttgcaggcctgggttaccccatctcaacgcatgaggtccagtttcttattgaattgcaaaacaccggacaagggccatcagcatccgtcgaacaacgcatttctgtccttgatgccagcacgggatatctgctggggatattgcaggataaaacccggcaaataccctgcgttcactaccctgccgcaatcctggcagagtgtcaaaaagcggaggaaatggcttttgaacaaaagagagccgcaatacagtcgtacattgaaaatatgaattattccgactaa

SEQ ID NO: 146670 - DNA, 1239 bp, Enterobacter cloacae
atgctcaataaagaacgtcattacgcaatactgacctacctcaaccgatatgagctcgcgacggtaagccatctcgctaaaatttttggcgtcacccgcgaaactattcgcagtgacctgaatatattatcgaaagaagggagcgttgagcgttgccatggtggcgcccttattaagcgccgtatttttcacacccagtccgtcaataaccttgatagcaatatcattcatttttttgaatctgctcagtcaaaaaaaacagccaaatctcgacataaagggcgaaagatgaaaggcaaagtctgtattttagggtcgttcaacgtcgatattattgcgaatgtggatcgttttccacaaagcggtgaatcgatattttcagaaaataccattatcgggccggggggaaaaggcgcgaaccaggcgctggctgtgagtaaatgtaatgtgaaaacgcactttgtcgggaaagtaggaaacgaccagtttagccagatggcctatgagcatcttacctcgtcggcaattaacagctttatgctttatcaggacaaagacaagaaaaccggtacggcgcttatttatgtttgtcagggcgacggtgaaaatatgattgccattagcccaggagctaatcaatcgattaccgcagatgaggttgaagccattattccggagttaaaaaactcggatatctttttaacccagctggaaaacaatttacccgccacgttccgggccattgaacttgctcgtttctgcgatattaaggtggttttaaacccggcccccttctcttctgaggtggcaagctgtctgaaaaacgttgattttcttacgcctaatgaaacagaagcatctttgctatcgggtattgccgttactgatatggccagcgcgaaagcggcagcaaaagcgataaaagccaaaggcgtgggctgcgtcattatcacgatgggagccaaaggcgcgcttatttatgacggcgagcagtttattcatattcctgcgctaaaagcgttatgcgtggatacaacaggggcgggagatgcctttaacggtgcatttacggccagtatggccaaaggagagtctctcgttcaggccgcaaaatttgcctgcgcctttgcctccctggccgtcgaaaaagaaggagcgtcaaatatgccagagtacaaagatgtgctcactcgtctgacgcaatatgaaaacatcgccattcacattgagaaaaattaa

SEQ ID NO: 146671 - DNA, 1200 bp, Enterobacter cloacae
atgacagataacttatctttcagctcccgggttcttggcatgctctacggcgttgcatttggtgatgcgctgggtggcccggtcgagaaactgtccgctcgtcagattcaggaaaaatatggcaaagtcacctccatcaaccagcgctggcaccggatggacgagccgtcctcacgtcgcaataaccgcattcgcggtaatgggatcattaccgatgacacgttaatgacgctgtgtctgatggaagtgtacgacgagctgggccgccatattgatgcctgggacatggcgggaccgtttgtccggaaaatcgcctgggaaccccgctgggtgccggaactggacagagaagcgctggtcattgagcgcctgttttacccagaaaaatggatatttcatcgtctgcaacttgcggcctgcgatcctcgtcagggcggggttggtaatatggtcaactgcggtgccgccatgtacgccgcgcccatcggcgtaattaacgcctgtaaccccaccgccgcctatcaggaggctatcaactttacgctggggcaccagcagagctatgggctggaagcagccggcgtgttcgccgcctgcgtctcggcggcgttcatcccggggatcaccctggatgccatcattgatattgccctacagctggcaaaagacggcacgcgtaaggctatcaacgccacgctggatgtcgcctgctgctaccgcgggcaaccctgggattacctgcaggttgtcgatgcgctccacgaggcgcttctgccctggtctccaatgggtgatgacctgatgcacggaccggaaaaagccggggtgccgaccatggcgtaccagccttcacgtctgatgtcgatcgaagaactccccatggcgctggcgttctgcctgcttcgggaaggcgacttccgtggcgcggtagaagattccatcaactcggggcgcgacacagattctatcggggtcatgagcggagccattctcggtgccctacacggtaacaccattatcgagccggacgtgcttgccgggattgaacacgccaaccgcctcgatcttcgcgacgccgcgcgacgctttactgaaacagcgcagcgcattattcagcaggatctctgtgccgcagaggaataccgccagcacgtcaccccgtttttgcaaccggagcatcgcgccggtcgaggagagtaa

SEQ ID NO: 146672 - DNA, 303 bp, Enterobacter cloacae
atgaacatggttaaacataaacgtgacaatccggatacgcttacgactaagcgagacgatgagcttaaagcgctggccaacaaaacggatgatgaaatcgattatagcgatattcccgccacagacgacgcacagtggtcagatgccgtacgcggtaaattttaccgaccgctaaaaactcaggcttctgtccgtattgatgccgatattatggagtggcttaaacgtcccgggaaaggttatcaaacgcgactgaatgcgatcttaagagaagcgatgattcgcgatcttaacaagaaatag

SEQ ID NO: 146673 - DNA, 1221 bp, Enterobacter cloacae
atggtgcctaagggatggaagttaaccagccttggtgagatatgtaatggcaatctccaaacaggcccttttggaagccaattacatgcgcacgaatatgttcctgttgggattccagtgttgatgccaaaggatcttattggctgccgagcgaaacttgccgacgctgcaaaaataaatcaaaaaaaagcacaagagcttaagaagcatttcttgaagacaggagatttattatttagccgtagaggtgatgtagcccgatttgcattgattgatgaagagtctgagggttcaatttgcgggactggttgccttaaagctaggccaagtgataagcattcatcagcatttcttgcctattttcttcaaaaagacagtattaggaaatggcttgagcaaaatgctgttggtcaaacaatgcctaacatgaatacggaaattcttaacgagctgcctttaatggctgcatcatcgaagcaggaggaggatcgaatcgcccaaatcctgtcaacctgggataacgcgatttcagtaacggaaaagcttctcaccaacagtcagttgcagaaaaaagccctgatgcagcaattacttactgggaagaaacgcttgctgaatgagaatgggggcagatttattggggagtggtgtacgtgcactttgtctgaagtagcacatattattatgggatcatcacctaaatccgaagcctacaacgataatggcttaggtttgccattaatacagggtaatgccgatataaagtgccgagtttcatgtcccagagtttatacgtctgacattacgaaagaatgttctcctggagatattcttctaagtgtcagggcacctgtaggtactgttgcactttctcaacataaagcatgtatagggcgtggtatatcggctataaaatccaagagaaaaatgagtcaatcatttctttatcaatggtttctttggtttgaaccaaaatggtgttacctatcacaaggtagcacatttgaatcaattaatagtgatgatataaagacattaaaattatcagtgcccaattttgaagaacaacaaaaaatcgccacagtcctgtccgctgccgacgacgaaatcgccacgctggagaaaaaactcgcttgcctgaaagacgagaaaaaagccctgatgcagcaattactgaccggtaaacgtcgggtgaaaatcgatgaggctgttgctgcatga

SEQ ID NO: 146674 - DNA, 225 bp, Enterobacter cloacae
atgtatcgcatggaaaaaataaccactggtgctgcctatggcgcttcagccgggagcatcctaaacggcatgcttaatgcctacagccccgagcagtggaacgctatcggcgtgctggtgggtatcatcattgccgtactgacgtatctgacgaatctatatttcaagatccgcgaagacaaccgccgcagcaggagccgagatgaacccgacactcaggaataa

SEQ ID NO: 146675 - DNA, 495 bp, Enterobacter cloacae
atgaacccgacactcaggaataaactggtgggtgccattgttggcggatccggagcaatcaccattgctgcagtaatgctgggcaatgccgacgggctggaaggacggcgctattacgcctatcaggatgtggtcggcgtctggactgtttgcgatgggcacaccggagcggacatccgccgcggtcaccgctacaccgacaaagagtgcgacaacctgctgaaggccgatctgcgaaaggtggcaaatgctatcgacccgctgatcaaggttcgtatccctgagcctacccgtgcagcgctttactcctttacctacaacgttggctctggtgcttttgccagctcgacgctgctgaagaagcttaactccggtgatgttccgggtgcatgcaaagaactgcagcgctggacgtatgccggtggaaagcagtggaaggggcttattaccagacgcgagattgagcgtgaagtatgcgaatggagccaaaaatga

SEQ ID NO: 146676 - DNA, 798 bp, Enterobacter cloacae
atgtcaataagtcagttaatctcaaaatctacagttagaattgagtgtgatgtagttggaggtggcgtgtcggttggtacggggttttggtttggtttttcaactacagaagattcaggtctgccattactcgtaacaaacaaacatgtgattactaattccactacaattcgtattagattaaacgtttcatccactgcgaaccaacaattaaaattttatgacgtaacaattaataatcctaatgatttcatacagcaccccgacccaaatattgatctttgtgccttacctataggtccttttctaaacgagttaggttcgcaagggatcgaagttgataattttttcttcacagaccgtaattttcttaaccagcattacgttactccagttgaagaagtttttatgactggctatccaaatggcttatgggatacggtcaataacaggcctattaccagaaaggggatcactgcctcatcattgcttgaagattggcagggcaggcctgaattcatgattgatatggcctgttttgggggatccagcgggtcgcctgtgtacattatgaatgaaggcggcttttcaacctcagatggatgggcgatcggaaatagatttatctttttgggggtgttatatgccggcccaactcttgatgtaaatggaagtattaacatagtagatgttcctactgtagctacgccagtggttagcacaacgttaatgatgaatttaggtatggtgattaaggcagagcagttgaatggactcaggcagttgctaggtatttga

SEQ ID NO: 146677 - DNA, 483 bp, Enterobacter cloacae
atggcagatgtaaaatacccgccattcctgccgcttcctcagcgtgcaaacatgaacatgacacaggataccagcttcaggcaaagcaatcctgcagttggtcctgcggtgttcaccccgataaccactgacctgaaaacaacctggaatcttaactggattttcacccttgctgaagccgagcgtttcaagtcatggctacggtcgccaacatattgtaatcgtggccaggtatggttcgacattcctgttgatttgggagatacccagggagtgcaggtgcaggaggttcacttcatcaccatgccggtgcagaccagcaagaatggaaacactgtcacctggacggcggacatcatctgtaatttcatgaatgatattactgaagactacgacgactggattgttggagcccagccaggcgcgggttactggtatgacttaatcgttacggagatccttccagatgccaacactccgtga

SEQ ID NO: 146678 - DNA, 471 bp, Enterobacter cloacae
atgccaacactccgtgaatggaaagagcgcaggccggcgtcagaccttaagcaaactgttgtcttttcacattctgcattcggtactgacaggctggtaaataacctgttcgaacccgccacatttaacggtcaggtataccagccaacccggttcgatttctccgaacctgcacaggatggaacaaccacgctcaatgcaacgattactttcgcttcgctatctcaggacataaagcaacgattaaaattgtggcgcggcccagcccgcatggagccgatccttttccgctacgacatctgggaaaacataggcgacaccgtaccactgaagacttattcaatgtatgtacgtgatgtggcagccgccgctgaaaacgtttctgtcacggtggggatgacaaaccctcttaccgtggccacaagcattatctataccgtcgaactgtatcccggtctgagtaatatctga

SEQ ID NO: 146679 - DNA, 2508 bp, Enterobacter cloacae
atggcgacatttgaaatccagcgtctaccaggcgcgccaaaacaacgcggacgaattgagcctggtcagcgtatggttgactggctgaatggccagaagctgcataattcggtaatcgtgaagctcaatggcaaggagttaggtgacgattttgatatcggttaccgattcatggttgatgatcatctgtcagtatttgaccagcctcagaatatgggtggcattaaagacctgattaagctttctgcaccgtgggaagcactcaaccctattaagctgaccaagaaggctatggcagcgctgcagaagacacttgtaggagatatcaagaaaaccacatcagtcgcaactggcgagtctccaaacaacgatttaaccgggcaaacaaacgttgccagactatacaagggtcgccctaatatttacgggcaagtgcgctcttacccagacctgatccaggaatcacttttcgagtacatcaataacaagaaattcgtcactgaattcatggaagtagggtatggacgctatgacatctcgtctgtcagatattcagaatcgtcattcaccgcgatggcaggggccagttatcagatttaccaacctgggcagctgataggcacgattaacgagggatatgcgtttgatgatgtcgacgggcaagaacttcccgggctgaatgaggataccggcgccatcaaacagcaggccacgacaaacagtatcgtccagggcacgtatgccggtgggcagatttcagtaaaaatcgtcaaaaactccgcattcgattatttcttcgatgcagtgaagcctctgtcagtaacattcgtaatcaacgtcacctacgccactgcatcaggttcggttacgaaaaatattaccgttactggacaacttatcagtgccactctgaccaatgatggcgcggttataaaccctgttcagtggtatacgtttgtctttagcgatctgggtggaaatgacatcaccgagacgccagcaaacgccactattaacacgacatacttccagattacagaatatgaagggactatcgtcggcccgttcttctctgctgttgaatcaacttacctctggttccatctgtccgggaacatcggagggggtaaaaacaacccggttatcatcacctggtggaaagtcgatgacgacaacaacatcgtgccgggtacgcaggagacaatgcgggtaattatcagtaataccagcagcagtcaggattatgtctactacacgtttaaagtcgcgccagcagctggcaaggctcgttatgcattcacgttgaagcgtgacaataactcaaactccagttcagcactgtatgtcctggctgctcacgcgataaacgtcaggacgaatgtcgtctatcctgatgacactctggttaagctgaccgtgcaggaaactgagttcgcttcaggaagcaaagacaggaaatacaaccttcttgcccagcgccaggtcatctcatataaccgaactactggtgcagttgactacacgctgcggtcctcgcgttcatttgccgatgctgttctgcatgagtgggttgttgtcgccaaacaggacgtgaatcgcctggaccttccaacgctatatgccatcgctgacagcatttcagatccgcagctaagtttcttcgattacaccttctcagactcgaaacagtctctcggtgagcgtattcaggtcatctgtaacgctgctcgcgtagacatcaactggatcggcgacatgctgacgttctggcgtgacgagaaggtggacgttccggccgctgtttttgggcgcagcaacatgttctgggatgggttcaaaattggctattccatgagcctgccaaacggatatgacggcatcactctggattacgtcgatccacgcacgaataagaaggcatatatctacctgcaggttagtagctccggaattagcgaggtaactactcagaccgaaaatgcaatgacagttagtctgtcagggtgcaggaacgtcgcacaggcgcgtaatagagcgtggctggaagccaacaggctggttcagtcacgcatgagcatgacggtaaaggtttttgaaacgacacaggtcgtacgtggcgcggtggtgcagtgccctgatatgtacgacaacgcgcaacagacaggatatctgaccgggcgcaccggagatgttttctccacctctgaacggctggatttttccggcgatatgtgggtcgttatgactgacagtctcggcaacttccatgggcgctaccgggcttatgcagtcaatggcaaccaaaaagcattcaccgctgcagctgaagcattcgacctgaatatctacgatggcaggactgtacaaacaccatcgcggtatttcatgtccagcagtgaagaactcaactcaacgatctggcgcgtagagtcgtcgaaaccaaacggggatgatacgcagacgctttctctcgttgaatacaccgacgacatctacctgaacgactaa

SEQ ID NO: 146680 - DNA, 1014 bp, Enterobacter cloacae
atggacagactaactgcaaatgcaatatttggagttgaaatattcttcataataagcgggtttattatttcatattccacaagaaacataaaatcaccatcattgcgtaacacagcgtcattccttgttaaaagaatatttagaatatatcctgtttactttgtaatacttgctgtttatgtagccctgttttacaggaacatttacaccggcattccagagggtggtgctttatcaacagtaaatatcattaagtctttcttccttataccgctagactggaattccttacctccatattatggatggggagcaataattgtttcatggtctttagcttatgaaatgtatttttatattgtatttgcactatcaatgtcaattagtatcaaatatagggctttgattgcatctattgtactggtgagcgttagtgttttattgcctgtgatattcaatggtaattttaccatcgacgcacaaagatattatttcaatggtggttatttattatctcactttgggttcataggaaacccaattgtttttgatttcattcttgggatgataattgcacaagcacttccattaatcaataaagtcaaaataaacaacggaataattaacagcattgcaatagctttgctaggattttcttttgtgttttggctgaatggaatttcagaaggccatgggttaaccaaatctgcatatattgcttttacgatagtatcatgcgttataattcttgaaagaaattcagtttttgtttttaacaagatgttaatatcattaggtacaatatcttactcgctatatttgattcacgttccagtaataaaatacatagagctttacggtcagacaatagggcttaacactgatattagatcattacctctatatttatcatctttaacaatatctgtttgcttgtcgtatgtgatattcaacgtaatagaaaaacctttcatcaatgcaggggcaaggatagccaaaaagatttctggataa

SEQ ID NO: 146681 - DNA, 264 bp, Enterobacter cloacae
atgcgtgaccacgccaacaaggagaacatcgtcaagagcctcgccttctatggcctcgccatcatcagtgatcagtgcatcaccggccaagtatgcatgttgctggcgtccgcaaaaccagatgagcagcatttctccacgcttgaatcgggatgcgctctcaatgacatcatagccttcagacgtttcaacaatgctcgcagaaggaggaatgaatggctctgtggccgaaacaaagtcggcatgaatgcctgctgcagatga

SEQ ID NO: 146682 - DNA, 735 bp, Enterobacter cloacae
atggtcagtaatattctcaaagtaatgttaatggtgacattgacgtggttcccctgcgccaacgccactatacaaattttaacaactcgtgtggcattcaatgcaaacgagagtgaacaaaccgttcgcgtaaataacctcagtaaaaacccggagctggtgcaggtctggctttccagcaccgacaaaaccgatgggacggagaaggagaatcttccgttctttatcaaccctcccgctgcgcgcgttaacggtcagaaagggaaagttttccgtatattccagacagaggaagccgcaggaaaatacccgaaagatcgcgaaaccctgctctggctaaacgtgctggatattccacctgaactgccggaagaggcggatcggaatcagataaaaatggcgttccgcacgatgatcaaatttttctatcgccctgcgggcctgaaaggcaatcccatgcaggcgggcgacgatctgaagtgggaactgcgtaaagtggcaaagggctacgacgtggtgggaaccaataactcgcctttccacgtgagcatgacgagcgtgtggctaacgaatgccgacaataaagacattgagatccccggtgacatgattgtcccttatggaacgctggtttatcactttccgcaggtgagcgcagtgagtggacgcggcatatttaaatacaattatatcactgatttaggcgcatatattaagcgcacctataacttttaa

SEQ ID NO: 146683 - DNA, 1005 bp, Enterobacter cloacae
atgaaatttacaatcccccttatgctctctgcattgctgacctttcctctggtgagcacggctgatactcgttatccgataaccatcgaaaactgcggcattaaagaaaccttcacgcatgccccttcacgcgtggtgacaattggtcagcacgaaacagaactgatgcttgccctggggctggcagataagattgcgggtactaccgtctggtttggcgccttacccgacgatgtcagcgcgcagggtgccagacttaagcgactggcagagaatgctcctgggttcgaagccgtagtcgctcaacgtcctgagcttgttctcgcccagtacagctggcatgtcgggccgcaaggtgaggttgctacgcgtcagcaatttgaacagttaggcatcaagacctggatctcgccagccgactgtaccgataaggccgtcacagccacctccaatggcgacggcgcacgctctgcgccttactccattgatatcattcttgaagagattacggctctggctcgcatttttgacgtaccggcacgtggcgaagcgctgaaacagaaagtttccgggcgcattgccgccgcgcagcagcatgcgcaggcgccgcttaaggtggtttactggttttcaagctcccgcctgaaaggcgatccgtgggtagcgggcaataaaggcgcaccaggctggatcagtaaaacccttggtctgacaaatatcatcgattctggcgaggagtggcctgcggtgacgtgggaacatatcgttaaatctcagcctgatattatcgtcatcgcgagtatggacagacgactgcatcccgcagatgacgtggtgacaaaaaaacggttcctggaaaccgatcccgtcacgcgtgaaatggctgcggtcaggcaagggaatatcgtggtggttcctgccatgtcgctggatccctcactgcgtaacgtcgaagcggttgagctcatcggccagcatatgaaagagatgactcaagccagatga

SEQ ID NO: 146684 - DNA, 1029 bp, Enterobacter cloacae
atgatgcacaagaccgtttattactggcgaaccggcacgatcatctgcgctgggatcctgagtctgccgatcatgataacgctggctgctgcgactggtgatataccggtgagctatgccactgcgttttgggcaataaccaatggtctgggtatcacccacgtcgatttgcctgccgttgaagccggaattgtctggcaataccgtatgagtcgtgcgctgatggcggccagcagcggcggtggcctggcgttgtgcggtctggtcatgcagtcgctgttgcgtaattcgcttgcggacccttacctgctggggatctctgccggtgcctcaaccggtgccgtcagcgtaatgctgttggggattggcagcggtgtccttacgacaggcgccggagcgtttattggtgcctgtatggcgtttctgctgatcgtcgtcttatcaggcggtatgcgcgagaaggcagcacggattgtactggccggaatcgccggtacgcagctgtttaacgcgctcacgtcgtacattgtcagtacgtcggctaacgcggagcagtctcgtggggtcatgttctggctgctggggagtctgagcggtgtgcgctgggctgatgcactcctgtgcttcaccgtcgttgtggcagggttgctgataacgatctgctacgcccgttcactggatacctttaatttcggcatggacgtttccgcgacgcttggcacacgcgttcagcgggtacgcgtgattttactgctgaccaccgcgctgataacggcggtcatcgtcagtgctattggtgcggtgggctttgttgggctggtcatcccgcatattacccgcatgattgctgggcaccgccatttgctcactgtccctctcgccttcctcggcgggtgtcatttcatgatccttgcagacctgatttcgcgcatgctgattagccaccaggttttgccagttggtgtggtcaccgccctggttggtgcgcctgtttttgccctgattctgtaccgtaaccgggagaaataa

SEQ ID NO: 146685 - DNA, 756 bp, Enterobacter cloacae
atgcatgtcgtggtggataagctgagcgtgacgctccaggcgctccgggtgttgtctgacatcagttttatggcacaacggtcgcaaacggtagggctactcggccctaacgggtcgggaaaatcgacattgatccgtgccatggcgggcgtccagccctgcacttatgccggaatcacaatgggcggtaagcagacgaataccctgagccagcgtcagctttcccgcaagctggctttcgttccgcaacatgcggaagcggaggcggaaatgagcgttcttgatattgttcgccttgggcgcacaccgcatcgcagagcgtttacgccctggcatcaggctgatgaggatgcggtacagcaggcgctttcgatgatgaaacttaatgccctggcccaccgagcctggcagaggctctctggcggtgagcgtcagcgatgccagatagcgcgtgcgctcactcaacagccggatattctgctgctggacgagccgattaaccatctggacatccagttccagcttgagctgatgcgtcttgttaccgcgttgcctgttaccgtcatcgtggctttacacgatctcaatctggcggcgaattattgtcagcaccttgtcgttctgaatgaaggaagagttgtggcatccggtgaacctgccgccgtgcttacgccggagctgattcagtcaacctggcaggtggatgcctccatctatcgaaccgatcgcggcacgatgaacatccagtacgtctga

SEQ ID NO: 146686 - DNA, 201 bp, Enterobacter cloacae
atgtcagcaatcgcatttatcggcttaggacagatgggcgcgccaatggcgaagaatctgttgaaacaaggtcaccagcttaacgtctttgacgtaaacccgcaggcgattcaggcgctggttgaaagcggcgctcgggcggcggcggcgctcgggcggcggcaacgcccgcgcaggcagcaacggacgccgaattcgtga

SEQ ID NO: 146687 - DNA, 276 bp, Enterobacter cloacae
atgtctgactatccaaccattgcgctgattggtcccggtgcgattgggaccaccattgccgcggtgctgcatgacgcgggccgcacgccgctattgtgcggacgcaccgcgcatcctgagctgcgtttgcgttacgacgagggggaaacggtggtgcccggtccggtattcaccgatccgacggccatcacgcgccccgttgaccttgtgtttatcgcggtaaaaaacgacgcaaaatgccgacagcgccgggtggctgcgcgccctttgcgatga

SEQ ID NO: 146688 - DNA, 534 bp, Enterobacter cloacae
atgactgaaaaaaaagtgattcccaacgtgccgccttccggcgggctggcataccagcagaccgtagagcaggtgcttgctcacgcgcagagccaggccagcggtctggaccgtgcagaggcgcaggcgcgtctgcaaaaaacagggccgaacgcgctgccggagaaaaaagggaaatccgcctggctgcgtttcctggcccattttaatgatgtcctgatttatgtcctgctggccgccgccgtattaacggcagtaatgggccactgggttgatacgctggttattttgggcgtggcggtaatcaatgccttaattggtcatattcaggaaagcaacgcggaaaaatccctgaagagtattcgtaatatgctcgccagcgaggcgcgcgttattcgtaacggcaaccatgaaacaattcccacaactgaaatagtcccgggcgatattattgtattgcgtgcgggagatcgtattccggcggatatgcgtttaattgaagcgcataatttacgcgtggaagaggcgatttag

SEQ ID NO: 146689 - DNA, 369 bp, Enterobacter cloacae
atggacagtaaaacgttgcaggaacacgcaaaacgcgtggcgctggaactgccgttcaccgaacactgctggccgtttgggccggagtttgacgtgtttaaagtgggcgggaaaattttcatgattgtggccgtcgcgcacgggcggccgcacgttagcctgaagtcagacccggagaaatcgctgttaaatcagcagatttatctcggcgttgaaccgggctatcacctcaacaaaaagcactggatttccctttacggtacggacgacgtgacgccggaactggttaccgatctcatcaatgattcctggcatctggtggtggataaactgccgaaaaaagaccagaagtggatccggccggtctga

SEQ ID NO: 146690 - DNA, 258 bp, Enterobacter cloacae
atgagtgaattaacagaaatgccaagataccagtgccacaaaaaagtttgggctctgaaaatcaaagatgtgaaagtcgcttctgacggcaccgctgtaatcacaccatccgatcatggctttggtgagttcgatgttgaagcgtcttacgttgaaaagcattgccctcagcccggcggatactacgtgcaatatgaaggtggctatgaatcatacagcccagcagaagcgtttgaatctggatactcacgcatttag

SEQ ID NO: 146691 - DNA, 1812 bp, Enterobacter cloacae
atgagttattttgggcttaaccaggttaaccagaaccagcaactggacgacgccgcgtctaacccggttggatttaatagtgatgttgggttcttcgataatgctgcggtgtcggcggtatctggcctgtactctggtttggttgcaaagccggatcagttgctgtgggctggcctggatgcggtagtcactccgatcgctaacttcataaacgaaaacaccaacttcaatgactcatcggctgcctacatcgctgaacagagaaagctcgcgcaagagcaggttaagcgtcttacgcctgatgcggccaccaccggtacggcggggcaggttctgtacggtctttttgatatgggatctcaggctgttgtcggcacgcttgcaggagggccggtcggcggtgcggcggctgtcacctccctgcagggtttctctgagttcgagaagctgaggtctgagggtgtggatctttcgacagcacaggatgttgcgttgattcatggcgtcactgctggcgcaggtacgcttatccccatgagccttgggttgcgtgccggtggggcgctggctgagggtgtcggcgctcaaatagccaggactggggaaaatgcactgcttaataccggtgcgagagttgcgcgcgcagcgcctgatatcgcttatgccgccgggactaacctggcttttggcatggcattgcgaggcatgacagcatccactctgcgcgataatggttatgccgaaatggccgaccagtacaaagttttcgacagccaggctatggcgatcgatgccgtgcttggcgtggcattcggcggcctgggtcgcttcattaactcccgcggtgaaaacgtcagacctccagattttgtaccggttgaggttgacgctgcgctgactgctaattcagctcatcacgcagaaattgacgtggcaccgggaataccgatcaacgttctgtctcgcgatgctcacgcaatggcactgaaacaggccatgaggaatgtgagcgagggaaacccggttgatgtggccagcatcgttgaaccagcagcattcagcgaattacctgggcgcagaagcctgattgcacaatctctcgacgaggtgctctatcaggcagacgagggatcgacagccctggctctggaaaggataaccctagaagcagatgcggcacaggtattgccaagaggggatcgtcaggtctatcagtcggaaatagccaatagccagagaatcattgacgacctgaataccgaaagggcgaatatcctctcagaggaacccgctggcagcggtaaagaattgtctcgtaaaagggctgataagcagaccagactgcgtgaagtagataagaaaatttctgatgcacaggggcggctggagttctcgcgtaatgcccttgaaccgcatgaggctggcggacggtattttgaggcgcgcgccgaactggcaagacggcagcaggcagagacaaatcttaacgctcaggcactttcatattacagaaccgcagaagttcgaacctctgatgaggcggcaccattccagccggctgaggctgttcgtgatgtcactccgccgagagatcaggattcgcatgggcaggtaaatgatctggatattcaggcagcggagcaatcactgtcttcctcgcctgacatgctaatcacggtaattgatgatgagggaaaccctcagtcgagaagagcaagggaggtgcttgacgaagcatccagagaaaatgagcaggccatccaggactcaagcctgtttgatgttgccgtcagttgtttcttaaggggttaa

SEQ ID NO: 146692 - DNA, 2475 bp, Enterobacter cloacae
atgagacaggaatgtattcaggcagttcaggcagcggcaaagcgcacgctcaacgcggcggaaataaagaatattgaggatcgcatctatcgcaatatgcgccatctggcacgtaatgatccggcatcatggcgagttcttaccgatgctgagcgcctcaagcgggcgggacagcttgctgcggatgaatttaagtatgaggcggccctgaagaaaagacgtgtcgcgctaaccatcgcagctcgccagcgcctcgatacctttctgaattcatatcaaggaacggacgggaagctggaggcgctaaatcgcacgatcgctttccatgctgacggaaaatcgaatttcctgtctgtagagtcgagaggtaaggcgactcgcgactttgcgctgagccagattcaggaagcttttgaggctgttgatccgcgtttcttccacctgtttgaagatgaaaagggggttagggatctggtttatgaaatccgcgggcaggacaccgggaacgttaaagcgaagaagggtgcaaaagcctggttagatgttacagagcttttacgtcgccggtttaatgatgctggcggcgatgtcgggtatctggaaagctgggggatcccgcagcatcattccatggacaaagttggaagagtgtcgcgcgataaatgggtgagcgatacgatcggcaaactcgacaggaaatattacaccaaagaagatggtcaactgatgaccgacgccgagctgacttcattcctcggagaggcatacaacacgattgccactggcggcgttaataaacttggcgacagtggcatgcgcttatccggttcccgcgcaaatcgcggaaatgcttcgcgtcagatccactttaaagatgcggattcgtatctggagtatcagaaacagtatggcgaccgctcactgtgggaagtgatggtcggtcatctggagggcataagcaaagacatagccctggtggaaacctacggacccaatccggatcacgtatttcgctccatcctggacgaggttaccgccgaaactgcgacagcaaaccctgagcgaaccggcagagttaagcgcctggccaatagtacagagaacctttacaactttatttccgggaagacgcagccaatagctaacccggtgatcgctcgctggtctgacaatatcaggaactggatggttgccagtcgtcttggctcagcgctgctggcgtcgttttctgacctgggcaccatgtacctgtcggcgaaggtcacgaatctgccgatgaatcagcttttccgcaaccagctcgaagctatggatcctaccaaccgcaccgaactggcccgcgcgcgccgggccgggctggcaatggaatcccttctcggcagcgtaaatcgctgggcaatggataacatgggaccgtcgaaagcgcgctgggcagcgacggcagtaatgcgcgccagcggcctgacagcgtggtcagatgcgcacaagcgcgcctatggcgtcactatgatgggcagcctgggtgatatcgtcacccggacaccagatcttgccagcctcgatgatgccgatttccgcatcctcaaaagcaaaggcgttactgagcaggacttcagcgtctggaaactggcagaccaggaggactgggggaaaggcaacaacacgatgctgacgccggaaagcatcatgcgtatccctgacgacgcggtgaaacacctcggcgcgccggaacgtgttaagtttgatgcgatgcgccggttgctgggtgccattgctgaagaagtcgacatggcggtaatcacgccgggggcaagagagcaaatggtcacaggcggtgggttgcaacgcggcacctggaaaggcgaactggtgagaagcgtgttcctgttcaaatccttccctatctccgtcgtcatgcgtcactggtcgcgggctatggggatgccgtcggcaggcggcagggctgcttacattggtacgttcatcgcaagcacaacgattctgggtgcgctgtcgcagcagcttaatgacatggcatcaggacgcaacccgcgtgaaatgacgggggaggaagcgcctaagttctggctgggtgcgctgcttaagggcggcggccttggcctgtatggtgattttctgttatcggatcacactcgctatgggggcggtgctctggcgtccatgctcggccccgttgccgggctggtggatgatgttgtcaaactcggccagggtatcccgctaaacgccgtggaaggaaaaccggagcaaaccggtggtgacctggtaaaacttgggaaggggctgattcctggtgccaatctctggtatgcaaaagcggcgcttgaccatatgatcttcaaccagatgcaggaatacttctcgcctggctatttgcgcaaggtggagcagagatcgaaaaagcagtttaaccaaacatactggtggcggcctcaggatacgcttccgcaatag

SEQ ID NO: 146693 - DNA, 147 bp, Enterobacter cloacae
atgattccagtaattgttgtcattgcggctttatctggtctggttgcactaaacaggagcggcaggattggcaacgagtttttcgccgctgccgttgcgatcattctttttggtgtggctggttatctcggtgtatcgcaatattga

SEQ ID NO: 146694 - DNA, 1710 bp, Enterobacter cloacae
atgacggtatctaccgtagttgaccacaacgattacaccgggaacggcgttacgaaatccttcccatataccttccgcatattcaagaaaacagatctgacagtgtcggttatcgacctgagtgaaaacatcacgctgctggtgctggacactgattacagcgtgacgaacgctggtggttataacggtggcaatgttgtgctcacctctccactggcttctggatggaaaatctcacttgcacgcgagctggaagcaacgcaggaaacagacctgcgcaatcagggcaagttctttgctgaggtgcacgaggatgcattcgataaactcacgatgctgatccagcaggttgggacaatgtttagcctcgcgcttcgcaagccatccaccatcgctaactggtacgacgcgctgggaaattacattcgcaacctgcatgatccacgtgacccgcaggatgcggccactaaaaactatgttgacagtaaccttaacaaaacactgcgcgttcctgaatcgatacctcagttgccagacgccacaacgcgagcaaataaaatgcccgcattcgacagcgcaggtaatcccatcgttgtgattcctccgtcaggttctgcctctgacgtgatgatagagttggcgaagccaacaggcagtacgttaattggttacagatatcctgcaacaggaagcgtttcaagaactgtgcaagataagcttgatgatttcgtaaacgtacttgattttggtgctaagggtgatggagtctcagatgattccaatgcttttagcaaggctatagcaactggaaaaacggtatacattcctgatacttcaggaaatgaatctggatgcgtttataaagtatcaggagtagattgcacatcgcttaaaattattggagagtctcaaagagtagaaatacagccagttaccactgggacgagaatattaaacttaaaaggtacatccccagcatcgccagcaaaagggtgctttattagaaatatatccttctcttctcctggtacaccggagtttgatttcctcgatgccattcttctcgaaaacacaaatcagtgtgatgtatcaaatgttaccctatacagagtgcaactgacggtgattggacataattatctccggctagaaaagttaaacggtattggtgcgaaaatatcagtttcgcgacatagcggagacagtattgataatgctgttggtctcttactgaaagactcattccttgcatacaacagcgaggttgacataagaaatagcacagacacaaggattgttgatacgtatatagccaatagcaagcatggcagaacaggtcttaatcacgattatgatgcagagttcttgccaggcggtgatctattttttggtggcgtccttatgattactaacgtaatttgcgaatgcatatgtgtaattaaatacacagcactgtcaaagtttacaggcttttgggctggagcgtttaatggtaacgggctgacattgctatactcttatggtttgcttggaacaaattgtacgtttcactacagcactggcgctggtgtttatgcaagaaatctaactgattgcacgtttgtttcaagcagttttactaactcagagggcggagggtttgatcttgatgactcagtaagaacaacatttgtagcttgcaccttcagcaaatttgatctatatgaataa

SEQ ID NO: 146695 - DNA, 1152 bp, Enterobacter cloacae
ttggaacatttaaacagttcttttaccaaaaagcttgatggggttcagtgcctacgtgcattcgctgtgcttattgtaatagcatctcacttttcagttatattcactggaaaatttgggcctgaaagcttttttaatatagttacacagaactctccatttgcggttgatcttttctttttcataagtggatttatcatggtatttaccactaatggaaacatagcgaatagagctattagattttatgactttgcaataaagagagttttcaggatatttcctgtttactattcatgcttacttgtgtacttggttttcatagtaatgtatgacagatcttttcaaatggaaaatattccatggttggatgtatttaaaagttcattattaataccattaaactatactgatgcgccacccttttatggatatagcctaataatacctgcatggactataacatatgaggtgtatttctatttggtatttagcatctcgcttcttataacgtcgagatttagaacaattctgtgctcattaattcttgtgtcaatagcatttgcaatgcaaatttatacaacaggcaaagtatcatttgacgctcaaaatgtagggtatttaaatgtaaggattttgggaaacataagctttatatcaaacccaataatatatgattttataattggaatgattattggagagtttttcttatctgattataaaaacaaattatcgaatattattgatgctattgcgcctatacttttatgcttcggccttgcggcttttatttcaatgtttagatatgggtatgggattacaaatggagctatcggtgcattattcctgttgttcccgataatttattacgacatcagtagaggtataaagtatccaaaaccttttgtttttataggtaatatatcttattctctatatatatctcacattgttgttattagcgtaactgataggtattcaaacttgtttcaagtatacacacaaagctatggatggagaaggttttgtgtgatagtgacaatatcgatcacaattgctgtattgatgcataaattcattgaaatgcctactactagattagcaaaaagggtaatcttaaaaataaagaatagaaatttaacatcttaa

SEQ ID NO: 146696 - DNA, 180 bp, Enterobacter cloacae
atgacatcgattttaaataatcttgtaagatttgtagccttactgagcgccataggattaataaaagggcatagtgaaggcaatagcgtaatgatttttattgtggttgtcatgatagctatgtggctgcaaatggattacccaaacataaagaatttattaaaaaatgaaataaagtga

SEQ ID NO: 146697 - DNA, 276 bp, Enterobacter cloacae
atgaacgagaagcgcagcagaggatcgaccaggcgcgcaatgatgctcttaatgctgccgctcgcgctggccggttgcagcaacagctcgttgccatccgtgagcagctcaggcagtataacgccactgtcggcgctggggcgtcagcagcagacaccggagttttgcttgccgacgtgctcagcaaatctctcgagcgaaaccgacaactggcagagtacgctgaccgggccgccgaagccggacgagtctgtgaaaagcagtacgattcgttga

SEQ ID NO: 146698 - DNA, 198 bp, Enterobacter cloacae; identical to SEQ ID NO: 19856

SEQ ID NO: 146699 - DNA, 2442 bp, Enterobacter cloacae
gtgaaaaatgacaatgcagtggaacataacaaccagactgcttctgagcagacatcatccccggacgagagtcacgcattgcataaggtgagagatcccgtgtgcgggatggtcatcctgcctgacaaggcgcacagcagcattcgataccaggaccatcagctttatttctgctccgccagctgtgagagcaaatttaaagcccatcacgatcattattttaccgaagatgccagtgaacatcaccatcaccacgaccaccatgaagtcagccctgataagataaaacagtctcaccgccaggcggagaaagagatttctgaaggtgtgtggacatgtccgatgcatccggagatacgccgtagtggtcccggaagctgtcctgtctgtggaatggcactggagccgctcgtagctacggcatccacggggacgagtgatgaacttcgcgacatgacaagacgcttctggctggggttgttgctggcgtttccggttctgatactcgaaatgggttctcatctgtttcccgctttgaggaatacagtaccgccacagtacaacacatggctgcagttacttctggcctctcctgtcgttttgtggtgtggctggccattcttcgcccgggccggaatgtcgttacgtaaccgctccctgaatatgtttacccttgttgcaatggggaccggcgtagcctgggtttacagcgtcattgcaaccgtcttcccctcctggtttcctgcatcgttcagaaacatggatggcctggtggccgtttattttgaagccgcggcagtaattacggtgcttgtactgctgggacaggttcttgagctgcgggcacgggaacaaacctcaggtgccattactgcgcttctgaaccttgcccccaaaaccgccaggcggctggaccatgacggtcatgaaacggatattaatgcggaagatgtcctgcctggcgataagctccgcatcagacctggggagagtattccggtcgacggtatcgtggtcgaaggcacaacaaccgttgatgaatcgatggtgaccggggagtctatgccggttaccaaaacggagggtgcccctgtcattggggggacgattaatcagacaggtagtcttatcatccgtgcagagaaagtcggagatgaaacgatgctctcacgaattgttcagatggtcgctgatgcacagcgttcgcgagcccccatccagagaatggctgacagcgtttcaggctggtttgttcctctggtgatacttatcgcgattgttgctttcgtgatctggtctgtctgggggcccgagcccaggatggcgcacggtctgattgcggctgtgtcggtcctgattattgcctgtccctgcgcgctggggctggccacgccgatgtcgataatggtgggggtgggcaaaggagcccaggccggggtgttaatcaaaaatgccgaagcccttgagcgtcttgaaaaagtggacacgctggttgtcgacaaaacaggcacgctcacggaaggttcgcctacggtgacaggaattatcagtctcagtccgggtggggaagcctctcttttgcgtgtaacggccgcagtggaaaaaggctcgcagcatccgctgggtatggcagtcgtcagagcagcacaggaaaaggggatcgcaatacccgcagtcactcatttcgatgcgccgtcgggtaaaggtgtcacaggcgatgtcgaaggtcaacggattgttattggtaatgaactggttatgcaggaaaacagtatcgttattgataatcaaaaggccgttgcggatacgttgcggatggaaggcgctaccgttatctatgtggccacggacggggaccttgcaggcctgatagctatctcggatcccgtgaaagcaaccacgccggatgcacttaaagcgttgcgtcaggcggggatccgcatcgttatgctcaccggggataaccagcttaccgctgaagcagtcgcacggaaactgggaatagatgaggttgaagccgggattctgccggatggcaaaaaagcagtgataacccgactgaaagcgtctggccatgtggttgcgatggccggagacggtgtgaatgatgccccggcgctggcagcggctgacgtgggaatagccatgggaacgggtacagatgtggcaattgaaagtgccggagtcacccttctcaaaggcgacctgatgatactgaacagggcccgtcatctgtcagagatcaccatgaaaaatatccgacagaatctgttttttgcatttatctacaacgcacttggtgtgccggtggctgcaggcctgctttatcctgtgtatggaatactgctgtcgccagttattgcggcggcggccatggctctttcttccgtcagcgtcattgtgaatgcgttgcgtctgaaaagtgtcaggctcgggaaataa

SEQ ID NO: 146700 - DNA, 2139 bp, Enterobacter cloacae
atggatgttgaaatcaactactgcaataacatagataacgcttgcattacactttctgaaaataaatttaacattaagttcgctccaaatggcacgggtaaaagcaccatatcacgtgccattttgcacagtgtttctcgtgatgccgctggtcttaacagtctgctaccttttaagtttcgagcagcgaatcccgacgaatttcagcccagtgtaacgggtacagagcaaattcaggatgtaatgtgctttgatgaaaagtacgtatctcagttcacatttcagcctgatgaactgattagtaacagctttgacatctttatcaaaacagaagcctacaaccaaacggagcgagagatcgactcgatggtaatggcaatccggcaggaattcagtggtaatgatgagcttgagctatttattacacatcttcaggagcttagtggtgcgttcaagctgacaagcaagggcttatctaaagcctctacggggatgaaggggttggcagggggtaacaagcttcagcatattccctccgggctagagccttatcagccatttattcagagtcctcgtaatgtagagtggatcgagtggcagaccaaagggtatgaaaatttctgctcactctctgagggatgctgtcctttctgcacaggtgattctcacgaaaaagcagaacaaattagcaaagtaagtgctgaatatgacaaagcagtgatcaaaaatctggttggtatcatcacagtacttgataaattaggcgagtatttttccgaagccgcacgctcccgtctgagggaaataacgacgttacagggagggttggagaagaagcatgaagactatcttgttaccgtaaagcagcagacagaaaatcttctggccatgctcttaacattaaaaaccctgaatagttttacttttaacgacgccggaaatattcgtgcctctttagcctcttttcgtttggatgtgaagtatttttccgagctgcaatctgataaaactcttgcaacaattgggcgactgaacgcctcgttagatagcctcatttcccaggctggtttgctgcaggggcaaatcaacaagcaacgtgctggcatgcagcgactcattcagaaacacaagaaggatatcaacacttttctggcatatgcgggttaccgctatcaggtagatatatctggcgatggagaacagtgccgtcttaagcttcgccatgtcgactataccgactatctcagtggaggtagccaacatttgagctacggcgagcgtaatgccttttcgatcgttctttttatgtacgaatgtctggctcgtaagcccaacctgattattctcgatgatcctatctcttcgtttgataaaaacaaaaaatttgccatcctagaaatgttgttccgccgtgactcatctgagtgtttgaaaaaccagacggtactgatgcttacacatgacgttgagccaatcatcgatactctgaagtcggtgaagaagttgtttagtaaccaggttactgcatcctatttacgttatagcactggcacgataactgaattacctatccgcgaaagcgatattctgacgtttgcccaaatctgcaaagtggttctcgaatccgactgtgatgacctgatcaagctcatttatcttcgcaggcattatgaaatcatggacaatcgaggtgatgtttatcaggtactttctaacttgtttcaccgccgagaggaaccaatcgacacacgcctacctctgattgaaggaacagggtacccgatgatggacccggagagcttccttaatggatgcagtttaatcactaaaaatatttttggttttgattacccccatatgctcagcttgctgaatgatcctgataaaattctgtcgttatatcgaagctgcacgaatggctatgaaaaacttcaggtgttccgactactggaacctgaggccgataaccgtgtcattcgcaagtttgtgaatgaaacctatcatattgaaaacgagtttatctgccaactagaccccacacgattcgatcttatcccggaatacgttattgttgaatgtgacaggctgctccttaatatcgaggcgtcgaacgatgatgctgaactggaaacggcctga

SEQ ID NO: 146701 - DNA, 618 bp, Enterobacter cloacae
atgtcagaccaaagcaaattttatgattactacatggttgaaggcgatgaagtgaagtcgcttattgcaggttatgacgatatcagagagcagcgtaactctattatccctgaagcggccggcaaggtcggcgctattgcgtggacaacgtccagtggatggggtggcggaggcggtttgctaaatggttttgtatgggagaagggatatcaattcccctgccctatgaccattaagcgtgaagagatgtttgatggtaagcgagtggtgctggggagagggaaagggaatacaaaagagggccgggcttacaacaaagagctcgactcggtaatggaggaagccaacaaaaagctgaaatctctgcctgagtggaaagactacatcgttaaccactacggcattatgcgaaccggcatcggcggccagtctggacgtggcttcggtttcgcgatgctctctacatatggcggtaagcacccgggccgtgatgactgcctggtattcgctatcccgaacaataaagaagagcggcatggcgaagtagagataccgggaaacttccagaaaataacctacgggcagttttacgacatcgctaaccagccgaatgactga

SEQ ID NO: 146702 - DNA, 240 bp, Enterobacter cloacae
atgttcaagctaattcagcgcggccagatattcgctgaccagcataactggcccgtcattatccacagcagcacatcagaagttgtccgctactggcgacagggccggatcaacaccgcgtcaatcgacagatttattaacgatttcgaaccgctcgatcaccgggaggcggagcagatccgcgccgaactggagacgagcgagcacattaaacgcctgcgcgctatgcgtgcggcatga

SEQ ID NO: 146703 - DNA, 618 bp, Enterobacter cloacae
atgaaagctgaagataacgttgttgataattggataaaacaatctgtcaggagggagatcctttaccgactagttgtatggtgtttgataactgtaatagctttatttataagctcaaacgccccaaccttcgcactcgacaaatatgtcacccccgttattcataaattaattgaacaattagatttcatttgggcttttttatatttctttataaccatctcatttttctttaaagatatggcatacatgagaaaagaaagttggggcaatcacaacatccgacacaatttcggcatgctattaagaaaattcacgtgtgaagcgttgttatggtctgctggaatctcatcctctcttgtgacaatcataacaataagcttccccataattttattaaaagacgataactcaaccactcaaaattattttctaagtatatttataatattttccacattcacatttagcgctatgattctttccctttactatttcttgagagcagatcgccctgctatataccaaataacaaattcgcgcctactgactcaaatgatttatctatttctatttttaggatgcggagtcatgtatttttggattgaagtaaaatga

SEQ ID NO: 146704 - DNA, 216 bp, Enterobacter cloacae
atgatgaattgtccgatgtgcggccaggccgcgcatacacgcagtagctttcaggtttccagcgaaaccaaagaacgatacaaccagtgcaccaatattgagtgcggtcatacgttcgtgacgcatgaaacttttgtgcggtccgtgtgccgtccgcaaaaaatcagcgctgcaccgccacatccgaaaggaatgcaggaacaattagcttactga

SEQ ID NO: 146705 - DNA, 981 bp, Enterobacter cloacae
gtgcgtaagcaattcgccaccaaaggcgaagcattagcttttgaacgtcacacgatggaagagacggaggctaagccctggctgggtgaatcggtagaccgtcggactttgaaagacgttgttgaactctggttcaaactgcacggcaaatctctgaccgctggtgaacatgtttacgacaagctggtcctgatggtcgatgcactcggaaatcctcttgctactaatcttagctcgaaattgttcgcgcattaccgtgacaaacgcctgacgggtgaaatctatttcagtgagaagtggaagaaaggtgccagcccggtaacaatcaacctcgaacaaagctatctgagtggcgtttttagcgagctggcccgactcggagaatggacagcaccgaacccgctggagaacatgcgtaagttcactattgccgaaaaagaaatggcctggctaacgcatgagcaaataactgaactactctatgactgcaatcgccaaagctcccttctcgctttggttgtcaaaatttgcctgagcactggtgcacgctggcgcgaagctgtgaacctgacccgctctcaggtcaccaaacaccggatcacattcgtcaggaccaaaggcaagaagaaccgcagtattccgatcagcaaagagctgtatgaggaaatcattgccctggacggcttcaagttctttacggattgctacttccagtttttgtctgtgatggacaaaacctccatcgtgcttcctcgcggccagcttacccacgttctgcgccatacgttcgcagcacacttcatgatgtctggcggcaacatccttgccctgcagaaaatcctcggtcatcacgacataaaaatgaccatgcgctatgctcacctggcccctgatcaccttgaaacagccctgcgcttcaacccgttggccaccctgccaagtggcgacaaagtggcggcggcggttggcattgccccctaa

SEQ ID NO: 146706 - DNA, 501 bp, Enterobacter cloacae
atggctattaaaattcagtgctacaccgagtccgacaatgcggctttcttcggtgacgattccgaccaccagcaccagctaccagcaccgacatatgacgaacctaaggcccgcacaggtaagcctcctgtggtcatcgacaaccgggctgtccgtgcgtggctgattgagactgggtgtctctcctatacgcagcttgttgaggcgtacccgtgggctgacgatgtgttcacaggactctcacgggctaccagtggctctatcggtgctggactcccggtatccaaggcgtacctgttcgcggccttatacggcacaaacgacatcttctcccgcaacactgccaagtcatacaccgccatcacgggtcgctcaccttcgcctcgctacctgcgccacgttaatagcgtcttgcaggctacggctgtgagtcttgctaaggttctgaaggaccgaggggatttcacatggtgggactacaacgataagtgcctgtcctga

SEQ ID NO: 146707 - DNA, 498 bp, Enterobacter cloacae
atgacttctgacaataagcaggaatacaccattcatatcttcggtcaggacatcaccagtcaggacggattgtttcgactcgatgaaattcgccgggtcggcattcagattggcaaagtagaagacaccgagtcgacacagtacaagcgttttgctcagaccaaagttggaaagctactgaggaataggcagaaaatccgccttatccgaatgggtgaactcgggtctaccgtccttgctgaccccgccgctactgtagagtttggtcgctggctggactttgagtacggactggcagtctctgaagccttcgtgtctatgacctccagcgccaccgtgcagtctgctgtagcgtctgctgaggacatcaagccggagaccaaggaattcatccagcgtcatggcacaggcctctacatcgccggacgtgaagtctcacaggctgagtattcagactatcaagctgtgaccgctggtcgctgtgagtggggtaagtaa

SEQ ID NO: 146708 - DNA, 519 bp, Enterobacter cloacae
atggccgacattgaaattcgacaggcaccgccgacggcgttttatataaaagtgcacgacgccgataacgtggcgattatcgtcaacgacaatggcttaaaagcaggaacccgcttcccggacgggctggaactgactgagcatgttccgcagggacataaagtcgccctggtggatatccctgctgaaagcgaaattgtgcgttacggtgaagtcatcggctatgccgttcgttcgataccgcagggaagctgggtggaggagtcgctggtggcgctgccagaagcgccgccgctgaacacgcttccgctggcaacccgcgtgccggaaccgcttcccccgctggaaggctatacctttgaagggtatcgcaatgcggacggcagcgtcggcaccaaaaatctgctcggcattaccaccagcgtgcactgcgtggcgggcgtcgtggattacgtggtgaaaatcatcgaacgcgatctgctgccaaaataccgaacgtcgacggcgtggtgggcctga

SEQ ID NO: 146709 - DNA, 870 bp, Enterobacter cloacae
atgttagcgctttcttttatttactcagtgatttatcagtttggcgataacttcgcttatctggtgctggcagcattggggctggcggttatcttcggcatgatgggggtgataaatctggcacacggtgaattcattatgtgcggtgcctatgtcaccatactgatgaacaaatcgggtttgccgcttccgttcgccatgctgtgcggtacattagccgcggcattcttcggcggagtcatcgagcgtctcatcgtgcgccatctttatgggcgtctgtatgactcggtagtcgcaacctgggctattagcctgattgtgcaacaaagcatgttactcatcgccggtccatcactggaagggctctcaacacctttcggctctttcactctcggcgaatattcttttgcgacttaccgtgcactgctgcctttcttcgccatcgctatattaatgatgctctattggctgtttttccacaccaactacggagtctgtgccagagcgactattcaaaatgcccgtatggcctcctgcctggggttagaaactgaccgtatttataccttaactttcgcgctgggtgctggattggccgggctggccggggctatttatgccccgacgttgactgccgtccctaccatggggagcagctttattatccaggcctttgtttcggtcgtcgtgggcggcgcaaatgtcttggttggcactattcctgccgcaattgccctgggcgcaatacagaccgggttaaattcctggtatgggcaacttgctggccaaattggcttactggtcaccgccgtactggttattcgcgtactaccgaatggtgttggcagcctgtttacccgtaaccgctag

SEQ ID NO: 146710 - DNA, 1062 bp, Enterobacter cloacae
gtgacaacaacctctcttaatttatcggcgaatggtatgaagaaacacagacaatcctcgagctggctggcgacattgttaattttagctggtgctctcatgctaccgttagtggtcgatagcaccacgatcggtgacttttcctactttcttctctggaccttcggcgccatcggattagctgcgatgtggggacatggcggtattttatctttcggccaaacggcgttctttggtctggcgggttacgcctatggtgtgatgacattaaacttcggcgctggcgtgctctctacctggttcggtttaattgtcgcattgctgcttgccgctgcagcggctgcggcactgggttacctgatgttttacggcggggtaaccggtatttttgttggtatcgtaaccctgtcctgcactctggtcctggaaacctttatgtcacaaactgcaggtccacaatgggctatcggcagtgcgcgtttgaatggtttcaacggtatgtcagggatgccccccttgtccataccatgggttaacggtgacttgccactggaagacaacggcttttattacctgattatcttgctgctcgcgggtgtttattggggggtgaggacgttgttacgctccaattttggcctgacgttggcctcaattcgtgaaaatcctcatcgggcagagatgctcggcattgatatccgccgttatcaattactggtgtttgtgctgggaggtgtactttctggcctgtccggagcactttataccctgtggggatcatatattaccccgtcatcaatgggtttatccgccgctgcaatgccggtcatctgggttgccaccgctgggcggaaaaacatttttggcacggtgatcattacggccatcctggtgtggctatcccaatggttagctgtttatggcagcgaatatgccttgattctactgggcgccatcttgctgttagtggtattagcggcgcccaacggacttttatcctggctggctgagagcatcacccgcttgctctcctcacgccggaaaaaggaggactcgctatga

SEQ ID NO: 146711 - DNA, 735 bp, Enterobacter cloacae
atgaatcaggtctcgcaggaaccgatcctcaaaacacggggattaagcaaacacttcggtggtgctcaagttatcaatcaagttgatttacaaatacgtcgtggcgaagtgcgatgtgttattggcccaaatggtgccggtaaaagtacctttttcaaattactcactggcgagcatgtacccagtaatggagatatccactttttcaatcagcggataaataccttagcgccttttcagcgtattcaaatgggaatgagcattaagtttcaaattcccgggatctttcctgaactgacagttgcgcaacatttgcaattatctctcagccatttacgcccggaagttcgctcacaggcagtcagtgtggatgagttattagagcgttttaagcttaccgctgaatgtcgtcaactcgcggctaatctatcccacggcaaaaaacagtggctagaaattgctatggcggtgtcgctgcaacccacgttactcatgctcgatgagccagtcgcaggcttgtcaattgatgaaacctacctgactggcgagttaattaagcaaatgcaaaatgacggtctgacattactggtggtggagcatgatatgacatttgtccggcaaattgcttcacaggtcacggtccttcatggagggaaagtttttgcagacggcaatgccggcgaagtgctggctcgcgaggatgtagcagacatctatttggggaaaaccgtatga

SEQ ID NO: 146712 - DNA, 720 bp, Enterobacter cloacae
atgactaacgttgttttacaaatgcaggagctggccggtggctatggcggtgggcaagttctcaatggcgtaacactgcagctacatgcagccgaggtattgggtttgattggccgcaatggcgtaggcaaaaccacattgatgcgcacattaattggcgttgttccggtaaagcaaggccaaattttattgggcgaaattgatattactcaggcctcaccgcagcgccgcgctcgtttaggcattggctacgtcccgcaagggcgtgaagtttttaccgggctgaccgtgtcggagaatctgcaagtcggaatgcaatttgtccgtgaacatcgcgaatttgcaaaagagatgctggatcgggtactggattacttccccatattgcggcaaaggctcaagcaaaaagccggaactatgagtggcggtgagcaacagcaattggcgattgccagagccctggtgggctcaccaaaggtcctgctgctggatgaaccgtccgaaggtgtccaaccttctatcgtcaatatcattgccgataccctggtacgcatcgcccgggaactccatgtggccgtgatcctggtcgagcaggatattgcgatgatccagcgggccgcacagcgctgtgcggtaatggataaaggcctggttgtagaaacgctgacccaacaacagctctctgatgatcttttaatgcgtcgtcatctggctctgtaa

SEQ ID NO: 146713 - DNA, 987 bp, Enterobacter cloacae
atgaaatggttggaagaatccattatggccaaacgcggtgttggtgccgggcgtaaaccggtaacgcatcacctgacggaagaaatgcaaaaagagtttcattacaccattggcccttattccacacccgtcctgaccatcgaacccggtgaccggattattgtcgacactcgagatgcttttgaaggtgctatcaattcggaacaggatattccgagccagttgctaaaaatgccctttctcaacccacaaaacggaccgatcatggtcaatggcgcggagaaaggtgatgtgctcgctgtctatatcgaatccatgttgccccgcggcgttgatccctacggcatctgcgccatgattccgcattttggcggactgaccgggaccgacctgacggccatgctcaatgatccgctgccagaaaaggtgcgcatgattaaactcgacagtgaaaaggtctactggagcaaacgccatacgcttccctataaaccccatattggcaccttgagcgtatcgccagaaattgactcaatcaattcactgacgccagacaatcacggcgggaatatggatgtgccggatataggaccagggagtattacctatctgccggtacgtgcgcctggaggccgcctgtttattggtgatgcccatgcttgtcagggtgatggtgagatttgcgggaccgcagtagagtttgcctcaatcaccaccatcaaagtcgatttgatcaagaactggcagctttcctggccacgaatggagaatgccgaaaatattatgagtattggcagtgcacgtccgctggaggatgcgacgcgaattgcatatcgcgacttaatttactggctggtagaagactttggcttcgaacaatgggatgcctacatgcttctgagtcaatgcggcaaagtgcggctgggcaacatggtcgaccccaaatacaccgttggcgcgatgctgaacaaaaacctgttagtttag

SEQ ID NO: 146714 - DNA, 1173 bp, Enterobacter cloacae
atggggccagatacacccatcaatattggtttactttactccttcagcggagtgacggcggcacaagagttgtcacaatggcgcggagcaacccaggctattgccgaaattaatcaaaatggcggcatcaacggcagaccactcaatgcaattcatttggatccgcaatctgacgatgtactgtttcgtgccatggccgaggaattaattaccgaacatgaagtaaatgtgatttttggcggctatacctccagcagccgaaaagcgatgtcaccgattgttgaaaaatatcgtcggttgctgttttattcgcaactgtatgagggctttgagttttcagaaaatattttctatggcggtgccgcgcctaatcagaattgtgtacagctggctgactacctcgcggctcagtttgggacacgggtttatttgattggttcccgttatatttatccctacgaatgtaaccgcaacatgcaggaattaattctgcaacggcatgacggagcagtgattggtgagcgttatcttgatttgaatgcgccctatgaagcttttctacctattattgatgaggtcatgaaaaagcagccagattttattttcagcactgttgtcgggcagaccgttcctttcctgtatcaggcttataaggctgcaggtttagatcctgcgcgtatgcctattggtagcttaaatacctcagaaactgagattgccattatgggcgcggaggccgcaaaggggcattttacttccgccccctattttcaaagtattaacaccaaggcaaatcaatccgcactcaaacaattccgtaagcaattcggaccggaaatgagtacggacatgaattgggaggccacgtacagccaggtacacctttttgcaaaagccatggccgagtgtggcagtgatcatatctacccgttatcaaccgcgctgaggggtagccagtttgatgctccccaggggcgtattcgtattgatcagcttaatcagcataccgggctatatccgcgcattggtatggcaaatgaaaatgggcaatttacaattgtccaggagtctcgccgtattgtcgatcccgatccctatatgaccaatcagattcagggcgattgggtaacgaagctaacaactgtggggtatccatatgcgccctcacgatag

SEQ ID NO: 146715 - DNA, 207 bp, Enterobacter cloacae
atgctcggtatccgtcaggttagtgaagctaaagccatcctgatgagaatgcacagcattggcgaagaacaggcttatgagattctgcgccatcaggctatggacaaacgtattactgtcgaagagatctcatgttcgttaatacaggccaatgacattttctcctggactacgcccggggcgccagcatccggaaaaatgaagtaa

SEQ ID NO: 146716 - DNA, 1734 bp, Enterobacter cloacae
atgccgatagccccttatcttgcagccgcaattcaattcgaacccttaatgtttgccaaagaagccaatttacgtcaattacttatattggttgaacaggcggcacagaaaggtgcacgcttgattacaaccccggaaatggcaacaacgggatactgttggtttgaccggcaggagattgcgccgatggtagaaaccgtccctggcgagagtacagcactttttgctgagttagcgcaacattatcaatgctatatcgttttgggaatgcctgaaatcgaccccaatacatcgctgtattacaacagcgccgtattaattgggcctgagggtgttatcggttgccatcgtaaaacccacccctatatttcagaacccaaatgggctgcggcgggcgattctggacatcaagtcttcgatactccgctaggacgcattggtatgctggtttgcatggatattcacttcccggaaacagcccgcttgctggccctggacggcgttgacgtcatttgtcacatcagcaactggttggcagaacgcacccccgcgccctactggattagccgggcaatggaaaacggttgttatctgctggagagtaaccgctggggactagaacgcggagttcagtttagcggcggtagttgtattattgagcctgatggcaacattgccgcagtggtcgataacggtaatgggatagcgtatgccgaaatagatatcaactgtagccgccagcgccaggtattaggggagccggttttttatcaacgccgtcctgattattatcacttactattaagcgacagttttttatggaacccgcaggatttctttgggctgtatggacatcagccactccccccaggcaagcagagccgtatcaccgtggcgcagttatctcccggtgagcaagttgaagataatctggcggcgataatcgccatgacaaaagaagctgttttggagcaaggtagcgagctgatcgtcttccctgaattagccttgacaggtcattacgataatgcggctcatgctcaaacgttagaaagcccggcagtgcagacgctggctcgcctggctatacagctaagagtctaccttgtggtcggaatggcagaaaagcaacatgataaaaactacattgcacagatgctgtttgggccagaagggataatcggcagttacaggcaaatccatctttcgcaggaaagccaaaaatgggccagcgcgggagaacactggcgagtgtttgataccgcgcttggcagaattggattgttgtcaggtcacgatgccctgtttcccgaatcagcacgaattctcgctttaatgggatgcgatattattgcgtgttctgctgcgctttcggcaggatttaccgccgcccacgcgggcagctctgtgacacagaatttccctatcccaacaggggccgatccgctgcattggcacttattcagaacccgtgcgggagaaaacaatctttatctggtttttgctaatgcacttgatggtatagatggggcaggaggatttagcggaattttcgggccagaaaccttcacttttccacggcaagaacggctgctttggcaggaaacgctggtcacaacacaaatcgtcgacacacgctctcttgctgacagcccttatccaaccaatgtggtacggcgtaaagatctggttgccatgcgccaaccctatcactataaaccgctgctgtattaa

SEQ ID NO: 146717 - DNA, 4041 bp, Enterobacter cloacae
atgatgataaaaaccgcccgccgtttgacgacgctgtgcctgtccagcgcgctcactttcggtataccagggctggcccatgccgccgcgaatgatgccgcgctcaaagccttatttgaccaggcgaattactggcatgagaaatcccacgatgacctggcgatggagtcgctgcgtaaagtgttgatggtggatgccaataacacccaggcgatgtacctgatggcgttatgggcgcagcaaaatggcgatctgcaagtctcgtcccagtggcgttcgcggctggcgcaggtttctcctgacgatccggggttgcaggcgctggataatgccaaacaactgacgcaggttccgcaggggcaattgagccttgcccgccagcaggcgcgcagcggtaacgtaccggcggcgctggcgacctggcgcagcatgtttaacggcgatacgccgccacccagcctcgcccctgagtactaccagacgatggcgggagataaaactctttatccgcaggccgtgtcgcaactgaaaaatttcgtgatgcataacccgcaggatacctcggcgcgcattgcactcggcaaaatcctgacctggcgtgaagagacacgccgcgacggcattttgttgctcgaaccgatggccagcggcagtaaagaggccgatgacgggttgcgtcaggcgctgttatggctggggccgcaggcaggcgatgagcgcttctacgacacctggctacagcggcatccgcaggatactgatgtccaaaactattaccgtaaaaatgtcggcggcgcggcgaaaggcgcgggctataccgcgctgaacagcggtgataacagtgcggcaaaaaacaaatttgagcaggtgctgcaaaccaaccctaacgatgctgacgcccttgccgggatgggctacatcgcccagcgtagcggtgattacaaagcggcggcacagtatctgaatcgggcagccagtcagggcggggatgcttctgatgagcgtaaaaatcaggccgcagacgcggcgttttacggtcagctcgcccaggctcagcaggcattgaaagagggtaatattagccaggcgctggcgctttcggccccgctggcacaagagagcggggagcgtggcacggcaggaaaactgttccgtgcttctgtactgcggcagaacaaagacttttcgcaggccgaacagaccctgcgaggtcttctcaacgagcagccgcagaacgccccggcaagggaaaacctctattacgtcctgcgcgaccagaataaaacggaagaagcgcaggcgatgctgcgcactttacccgccagcctgcaggaaaaactgcagccgcgtgtggtcgcgggggcgcctggcgatccgattcgccgtcaggcacagcaactggtccaggccggtaatactgaccaggcgatttcggtactgcgccagggcgttgcccgcgtgccggatgatccgtggttgcgtcttgaccttgcccgcctgctgcaaaaatccgggcaggaaggtgaagcggccacggtgatgatcccggcgggtcgcgatggtgctaacagcaattcactgtacgccgctgcgctctatgccagcgaaagcggggcctggcagcaggccaactctctgctggcgcgtattccgccgtccagccgtaatagccagatgcgcgatctggcggaaagtgtgaattacaacctgcaaatggcgacggcagaacgttacctttcacaagggaacatgaccgcggcgtccaatacgctgaaagcgctggccagtcagccgccgaaaagcccggtcgatgcagggaaactggcgcggatgcttgcccgttcgggtgacatcaccaccgccgtatcgctggtgcgcaacagtattaaagatggcgtagaaggcaacgccggggattatgccgatcagatagcggtactgaaccaggcggggcttactcaggaagcgcaaaccctgatgtcgaacccggagctacaggcgcgcagtacgcctgctcagcttgcggggatccgcaatggctacgtgattaatgaagccgacaaactgcgtgaagagggcaactacgccgcggcgtatgacaagctgatccgtgcgctgcaaagcgacccgcaaaacaccgatttgatgttcgccatgggccgtctgtaccagacaggcaaaatgaacaaagaagcgggcgtgctctatgactacctgatgacccgtgataccgaggatcaggcggcacgtgtgggggctatcgacgttgcgctgtccgagaataacgtgcagaaagctactacccttgccagcggtctgcgtagcgacagctcaccggaacgcatgctgttgctggcgcgtctggaagaggcaaaaggcaaccaccagcaggcgatgacctacttacgtagcgcacgcggcaagctggtggggctggagtcgtctaatagcgccgctacgccgacgattggcggcatactgttggcagataatccgtttactaccaccagtaaaacgccgccgcagtcgagttctccacaggcgttgtacggcactattctgccgtggcaggtcgcgcaagtggctcgtgagccggggagcagtttaccgggcacaacccgtaccgatttgccggtcgagaccgcgcaaagccgcacgctgcgtcaggttgataacatgatgcaggagcttgatgagaagaaagggatgtggttgcagggcgaggtcgatatccgtggccgtgacggtgagtcgggcaccagtaaactgaccgaagccaaaacgccgctgacctggtcaagttcgccgtttggtgagtcgcgcttcgagtttaccgccacgccgatcaccctgagtgccgggagtgcttctggcgatgcctggcgacgctatggctcgaacccgctggcgaatgcggcatcaaatttagcatcgacaatcaataatgagatcaattcgctggcgagcatgacagcagatcagaaagcgcaatatttggtgttgcatccggctgccgctgcattggatgggcttagcgaggtctcttcggccgattttggtcaattcacatcgagaggtttgacgaaccttgccgcgctaaatgccgcagaggggggggcgctacgaaactatctgaaccgttcctcactaaaggctgacgtctcgcagccaggcgatgtttcaacagactcgcaaaatgggaacggtgtagagcttaatatggcgcttagcggtgacagctatcgcctggatattggcagcacgccgctgggccaggatctgaatacactggtcggtggggtgaaatggtcacctaagttatctaactacctctcattgatcttcaccggcgagcgccgcgccgtgactgatagtttgctctcgtatgttggtttgaaagacgcttactcaggcaaaacctggggccaggtgactaaaaacggcggtaccgtgcaattaagctatgacgacggtgacgcaggcttcttcgttggcggtggtggttacagttacattggtgaaaatgtggcgagcaacaccagtatgaacgcagacgccggagtctatctgcgcccatggcatgatgatttccgtcaactgcaaacaggtttaagcgtcagttggatggatttctcgaaaaacctcagttacttcactttcgggcagggcggctattttagcccccaaaattatgtcagcgtttcattgccagttgatttttcacagaaaattgacaactggaagcttagccttggaggctctgtggggtatcaatcctacacccaggatgctagcaattacttcccgacagactccgcaatgcaaagcgctttaacagattacgtgaaaactggttttgcaaaagaagcgcagtacggcagcaaatcgcaaaacgggattggctataccttccgggcagggattgattacaacctgaacaagaacatgaccgtcggcggtagggtcggttacgacacctttggcgactataacgaaagtactgccgggatctggttccgctatatgttgggagataaataa

SEQ ID NO: 146718 - DNA, 204 bp, Enterobacter cloacae
atgctggtcagcaccggcagcgcaggcggcgtggtgtcgacggtgaggctgaagctggtggacgacacgctggtattgcctgccgcatccgtggcttgcgcggtaaagctgtgcggaccactcgccagcgtggtggtgagcacgatgctccagctgccgctgccgtccgcggtgcccgtgccgaccagggtggtgccctcatag

SEQ ID NO: 146719 - DNA, 351 bp, Enterobacter cloacae
gtgtcgtcggttgtctgcccggacgtgagcgggccggtgatgctgcccacgtcgtcgattgcctggctgataaccggcacgttcggtgccgcggtatcaacaatcagggtaaagtttggcgacgccgggctgacgttgcccgctgcatcggtgaccgtggcggtccaggtgtggctgccattgcccagcggcgctgatggcgtaaagctccatgcgccggtgccgtccgcctgcacggtgccgaccggctgtccgttttcatacacggtaaccgtggcgttggcggccgcggtgccgttcagcgtcggcgtggtgtcgtcggtgctctgcccggaagagagcggggtttga

SEQ ID NO: 146720 - DNA, 537 bp, Enterobacter cloacae
atgatgtggatagtgctgcccgccagcccggtgccgctgatggttggggtgctgtcgttggttacctggccgctggtgaggttaccctggacgccgccagagacgtcgtcgttcacattatccagcgttggaaccgtcggtgcagtcaggtcaatctccacgctccagggggcggagaccgcgctgaggttgccctgcggatcggtcgcccggacggtaaagctgtgcgagccttcgccgagggcggtatcaggagtaaacgtccaggtacccgtgttgtcagccgtgaccacggcaatctgggggccgccgtcgaaaatagtcaccacgctgtttgcgtccgctgtccctgtaagggttggcgtggcgtcgttgctgagaccaccgctgaccaccgtggtggcggcattgcccacattatccgtgacgttggtgatgaccggcgtggcggaaacggaatccaccacgacggtgaagcccgccgaaggaccgctctggttccccgccggatcggtctcgcggatggttaggacgtga

SEQ ID NO: 146721 - DNA, 747 bp, Enterobacter cloacae
gtgattgccctctgccaggacaggcgtggtgtagctccaggtgccggtattgccgattaccacactgtccagcagcacgccgttgttgtagatggagatggtatcgcccaccgcgccggtgccggtgagggtcggctggttgtcgttggtggtctggccgctggtcagcgggccggtgcccgggccgacgtcgtcaatcacggcgccgatggtcggcgtgcccggcgcggtgaggtcaacggtgacgctggccgccggagagcggccgctggtctggccgttgagggtcgcagtcacctcaaaggtgtgcagcccctcgccaagcgcggctggggtatagctccagttgccgctgccgtcggcagtgaccgtcgagacgggcgtcacgccaccgtccaggtagatagcgatctggcttcccgcctgagccgtaccggtgagggttggggtggtgtcgttggtcgttttgcctttcacgtcgccaatgattgggtcgacgtcatcgttgatggccgtgatgacgggtacatcaggaagattcggctccgtgccggtgacggtgtaattcgcaacgggactttcatgcccggcagcatctgtcgcggtcacggtcagggtcgcgccatcctgctgagcggggctgacagcgatggagaagttaccgccggtggcaaccccggtaccaatgacgttgccattactgtctttcaccgtgatgaggcttcccgcttcggcactaccggttag

SEQ ID NO: 146722 - DNA, 978 bp, Enterobacter cloacae
ttgcggtatcccgggcgcaacggtatcgagcgtgacggtaaagaccgaactcggcgcgctgaggttgcccgctgcgtccacgcccgccacggtaatgttcagcgggccgtccgtttgcgctggaagcgtcaggctccattctccgttcaccaccacgacacggcccagctcgacgccgttgttgtagacgatcaccgtctcaccgttaaccccggttccgcccactgtcggcgtggtatccgtgatgtagcctccgttcggttcaccgcccacggcgctgatcgctggcgtagccggtgccacggtatccacggtgatcgcgatcgccggggaagcgtcagagacgttgcccgcttcatcggtggcggtggcggtatagacgtggctgccctccgcaatattactgtcagggcgccagctccagttgccgttgctgtctaccgtgacggtaccaacgatagttggcgtgccgccgttaaccgtgtcagtgatgttgattacgtcgtttggcgtaccggtaccgctcagcaccgggcgcggatcgttggtggtgccgccattggggacgggaccggtgatctgggtgacgctgtcagtaatgaccggtgctgcaggcgtagctggcgcctcggtatcaatggtgatggtgaccggctgcgacggggcgctttcgttgcccgtgccgtccacgttggtgacggtcagggtgatgtcataggtgccgccagccaggggggatggcggcgtccaggtccagttgccggtattgtccacgacagcgtcgccgattttgacgccgctgtcgtagatcgtcacggtatcacccggattgccggtaccgctcagagtcggcgtggtgtcgcgggtgatttcgcccgggttcagcggcgttgctgtgccgtcaggattgacggtaatggccgggatatccggcgtggcaggcgcaacggtatccaccgtcagttcaaatggcgttga

SEQ ID NO: 146723 - DNA, 201 bp, Enterobacter cloacae
atggccgggatatccggcgtggcaggcgcaacggtatccaccgtcagttcaaatggcgttgagatggtggtattgcccgcggcgtccgtagcgtgcaccgtcagggaatgcggaccgtcggtgagcggggtcacgggcgtgaagctccagccgccgctgccgttgaggatggcggtgccaagcagagtcgtgccgtcatag

SEQ ID NO: 146724 - DNA, 675 bp, Enterobacter cloacae
gtgccgctgccgtcaatcgggatcgtaataagatcggcaccatccaggcgaatggtaacggttgagcccggttcagccgtgccgttgagcgttggcgtggtgtcgttggtgctgtcgccagaattgagggcgccgaggcgctccggcacatcatccagcacctgggtaatgaccggcgccgcaggcgcgacgctgtcaaccgtcagagtccaggtgttggagacggggccggggttgcctgccacatcggtcgcgacggcggtcagagcgtgggggccttcaccgattggggaggaaggggtaaagctccatacgccgaggccattggcgacggttgtaccaatttcaacaccgtccacgcgcaggctgatcgtcgcgtttgcttcagcggtaccgctgagcgtcggggtggcgtcattggtggtcccgttcaagtcgatcgcgccggtctgccctggtatatcgtttacaacctgtaaaatcaccggggcgccaggtgccgtcccgtcaacgttaattgtccacgtgtttgatattccgctcgggttaccggcgggatccgtcgccttcgcggtcagcacccaggtgccgtcggtcagcggtgtgggcggcgtaaagctccactggccggaggagggaacaaccaccgtaccgagggcatcgctgccgttataa

SEQ ID NO: 146725 - DNA, 519 bp, Enterobacter cloacae
atgacgcttgaaccctggctggtattcccggcgctatccgttgcggtggcggttacctgctcgccgttggtcaacggtgtcccgagggagacgctaaagttgccgtcgctgcccgtttttcctgtaccaatgacgttgccgttcgcgtctttcagcgtgatggtactgccgggttcggcggaaccggtgacggttttaccgtctgaggagaacttaaggccggaaggtgcatttggtgcagtcgtatccggatcggccgaattgttactgctgccaccaccgccgccaccgccgccgctacttgccgcggccgcgatgccccctgcagcggcaataccacccagggcccatggccagatggcggcgccaccagcgtcacttcctgacgccgcaagcagcacgtccgtggacgcgatagattcgtacgtggcggccccggtcggatcttcaatccaccataacgcgccgttgctgtcctgcagaaccagctggctcacgccctgcgcgtccgtcacatag

SEQ ID NO: 146726 - DNA, 642 bp, Enterobacter cloacae
atgaaagataaacctaatgagtgggtctcgatctccgacctgatgtcgggagtaatggctgtagttatgttactgctggtgatgtctgtactacagaaaacatggtcagatattaagcataagcaggaaatggaacagggagtcaatgcccagcgagcccgagtaggggaaatgttgggaagtattaaaaccacacttgatggaacggcaaatgaaggcttagttgcgctggatgtcaactcgcaaaaaattacgttgcgtgatggagttttcaatcgcggcagcgcctgcattgcatctcaggcaagccaggcattggcgacgattgaaacgcaggtcgtcagatttcttaccgaatttagaagcggacaagtttatattgaagggtatacggataatcttccagttacccgtccggtgactaactttgaaagtttctgcactgtctatgacgataattttaccttatcggcagcgcgtgcaagagaggcgcgtaaatttatagttggcgatcttgctcaggcttttgcacgccgagtgattgttgccggatatggtgactcgcagcctattcccggtgttgcaccggaagatgctcgtcagcgtcgcattgaagttcggttcgtgttgccagaaaagtag

SEQ ID NO: 146727 - DNA, 1953 bp, Enterobacter cloacae
atgacgtttcatgaattttttgcctttatattgccggaattcgacgtcattcagatgctgtttggcggcacaatgctttttttggttttactgacgattggtttattgctctggcaggcaaatcagcgcttttgggacagaaaatggcaaggtgatgcactgaataatggggcagaccatctcgatgttgatcatggttcagtcaacgaaatcagcgcagcagttgccagtccagcagaaaaaatggccgatatcatgccgggcattttgttaattttagggttgctaggcactttcctcggtctgggaattgcccttaataaagcatcggatattttgattgatgctaactccgcaggcatggataacgccatgtcgaatctgatggggatgatggaagggctggggacgaaatttaaaacgtcgacatgggggatcatggcgtatctgatccttaaagcctgtgctgctgggttaggatatgacgagaagcgtttacgctggtgcgcacagcagatgaagcaagtgttcgaccagtcacgagagcaaaagcgcgctgaacataaagagacccggttacagtatctggcagcattacagggtttgaacgacagaatgcaggtggaaagtgaagccacacggcagttgctgagcaagttctcttcaggtatggagtcgtttttacagcccctgattgagcagggccatgctgccgcacaacaacgcaaaatacaggaaacatatctggaacaattgacagatatatcccgtagtactcagcagcaacatatcgatggattgcagcacgtatgcaacagtattcacgaggaaagcgaaaattcccggcaagttaaccattcacaccatgccgaggtagccgcgatatatatgaggatcgccggtcagggtgataacgctgaacaacagcgtattaaccaaaatgagcaattggtaaaactgcaagacctcttgcgtgaaattcaaaacaatatcgttaagggtaccaaagatcagtctgtgcaagggcaacaacagataacagagttaacgacgacccgagaatcgttacagcacttcattaataccaacagtagtaacctgtctgccattcaacattcagccgaaaaaatgtcatcggcagcacaagaaatggggaattccgccggtgatttgcaacaggttatcggtgatttccgtacaggcattaccgatatgttaggtacggttaaaaccgatcttggttccaccatctcccaaatgggcgaaagttttagccagaatatggaatcgatatccaccagtatggcaaatgcaacagatggcatttccagtgcagttaccgacctttctcaaaacgttggcaccacaatgagtgaagttcgaatttccatcgatcaatcgatgaaaactcagcgtgatgcgcagcgtgaatttatgatcaccagtgaaactttaaatgaaaaagtgatcgctatgacaaaactggttgatgatttgcgtgagcaaatagttaacggactaacagcggtatccagcagcaatcggcaagtagccagcctgaacaaccgttatgcggagatgacgacatcaggtgaaagaaatgcagatgcgattgaaacgctggtgaatcaactccagctcatgcagaaagagagccctcttcagccgggaatggacagggtcactgcaggtgtcggtaaactggtgcacagcattgaatcattacgtgatgaaatgctgagtaatactgatgcctctgctgcactttcttcgctcgatgacagattgatccgttctctggaagagctgggagggattcgtaaaatgctgtcaccgccagaacggaaccacctggttcagcaaattgaaaaaagcctgacgccacttgccaatacattacaacatatcgaccaaacgttatcgaccatgaacatcgttaatgatgcagtctga

SEQ ID NO: 146728 - DNA, 1272 bp, Enterobacter cloacae
atgggtttctggtcaagtgtcggcagtttttgcagcagcgtagcaagtggattggcaagcactgccagccgggtatggaatggtattaaagaaaccgcagctaaaaccgtttcctggatggcagagaaagctgagacctttgtgggaagtgtaaagagcatctgggaaaaggtgaagccatttatcagtaatgttattcgccctatcgtgcaaaacgcagcaaaattagctgaaaagatgttgccacaattcccgtgggtgggtggcgctttgaaagcgctggataaagcgttggggctgttggtcgaatgggataagagtgatctggcgaaacgtattggcaaggccattgagtgggcaattaataaagccaaacaacttaaagatttgtttcttacacctgaagaaatggatgaggccagtgagcatgagcaagctttacgcgaagcgcgtaaccagatgcgcggggaagcagcgagtgctgttgatctggcgagcctgattaccttatatgcccaactctcaacgcgtattaaggacgtcctggataacattcagatcaacgatttcgaacattatctgcggttacgcgcttcgcagaagttactgaaagatactgagcagcatcttacgcgtgcgcaggacattgatacgataaccgatgacgacctgtttcttattgaaactggcaacgaattgctaaaacctaaccctcagttgagcgatgaggcaacgcaacgcctggatcgtgttgtgatggcgcgttttggcaagaaacttatccccttcgtgttcgaagaaatgataatggcctgggggtataacctgcaggatatggaaaatgaatggaaatcgctgaatgacggtctgtcgaaagaacaagtacttctgcgacgtctacagattggccagcgccttggtgatcttcaggaagatgaagtaccaatgctcaacgacctggaagctcgtttaccagtgcaacaggctgagatggaaacaaaacgcaaacgaaccaatgaaatgcgtaattatgtttttgcagcagaaggatttctgcaaatgctagaaaaagagcctgaagaatttgctgaccaagaatatttgatggaagacagcagcacggttgggatgattattattgagtgtgctcagtttggtaagcgttgggaagaacttaataccgagcaacaaagcttaattatcgattttgccaatatctttgaaaaagccagccgcgcacgtgcaagcaagcttgtcgaggtggcagcatga

SEQ ID NO: 146729 - DNA, 639 bp, Enterobacter cloacae
atgccctttattgctcttggtattgcagaactggaaagcaagtttatgggagaaacggctaaaaatatccaggctgcttttgcgcaggctaaggaaaccggagcgctgctctttttcgatgaagccgacacgttactggggaaacgactctcctctgtcacacaaggcgttgataatgaagttaatgcgatgcgctctacgttactgatcgagctggagcgttttgacggcattgtagttttcgcgactaatttcgcacgtaactatgatgaggcgttccgcagccgtattggctatcacgttgaatttacgcttcctgatcttacagcccgttaccatctctggaacaaattcgtggttgctgaaattccactcgcagaagaaagagaaactcttcttaccgccgcaagcgaactatccgaaggactggcaggacgagagatccgtacctgtatgcgtctggcactgcctaaagtgctgctggaagcagaacgcaccggagagactgcacaacttaacatcgctcatttacggagtgcgatagaacaagttttggcctcccaccaagcgatagccaatcattcgggacgtacagccagtgaagtcaacacagcaaaaaaattattaggtatccaataa

SEQ ID NO: 146730 - DNA, 141 bp, Enterobacter cloacae
atgcgaattctggagtccgtactcatgctgaagaaaaataaaagcgtaaccgccgtggcgctcgatgtggggtattcaagcaccgcagcgtttagttatgcattccgccaggcgtttggcgtttcaccgtcacattattaa

SEQ ID NO: 146731 - DNA, 783 bp, Enterobacter cloacae
atgacaaataacacttcacgctatccacagcgcgttcgcaatgagctgcgcttccgtgaactgaccgtcctgcgcgttgaacgtatcagcgcaggttttcaacgcattgtattgggcggtgatgctctggatggttttagctcacagggttttgacgaccataccaaggtctttttcccggaaccgggcagtcactttgtaccacccgtagtgacggatgaggggattgtctggccagagggtgtgcgtccggtatcccgtgattacacgccgttgtatgaccaggcacgccatgaactggcgctggatttttatatccacgacggcggagtggcgtgtacgtgggcgatgaatgcgcgtgaaggtgacaaattgacgattggcggaccacgtggctcgctggtggtgccagaggattatgcgtaccaggtttatgtgtgtgatgaatctggaatgcctgcgctacgtcgtcggctggaggcgatcggtcgtttagcggtacgtccaaacgtgacggcgctggtcagcgtacgcgatacagcgtatcaggactattttgctcatctcgacggttttacaattcagtggtttgtcggccatgacgaacaggcagtgaatgagcagctttcacaactgaccgtgcctgcacaggattatttcatttggataactggtgaaggaaaagtggtgaaaaacctgagcacccgctttgctactgaggctttcgatcagcagttggtgcgtgcagcggcttactggcatcaacgtcggaacgttaattaa

SEQ ID NO: 146732 - DNA, 240 bp, Enterobacter cloacae
atgaaggttgctgcaaacatgcagaacaccagcacgaaggctgcagtaaaagcgaaggacatcgccacgaagatcaccacagagaacaccacgaaggttgctgcaaaggtgaagaacgtcgtcacgaaggctgtgacaaagaacaccaccatgagcatggctgcggacaccgacacgggcgcggcggtggtggcggtcgacgtcagcgcttcttcggccacggcgaattacgtctggtga

SEQ ID NO: 146733 - DNA, 429 bp, Enterobacter cloacae
gtgattctggatattttgacccgcgatgccagtcacggttatgagctaatcaaagcgattgaaacattgactcagggtaattacaccccaagcccgggcgtgatttatccgacactggatttcttgcaggatcagtcgcttattgctatccgtgacgaggaaggtggacgtaagcaaataacaatcacggagcaaggcctgcaatggctggaagagaaccaggaacatctggaacatatccacgaacgtattaaagcacgcagtgtcggctttgaattacgcaagaatccacagatgaaaagagcactggagaattttaaagccgtgctggatctgcgggtcaatcacggtgacaccagcgaagcgcaaatcaagaagatcatcggtattatcgatcgcgcatcgctggacatcacccagcttgattaa

SEQ ID NO: 146734 - DNA, 1566 bp, Enterobacter cloacae
atgttcttgcataacgtaaagattcgctcgaaattatttatcgcgtttggtttgtttgttgtactgatgatggtgagttcgggcctttcgctgttgagtctggatcgtagtaacagtgggatgcagaacatcattaccactgactatccgattacggtaaaagccaatctgctcattgataattttcaggagattgtcagtactcaacaattgatgttattggatgaggaaggtaaatggactcaggcgtcccagaaaaagctcgataccatcagccagcaaatttctgctctgctggatgcgctgagtgcagcgcctctcaatgatgcatccaaaaaaattattgcggaaatccgcgatgtgcgtgagcagtatgtggcttcccgattccgcattctgcaggcgctgcagaatcacgatcgctctggtgcgatgcacgagatgatgacccgcacagtgaatgtgcagcaggcttataaagcaaaagtgcaggaattgatcgccattgaaaatgccaagatgcagaaggcgggcgctcaggtggaatacgatttccacaccaatcgcgcactgttgattactctggcgctgataagcattgctgccggttgtgtgatgggttggtatattgtgcgctcaattacccgaccccttaacgaagccgtacagtttgccgaggcgattgcgcagggcgatctcactcgcaacatcagtatggaacgaaaggatgagaccggtgtgctgctgcaagcgctgatggcaatgaaaacccgactgttagagattgtcgaggaagtgcaaaacggctccgagaatatctctgctgcggcggcacagattgtcgcgggtaatcaggatttggctgcgcgtaccgaagaacaggcaagctcggtagaacagaccgcagcgtcgatggaacaaattactgcgacggtcaaaacgacggcagaccatacccatgaagcgacgaagctgtctaccggagcggcgacggtcgtgaaaaacaacggtgagatgatgaatcaggtgacgcagaaaatacgcgtgattaatgaaacctctaaccgtatgtcagaaattatcaacctgatagattcgattgcttttcaaaccaatattttggcgctgaatgcggctgtcgaagcagcgcgcgctggtgagcacgggcgtggttttgcggtagttgccggagaagtgcgtcaactggcgcaaaaaagcgcatcgtctgccagcgagatccgcaatctgattgaagactccaccagtcatacccgggaagggctggcgttggttgaaaaagccaacgcgttgatcaatggaatggtcactaacgttgaagatatggatgtgatattacgggaaatcgctcaggccagccgcgagcagacggacggtatttcgcagattaacagtgcgattggcctgatcgacaccaccacgcaacagaactcctgtctggtagaagagtccgttgcggcagcggcgtcattaaacgaacaggcattacacttaaaagagatgatcaaagtgttccgcgtgcgtaaagaagacgcgcagcctgcttaa

SEQ ID NO: 146735 - DNA, 1518 bp, Enterobacter cloacae
atgccgcaggtcactgccgctcaggttgccgaacaggaggcgctgaaccgtgcccttctggaaaaactgaacgagcgtgaacgcgaaatagatcacctgcaggcgcaactggataagctgcgccggatgaacttcggcagccgctccgaaaaagtctcccgccgtatcgcgcagatggaagccgaccttaagcagttgcagaaagaaagcgatacccttaccggccgggtggatgacccggccgtgcagcgcccgctgcggcagacccgtacccgcaaaccgttccctgaatcacttccccgtgacgaaaaacggctgctgccggcagcgtcatgctgcccggaatgtggtggtgcgctgagttacctgggtgaagatgccgccgaacagctggagctgatgcgcagcgccttccgggttatccggacagtacgtgaaaagcatgcctgtactcagtgcgatgccatcgtgcaggcccccgcgccttcacggcccatcgagcggggtatcgcaggaccggggctgctggcccgcgtgctgagttcaaagtatgcagagcacaccccgctgtaccgccagtctgaaatatacggccgccagggtgtggagctgagccgctcactgctgtcgggctgggtggatgcgtgttgccggctactgtcaccgctggaaggggcgcttcaggactatgtgctgactgacggtaagctccatgctgatgacacgcctgtcccggtgctgttgccaggtaataagaaaacgaagaccgggcggttatggacctacgttcgtgacgaccgtaacgccgggtcagagctggcgccggcagtgtggttcgcttacagcccggacagaaaaggtatccacccgcagagccatctcgctggcttcagcggtgttctgcaggcggatgcgtacgccgggttcaacgaactgtaccgcaatggacagataacggaagctgcctgctgggctcatgcccgccgcaagatccacgatgtgcacgttcgcaccccgtcagcgctgacggaggaagccctgaaacggatcggtgagttatatgccatcgaggcggaaataagggggatgccggcgaagcgacgccttgcagaacgtcagcaaaaagctaaaccgcggctgaaatccctggaaagctggctgcgtgaaaaggtgaaaacgctgtcgcgacactcagaactggcgaaagcgttaacgtacgtactgaaccagtggccggcgctggcttactatactgacgacggctgggccgaggcagataacaacatagctgagaatgcgctacggatggtcagcctgggccgcaaaaactacctgttcttcggttcggatcatggaggagagcggggagcgctgctgtacagcctgatcgggacatgcaaactgaacggagtggagccagaaagctacctccgttatgtccttgacgtcattgctgactggccgataaaccgggtcagcgaactactcccctggcgcgtagcactgccaactgaataa

SEQ ID NO: 146736 - DNA, 423 bp, Enterobacter cloacae
gtggtggttgatctgttctcacgcaaaattatcggctggtccatgcaatcccggatgacaaaggacattgtcctgaacgctctgctaatggctgtatggcggcgtaatccccaaaaacaggtgctggttcattcggatcagggcagtcagtacacaagccatgagtggcagtcgttcctgaaatcacacggtctggagggcagcatgagccgtcgcggtaactgccatgataatgcggttgcagaaagctttttccagttgctgaaacgcgaacggataaagaaaaagatctacggaacgcgggaagaagcccgcagcgatatttttgattacatcgaaatgttttataacagtaagcgtcggcatggttccggcgatcagatgtcaccgacagaatatgaaaaccagtattatctggactga

SEQ ID NO: 146737 - DNA, 1131 bp, Enterobacter cloacae
atggggttgttgcgtgcgaaaagaaataaagttattcccgattttcttttatatgcctatctctctcctgcattccaggaagtaattcgagaaaaaactattcacggaagtacaacggataggctttcaatcaaagaaatgccttcatttaaaattcaaattcctgatgttcgcaaacagaatggaataataaaaatcttaaaatcaatagatgataaattagaacttaatcaacaggttaataaaaccctcgagcaaatggcacaagccctgttcaaaagctggtttgtcgattttgaaccggtaaaagccaaaatggcagtgctggaatcgggcggttcgcaggcagacgcgatgcttgccgctatgacagcgatttccgggaaagatgctgatgcgctggcggtttttgagcgtgaacatcctgagcaatatgccgagttaaaagccacggcagagctgtttccatctgcgatgcgggagagtgagttgggggagattcccgaaggatggtatcagacgctgttgtcagagttgactgggtttttaaatggatatgcgttcaaaagtaaagattggcgagaaactggttttccggtagttaagatcggttcagtcaaaccaggttttgttgatttgaaaaactgcagctatatagatggtattggcattaaaaatttagaaagattcgaagtcttttccggcgatattcttgtcggaatgaccggctatcccggtgagaccggaattattcctgaaacaatgcaacgtgtttacttaaaccagcgagtagggaaattcactcctctttttgaatttttatactcttatgtatacacattagtgagaaataataattttaaaatctatgtaagcgggcaagctcatggcagcgctcaagcgaatatatcaagcaatgatattctacaatatcccgttgttaaacctaatgatgcgctcttacgagcattcgatgtagttgtccgtaacctcattagcttaaaactgaagaatcaggctcaaattcaaagtttggaacaactccgtgacacccttctgcccaaactactctccggtgaaattaccctgccggaagccgagcaggcggtaagcgaggtggaaaatgtataa

SEQ ID NO: 146738 - DNA, 138 bp, Enterobacter cloacae
atgcctggtttctttgcctatcatctcgacacctggctggttatgcatgaggacttgcgccacagtaaagcctgtaaaacggtgttcgatattctcgccgcgggcttacagacatatatcaataatgcaggtatgtaa

SEQ ID NO: 146739 - DNA, 306 bp, Enterobacter cloacae
atgcgcaaacgaaagtcagcccctcaggataaaaatcaggatgctttactcggtgaaatccagcgtctcaggaagcagattcatcagctgcagctcgaacgtgacatactgacaaaggcgaatgaactgataaaaaaagatctgggcgtcagctttctgaaactgaaaaacagggagaaaaccctgatagttgatgcccttaagaaaaagtaccccgttgctgagttgctaagcgttctgcaacttgcccgcagctgttatttttaccaaaacgtctgtacgataagtatgcggaaatacgcgtga

SEQ ID NO: 146740 - DNA, 360 bp, Enterobacter cloacae
atgacaacgcagacacagcaagacctcgcccccgcgaaccaacctgaatttgaactgaccgtcacgccggtccccgatgaacagcgtatcgatttctggtcacagtactttggcgctatcccgcagtggctactcctggagccgcatatcttcgcctggatggaccgcttctgcgagggctacagcggcggcatctggtcgttctacaccctcagcaatggcggcgcgtttatggcccctgatgctgacaatgacgataaatggcatctgttcaacggcatgaacggcaatggtgcggaaatgagcgcggaagccgcaggtatcgctgtctgcctgattgaatacagccatcacgcctga

SEQ ID NO: 146741 - DNA, 354 bp, Enterobacter cloacae
atgctgaggtcggtggaaaagcgcttcggcgacaggctgcccgacacagcggtgcagtggctgacggacaacggttcagcatataccgcgcatgaaacgcggaggttcgccgaagagctgaatctggagccatgtacaacagcggtgagcagcccgcagagcaatggcatggccgaacggttcgtgaagacgatgaaggaagactatatcgcgttcatgccgaaaccggatgtgagaacagccctgcgaaaccttgcagcggcgttcacgcattacaatgaaaatcacccgcatagtgcgctgggatatcactctccgagagaataccggcggcagcgggcatcgttaacttaa

SEQ ID NO: 146742 - DNA, 1488 bp, Enterobacter cloacae
atgggatttttcagggatctttctgtcgccagaaaactgtcgctggggtttggcgcactgctggtatttatagttgggctgttgctggttaaccagtataactacgccatgataaaaggctccatggcgcgtacggcaacggtgaatgagttatatcatatcaatttggccattatcgatgccggtaaggaatttctcgctgataacgatgctgccgcgtatcagaaaaaatataaggaacttcaggattccattaccgccatgcagaacacagtctcaccagaagatctgggggaggggcaacagctctgggaaaaggtagtacttcagcagcaaaaatatttttccgctcatgacgaggctgtatcaaagggcggaagtgctgcttccctgaatggcctgtcagaccagctgaaacccatgatggatgacattaacgtcgtcctggatgatgaaatggagcgcctggctgccagtctggttcgtaacaatattatcttttccattatggcgctgctgaccattatcgcggggattggcatcatgatcatcattacccgcagtatcacccgcccgctggatgaggccatgaaggggatagaggctgccggcaacggagatatgacaaccgcgttccgtgaacgttatccggaagatgaaacaggacgtctgctgtccgggctgaaagctacaagtattaatatcagccgcatgctcagccaggttcgcgacagttcctcttcggtgtcaacggcatcttcccagatagcggccggaaaccaggatctctcttcccgtactgaagaacaggccagtgcactcgttgagacggcgtctgcactggagcaactgacggccactatagaaaatacggcagaaaacgcccgtcaggcacagacccttgtacaggaagggggcagtattgttaagcgtaatacagaaatgatgcaggccactacccgtcagatggaaggcattcaccagtcctcccagagaatggcggatattattaacgtcattgaatccatcgccttccagaccaacatcctggcactgaatgcggccgttgaggcagcgcgtgccggtgaatccggacggggatttgcggttgtagcagccgaagttcgtagtctggcgaagaagagtgccacggcggccaaagatatcaaggggctgatcgatgaatcagtggaacaggcccagtctggccgtgacctgattgaccgggccggtgaagtcatgcaggagatgtcggtgaacgccgggcagatcgcccagataatcgtggaaattgctcaggctgcaacagaacaaagtggcggagtacgccagattaatcaggcgatcggacagatagatacctccacccagcagaatgctgcgcttgttgaacagtcagccagtgcggcaagggcaatgtctgagcaggccgacacactgtcttcactggttaatgcgttcagactccgggacgggcaggaaccgtga

SEQ ID NO: 146743 - DNA, 354 bp, Enterobacter cloacae
atgctgaggtcggtggaaaagcgcttcagcgacaggctgcccgacacagcggtgcagtggctgacggataacggttcagcgtataccgcgtatgaaacgcggaggttcgcgagagagctgaatctggagccctgcacaacagcggtgagcagcccgcagagtaatggcatggccgaacggttcgtgaaaacgatgaaagaagactatatcgcgttcatgccaaaaccggatgtgagaacagcactgcgaaaccttgcagtagcgttcacgcattacaatgaaaaccacccgcacagcgcgctgggatatcactccccgagggaataccggcggcagcggacatcgttaacttaa

SEQ ID NO: 146744 - DNA, 354 bp, Enterobacter cloacae
atgctgaggtcggtggaaaagcgcttcgacgacaggttgcccgacacagcggtgcagtggctgacggataacggttcagcgtataccgcgtatgaaacgcggaggttcgcgagagagctgaatctggagccctgcacaacagcggtgagcagcccgcagagtaatggcatggccgaacggttcgtgaaaacgatgaaagaagactatatcgcgttcatgccaaaaccggatgtgagaacagcactgcgaaaccttgcagtagcgttcacgcattacaataaaaaccacccgcacagcgcgctgggatatcactccccgagggaataccggcggcagcggacatcgttaacttaa

SEQ ID NO: 146745 - DNA, 615 bp, Enterobacter cloacae; identical to SEQ ID NO: 130645

SEQ ID NO: 146746 - DNA, 1059 bp, Enterobacter cloacae
gtgacctctgcacaacaatatgggattgccacgattgggggagaaggcttccagcctggtttaccggtcgttcactggggggcgttccagccggggccgatgcgtgatttggtgatcccggcgctgaacctggcattggtcagttttgtcagtctgatgctgaccgcccgcagtttcgccgcaaaaaatggctacgaaattaatgcggatgcagagttccgggctttgggtattgcgaacattatgtcggggttatctcaggggtttgctatcagtggtgccgattcccggactgcggtgaatgattcggttggggggaaaagccagctggtttccgtggtcgccgccttgatcatcggtatcgtcgtagtatttttcactcagccattacaattcattccggtatctgcgttagggattgttctaatgtatgcatcgtggtcattgattgatttacgggggctatggaacctgaggcgcagaaataaacaggcctttcgcctggccttcttcacgtttggctgtgtgttaattatcggcgttatccaggggatcggccttgcggtgttgcttggcctgttgcagttccttcgtacggtatttcgcccctctgagcacctgctgggcactgacgaagagggaatgattcactcgttagggaataccaccgatataaaaatggtcccgggcgtgctgatgtatcgatttaactcaccgttgacctattttaatgtggcttattttaaacgtcgggtattgaacctggttgatggggcagccatacagcctaaatgggtggtcattgatgccgttgcctgcttcacctattcagacatcagcgtcctggcaaccattaatgagttaaagcgcgatctgaaaggtcgacagattaaattaattcttgcgggcaggaaaacggagttaacacgctggtttaaagacagtcggccaacaatgaatgatgatgacatgattctggcgccagacctctacctggcacttcggttcattcaaagcaaagagagtgcgagtgagggggaatcagtcggtgatacataa

SEQ ID NO: 146747 - DNA, 735 bp, Enterobacter cloacae
atgctattaaataagcacaatatcgacttttgttcttctatgagaattggtaaagacaattttggacattcattaaaaatgcgaattgatggacttgcaattgtaagttgctttctcaacaaagctgagatgatgagagtatattctaaacttagaaaaatgagaaaaagtaactataaaaaatatagagtgagacacataaaaaacaaaaaaggtaaaccctatcgtaacgcgttattaatcatgggaatcaaagaaaactctccagttttattacgaattgactattcaccaataaatcataacacaggaggtatacgtttagatttccacccccaacatctgactgcaagtaagatcgataatctattatcgtggatgaatcagcgattaggggaagtattttatcacctattggcacgatcatggattacacgaatagatgttgctgtcgatatttatggttgtcaattagataactatatatggggattagaacgagcaggaaaaacatcgtatcgcaataataaaaagagtttaccgagtgtcaggatcggcagttcacgttctattttatatattctttgctatgagaagatagatgctcatggaagcaaacaactcacttttcgggagaaatccagactcattaacatcaatctgaatgagcatcggcaattcttgcgtatcgagtcccgataccaacccaatgccacgcctacgaggctttgttga

SEQ ID NO: 146748 - DNA, 210 bp, Enterobacter cloacae
atgacggatggctggccgctgtatgaaccccgcctgaagggaaagctgcacgttatcagcaagcgttacactcagcgcattgagcgacataacctgaatctgagacaacatctggcaaggctgggacggaagtcactgtcgttctcaaaatcggtggagctgcatgacaaagtcatcgggcattatctgaacataaaacactatcagtaa

SEQ ID NO: 146749 - DNA, 405 bp, Enterobacter cloacae; identical to SEQ ID NO: 145142

SEQ ID NO: 146750 - DNA, 294 bp, Enterobacter cloacae
gtggcgcacgtattcggtgaacgcacgttggccacgctggagcgtcttctgagcctgctgtcggcctttgaggtcgtggtatggatgacggatggctggccgctgtatgaatcacgcctgaagggagaactgcacgttatcagcaagcgatataagccgcgcattgagcggcataacctgaatctgaggcagcatctggcaaggctgggcaggaagtcactgtcgttctcaaaatcggtggagctgcatgacaaagtcatcgggcattatctgaacataaaacactatcagtaa

SEQ ID NO: 146751 - DNA, 177 bp, Enterobacter cloacae
ttgtccttcaaccgatacgtcatcaccgtggtgctgccgaacctgattatctgctcactgctcggtaagcctgcactggcgatcgagaaggctgctcgcaagattcgtctggcatgcggtctccgcatggagcgtgtcatgttggatgcgccaccaaaggagaagcgcgatgcctaa

SEQ ID NO: 146752 - DNA, 615 bp, Enterobacter cloacae
atgaaacgtgtcgggataaaggctcaggtcggataccagagcccgcgggcacgtaaaggcgaggccagtatcgtgtcgcccaacaggctccagcgacagttcaatccggatgctccggatgagcgttgggtaaccgacataacctatatcaggacccacgaaggctggctgtatcttgctgtggttgttgatctgttctcacgcaaaattatcggctggtccatgcaatcccggatgacaaaggacattgtcctgaacgcactgctgatggctgtatggcggcgtaatccccaaaaacaggtgctggttcattcggatcagggcagtcagtacacaagccatgagtggcagtcgttcctgaaatcacacggcctggagggcagcatgagccgtcgcggtaactgccatgataatgcggtcgcagaaagctttttccagttgttgaaacgcgaacggataaagaaaaagatctacggaacgcgggaagaagcccgcagtgatatttttgattacatcgaaatgttttataacagtaagcgtcggcatggttctagcgatcagatgtcaccgacagaatatgaaaaccagtattatcaacggctcggaagtgtctag

SEQ ID NO: 146753 - DNA, 264 bp, Enterobacter cloacae; identical to SEQ ID NO: 101375

SEQ ID NO: 146754 - DNA, 264 bp, Enterobacter cloacae; identical to SEQ ID NO: 101375

SEQ ID NO: 146755 - DNA, 450 bp, Enterobacter cloacae
gtggcgattcatgcaagactaaaagccattgcctcaaaagaggggtatgaagatggcccttataactcgaaatatagccaacagcacgctgatgcgtatgggcagatagtcaatctctttgatatcactagcgttgatgcacagaatcagcagcaggtgaaagataccatgattaactatttcttggtcaccaaaggggtggatcgtcagaccgcagaaagctacaccgaaacgaagcagggtctggagatcattgcgacttcggtaacaccaattttgggttctgctgcggcaaaacaattaagtaaagttgttgatgccaatctaaaagtcgtagccaagggaaatgtggatggagtgaagttttctgacaccaaccaaggtataagacgttcacagttagggaaggtgcgaataagcaggtcatttcttcccaagctgactcgctga

SEQ ID NO: 146756 - DNA, 312 bp, Enterobacter cloacae
atgccggcctttgaatgggttcatgtgcagctccatcagcaaaaggggatgataagtttatcaccaccgactatttgcaacagtgccccttcggaaatcttcacgtccgacatcatcatgcacatcaaagaacccggccgtgccccgcaggacctgctggtaggtggccatgcggttctcgatgcgctcagcagcctcccgggcgcggaagtcgaagtagacctgttgtcgttgatcgacggactcgacgatgagttggtaaagcactacggtggagcacaggccgctcaaaaaaaccacaagagggattag

SEQ ID NO: 146757 - DNA, 129 bp, Enterobacter cloacae
atgttgttagatacgatgtacttaacccatcagtatcagattatctcacaaataaaattaatgagaataaatcaacaatcccttattatttttcagcacttacaaccgtacgttcgttgtttaacttaa

SEQ ID NO: 146758 - DNA, 138 bp, Enterobacter cloacae
atgaaaaaaagaacagtaagattcttgtcatcactcaaagataataaattatatcgatactttgatgaacactttaacgttattacatgcattagtgtcatatttgtcattgtatggaacatctacttttatgcttaa

SEQ ID NO: 146759 - DNA, 3111 bp, Enterobacter cloacae
atgttttcccgtttcttcgtgcgtcgcccggtctttgcctgggttatcgccattctcatcatgctcgccgggatactggcgatccgcacgctgcccgttgcgcagtacccggacgttgccccgccgtcgatcaaaatatccgccacctacaccggcgcctccgcacaaacgctggagaacagcgtgacgcaggtgatcgagcagcagctcaccgggctggataacctgctctacttcacctccaccagcagctcggacgggtcggtgagcattaacgtcacgtttgaacagggaaccgatccggacaccgctcaggtacaggtgcagaataaagtccagcaggcagaatcgcgcctgccgaccgaggtgcagcagtccgggatcaccgtcgaaaaatcccagagcaacttcctgctgatcatgggcgtatatgacaaaaccgacaccgccagcagctcggatatcgccgactggctggtgagtaaaatgcaggatccgctggcgcgcgtggatggcgtcggtagcctacaggtgttcggtgcagaatacgcgatgcgcatctggctcgacccggcgaagctggcgtcgtactcgctgatgccctccgacgtgcagagcgcgattgaagcgcagaacgtgcaggtttccgccggtaaaatcggcgcgctgccctcgtcgaacgcccaacagctgaccgccaccgtccgcgctcagtcgcgtctgcaaacggtcgatgagttcaaaaagatcatcgtcaagagccagtccaacggtgcggtggtgcgcatcagcgacgtcgcgcgcgtggagatgggcagcgaagattacaccgccaccgcgaagctgaacggccacccggcggcgggtatggcggtgatgctctcaccgggcgccaacgcgcttaacaccgccacggcggtaaaagataagatcgccgagttcaaaaagtcgatgccggaaggctacgacgtggcctacccgaaagacagcaccgagttcatcaagatctccgttgaggacgtgattcagaccctgttcgaagccattatcctcgtggtggtggtgatgtacctgttcctgcaaaacatccgtgcgacgctgatcccggcgctggcggtgccggtggtgctgctgggcaccttcggcgtgctggcgctgttcggttactccatcaacaccctgacgctatttgcgatggtgctggcgatagggcttttggtggatgacgccatcgtggtggtggaaaacgtcgagcgtattatgcgcgacgaagggctgcccgcccgggaagcgaccgaaaaatcgatgggcgaaatttccggcgcgctgatcgccattgcgctggtgctctctgcggtattcctgccgatggccttcttcggcggctctaccggggtcatttaccgccagttctcggtcaccattatttcggcgatgttcctctccgtggtggtggcgctgaccctgacgcccgcgctgtgcggctcgatcctgaatcacaccgctccgcacaaaaagggcttcttcggcgcgtttaaccgcttctacagtaagaccgagcacagctatcagaacaaggtgctgcgcgccctgcgccgttccggtggcatgctggtgatctacgccctgctctgcggcgcgatggggttcgccatgctaaaactgccgggcagcttcctgccaaccgaagaccagggtgaaatcatggtgcagtacaccctgcctgccggcgcaaccgcggtgcgtaccgccgaggtaagccgccaggtacgcgagtggttcctcaccaaagagaaagccaataccgacgtgatcttcaccattgaaggcttcagcttcagcggcagcggccagaacgccgggatggcgttcgtctccctgaaaaactggtcagagcgcaaaggcgatgagaataccgcccaggccattgccctgcgcgccacgcaggagctgagcaccattcgggatgccacaattttcgccatgacgcccccggcggtggatggtttaggccagagcaacggctttacctttgagctgatggccagcggcggcaccgaccgcgacgcgctgctgaaactgcgtaaccagctgattggcgaagccaaccaggacagctcgctgcacgccgtgcgcgccaacgatctgccgcagatgccgcagcttcaggtggatatcgataacaacaaagccgtgtcgctggggctctccctgagcgacgtgaccgacaccctctccagcgcctggggcggcacctacgtgaacgacttcattgaccgtggccgcgtgaaaaaggtctacatccagggcgacagcgactatcgcgcggtgccgtcggatcttaacaaatggtatgtgcgcggcagcgacagcaccatgaccccgttctccgccttcgctaccacccgctgggagtatggcccggaaagcctggtgcgctacaacggctcggcggcgtatgaaattcagggcgagaacgccagcggcgccagctccggtacggcgatgagcaaaatggagcaactggcgaataacctgccgtccggcagcacctgggcatggagcggtttgtcgttgcaggaaaaactggcgagcggtcaggcgatgagcctctatgccctctccatcctggtggtgttcctgtgcctggcggcgctgtatgagagctggtcggtgcccatttcggtcatcctcgtgatcccgcttggggtgctgggcgcggccattgccgcctccctgcgtggcctgagcaacgacgtctacttccaggtggcgctgctgaccaccatcggtctgtcgtcgaagaatgccattctgattgtcgagtttgccgaagccaaagtcgccgaaggctactccctgacgcgcgccgccctgcgggccgcccagacgcgtctgcgtccgatcatcatgacctcgctggcgtttatcgcaggcgtgacgccgctggcgattgccaccggcgccggggccaacagccgcgtggcgatcggtaccggcattatcggcgggacgctggccgcgacgctgctggccatcttctttgttcctttattctttgtactggtgaaacgtctgttctccggtaagcacgcaaaccggaggtcataa

SEQ ID NO: 146760 - DNA, 1707 bp, Enterobacter cloacae
atggcaggacaatcagacacggttcaacaacaggataccctgaatcgttatttactgtatttcccacgaagtaaaaccgtttcaccggatgttcattcgttttgcggggaagaagaactcagtaagccctaccgttataccattcgcttcaccagtccgaatccgaacattgcagtcaaagacgttctgaacaagatggctgaatttattctgcgcgcgcctaacccgaaagcgaaatcgacctggcacaatcaggaatcctggttgccggtgcgccagattaatggcgtgatcacgtcattttcccgtctgaagtcgtccgctgatgaagccctgtatgagtgtatgttggagcatgaactggcgctgctggatcggaactaccgttcggccgtttacatggacatgacagtgcctgagctcgtcacgaagctgatgaaggaaagcgggcattttcagggttacaacatcgattttgaccaactaagccacaactaccccagccgcgaaatgattatccagtggaaggaaaccgatctccagtttatccgccgtctgctggccgaagtcgggatctggttccgctttgaaaatcacgacaaggtacaaggtgaaacggtagtgattttcggtgacggtagtcgccgctatgttttcagcaataagaagctgccatacgtccgccattctggcatgaccagtcatgaagagtacgtaaccgaactcgaagagcggtaccagctcatccccgaaaatgtactggtccgtacctataactaccgcgatccgttttccccacaggcggataaaaccattgcagggaacgacattcctcacgggataacccgcggaaaacagtaccactacgccgatcactttctggctgcaggtgacttttacggccaggaggcagaaacagcctcgttctacgcacgcctgcgttatgaacgcctgctgaacaaacagagcgtactgggggtgacaaccagcgatccggaactgctgccgggcgtgatgtttcacccgacaggggatattcctgacgggtttaagcccggatttcttgtgaccacaatgacgctatccggctgtcgcgcacagcactaccgcgccatcctgaagggtatcccttatctgaacggctacagctaccgtccggactctctgccgcgtccggtgatagccggtacggtgcccggccgcgtggcggccatcaatcgcgatcatacgtatgccggagtcgatgcgcagggccgctaccgcgtgaagtttgattttgatctcgatgaaaaacgtgacggctttgaaagtgcgctgatgcgtctgggcaggccgtacggcggggatgtgtttggttttcacttcccgctgctggacggcacagaagtggctgttgcctttgaaggcggcgaaagcctgttgcatcgtgccgactggcgtgatccgttgaatggtaatgctgatgcgagagaatattatcgttctgggagattgccagttgccgggactaaaaactttatgaataagcctgatgaggtactgccgctgggcgattttggtgtggaaaatgattatatcggtattcgacctcgttcgcgtaacctgatggatattgagatgggaaccgtcagaccggaagatttccaggagataaagctccttcaatgggaaatgcctaaacctaaaagtgacagccagctggcttaa

SEQ ID NO: 146761 - DNA, 696 bp, Enterobacter cloacae
atgaaaggattatgtattggcctggcggtctccgctatttttctggtagctgcgtgtcaggctctggaaacaccgacgcaggtagtgtatcggttcgatgaccatcgttatctggagttgaagggctgggactgtgaaggtgaactctggtatacggacacagaacgagggattcattctcagccattttttcaattttaccggatattcactaaaaagtttgaacatccatcccagcgctatattgctgttccaaactgggaagtagatggatttatggtttccaaagattatgggcaaacctggaaggctgtaggtttttctccttcggggaatgaaccgaatggtgataaccgagcgccagcggaagacgcagtatccttcaccgtcgttaatgatcagggttttttacagaccaaacaccggctgtatatgtcgtcaaaaccgtttgatgatccgcgaattttgccgggcggaccggggattcaatatcgtttagacactggtgaaatggatgaaattacgccagacgcgccaggatggtcctggggaatggtttattttacacaggaaggtttacagggaaaaaccatgcgccgtgaggctaactatcagggcttgccggacaaggtgcctgaagtgaaggggtacaccggttgggaccatatgcgttgtgacatggacgtggggaaataa

SEQ ID NO: 146762 - DNA, 519 bp, Enterobacter cloacae
atgaaaggattatgtgtagggattattactaccgctgttttatttgcggcggcttgtaaggcttcagaaccgccaacacaggtggtttatcggtttgacgatcaccgttatctggagctgaagggttgggactgcgaaggtgagctctggtatacggatacaaaacaaggcgttcactcgcaaatcgccagccagttctatcgaattttcacgaaaagattcgtacatccttccgaacgttatattgctattccgtggtggggagaggtaactgggggattttctgtgtcaaaagattatggacagacgtgggaaagaggcggtgcttctatgtctccaggtgagaatgagccagatggtagtaatgctccttactacgatgatgttctttctttcaccgtcgttaacgatcagggatttttacagacgaaacacaggttgtatatgtcgtcgaagccgttcgatgaccctcgtttattgccggggggggcggggattcaatataaacttggcgattga

SEQ ID NO: 146763 - DNA, 135 bp, Enterobacter cloacae
atgactaagcaagggcttaaaggaacagttcaggaacttcagtccaactggcaggatcagccggacaaggtgcctgaagtgaaggggtacaccggttgggatcatatgcagtgcaacatggatgaaggtcgttag

SEQ ID NO: 146764 - DNA, 660 bp, Enterobacter cloacae
atgaatatattaagaatgatttttgttgttttctttgcttttaatttaactggttgttttacaattagtttatcaaacaccattaaagatagcaaatatagcacagaaaaattcttatccgatacaataactgatgtttatattgataaaaactctcctcattctattcaactgggtggggtgaatagctcttttctggtgtttgatgattcggatgggttgaaaacacttctatcttcatctttgatgaatgttgataacttatcattaaggcaaaatggtgagtttagtttgtatgacgaaggtgattatacaaaagtttatgggaaagtagattttgtttattcatttaaaaacttagataaagctaatgaattgctttctaacacaaaatgccaattaaatgagatgaatgaatgtgtttttgagatcagtgagttatctggcgattacaatcagaagcctgtgagagttgaagaacaaaatattatccacttacaaaaaccagtaatattggctatgaaaaagtatactgagcacacgcctctcagctcttatgctttaatgttgctttatcctgtgactattctccttgatgctgtgaccattccagtgcagattttcatcattccatttgggatgggtactgtaggtaaataa

SEQ ID NO: 146765 - DNA, 1374 bp, Enterobacter cloacae
atgaactggtggttattctcaaaacagaatgaatttgacgagaaatatccctatttgtggatatgtctcttatatgtggtcgtcgtggttatctgcctggccgtccgggctgtcacctggccgggtaataaacatgtcgatctcgattttcttgcccagtctgtggtgattccggttgttttcctgacggggttcgtacaagtattctctgccgcgtatcacgggctcaggcactacatggaaacgcggttgctgattgcggccgaacaggaatacaaggttgtcagctacgccaggggcaacattaccctggcacgctggtccgtgctgactcctccaaaggcaacgaaagaactggcgctgagtatgctgaaactggagggagagtttccgctggccgctaaaatgccgttgaaaatcgaactggaagcatcgttcgatttcacgagagccgggcaggcaatgatccacgttctggagccgatggtaggaaaactttctcagtaccagcaaattgaagtgcttgtgtgggttcgcggtggggacgaatcctgtagcgatgaactccgtcgtgtgctcgaacggttagcaatctctactaaaaaaattacttttttgcctgaatgtccggactatacgcaagtcacggaatggataaagcagactaacgggtatgttgttgaacggctgcttatcagtgtagaccttcattctgacgaagaagaatctaaacagatggaaaatgttactgcgcttctcttcacgaattactacgtcaaaacagaaggagaaaaacgggtttatctttatcagccgatgacgggggttacagacgttgaaacaacagtacctgtttatctgcgagcggaagttgtcagtaaaccaaaacaactctggtataccggactctctcgcacggagaagtacccgctgctggaagtgctggatgagaaaaaggccgtaccggacaggctggatcttgaaatgtcactcggtgagcattctgccgggtacgtctggctgatgctggcattggcatcagatgcagtagtgtatgcgcagggtgatcagctggtggcagcttccgaacagaacaggttttcaatgacggctctgtcgtcccgattaactcgccaacctgattatccccagcagaaacgatacacgacaccgtgggaagtttgtgggatcgccgggctgatgttcttttttggaattatgataaccattggcacttttggtgagggcggtaaatctatatccggctggtttttaattatagtggctgttctatgcatagttatattttgtggtatgggggcattttttacctggttttatggtgataaagctcgtgagcatatgggaatgtaa

SEQ ID NO: 146766 - DNA, 168 bp, Enterobacter cloacae
atgtatacccagctcagtatccgtgtaccagagttcgccttcacaatcccaccctttcagttcgagataacgatgatcatcgaatcgataaactacctgcgtcggcggttctttcgccaggcatccggttgccagcacaacggacgtcgctgcgagaacggtacataa

SEQ ID NO: 146767 - DNA, 708 bp, Enterobacter cloacae
atgaaaacattatttataggactggcgattactaccattgttctggcgacgggctgccaggcgaaagagccaccgacacaggttgtttaccggttcgatgatcaccgttttctcgaattgaaaggctggggctgcgaaggtgaactctggtatacggatactcttcggggtattcataccaggcccgtcagtcaattttatcggattttcaccaaaaaatttgttcatccttctgaacgatatattgccatacccacctgggatgacccaggaacaatgatttcaaaagattatggtaaaacatggtctccccagtttttttcggtagggcctaatgagcccgatggtactaaccaaccatcctatgaggatattatttctttcaccgtcgtcaacgatcagggttttttacagaccaaacaccagctgtatatgtcgtcaaaaccatttgaagacccgcggattctgcccggcgggccggggattgcctataccgtggatgacggaatgggaaataaagtaagcgatacgctggacccccgtttccctggctgggcctggggaatggtctatatgactaagcaggggcttaagcacagcacgcagcaatttaaagctaactggcaagatttacccgacagcgtacccgaagtgaaggggtacaccggctgggatcatatgcgctgtgatatggatgcggggcgataa

SEQ ID NO: 146768 - DNA, 2121 bp, Enterobacter cloacae
atgacggaggcgaagacaaaaccctacgctccacgggtggtatcagaaggcgatattccggtacacaaaaccctgggcgaagtcgcccagacgcgcaacgtcgggataccgcgcccgatgcccggcattgtgatcctcgtccatggcgtgaacgacgtgggtgaagcctaccagaaccaggagaaaggtatacttgccgggctgggtaagcgacttaaccggcaggatttttacgcccacgaatggaaagactacagaattatcactccagggcgttcccccatcatcccgttttactggggatataaaccggttacgcatgctgattaccgggcggaccagaagcgctaccgggaggaggtcgggaagctgagtgacaaagcgcatcttccctatgatgcataccaggaagataacgagacgaataaaaagtcgctgggtaatgacggaaaagggccgtttcagtaccagaacgataactttaaaaatgcacttgatacgagttttgccaaggggggcgggacctttgccaacgcaacgacgacgatcccggatatgctgggacccggcgccggtggcttcggcgttgccgctgcgggatttgcctcgctgcacttcaatgatggcgattttacccatcccatttatgaaaacccgcaccgcatttaccagttttttgccgctcaacggctggcggatttgattattcagattcgtcagccgttagtaactcaaaacgatgttatcaatatcgtcgctcacagtcagggcacgattattactatgctggcaaatatgctggtgaaacaggccgggtatgctccggtaaactgtgtgattcttaatcactcaccgtattctcttgagtcgcgcgtggctgaaaatattcagccgggttatcaacagaccgacgatgccagacagcagacatttaaaaatttctgtcgcctgatgcatacgcaatggaaagggggtgggaaaatggcagagagcgaattacaggctctggaggcctcctgtaccctgcgtaaaccttccgataatccgctgcgaacggatgacagatattgccgaagcaacgacggtaaagtgtataactacttttgcccgaacgatggcgtcgtgtcgctggagaatgtgcaggggtttggctggcggggcattcctcagaatattgccagtgatataccgaatctgtttcagcgtgtgttttaccagcatggtgaagtaggaaacatccctgacgctaacccctttgagttaccgccgcgaaatgagggggatgcaaaatatgcctttctcacgaacgccagttacagcgctcgcgatgtggtaataaacggtgaggagttaccggaaccttttattttcaaactccagggggaggataatcacccggataacgatcctaaaaccagtgataaaccgtatacctattatgtcgatccggacagcccggacgcctacatttcctattccgccaaagccagcgccattaagcgcacggtaacgacaacctttgctgtgaaccgctatcaaaatattggctggcagcctggtcacgttttatctgcttcagagcttaaagaagagagttttgaacgcaagcatgaggttatttatggtgaggtgtcaggttcgcgtgattttcagttagttacccttacctggaagaaaacaccggaagaactgcaagcggaatggcagaaaattgacccggtaggctacagccagcactcctctattgtgatgagcgaatttgcgccatcgcacgctatggcgtttgatttggctattgggcagtgcaaatcattcgattatcaggcggggaaattttgggaagggttgttacatcgtgcggactggcgcgatccgcagaacggttatgaaccagcattagaatattatcgaagcggaaaattaccagagacacaaactaaattttatatgaactggcctgatgaggtactaccgaaaggcgactatggtgtgaaaaatcattttaacaattctacaactataaaaccgtcccgagatctaaccgcaggaaatcaggtaatgacaaatctgcaatgggatatgcctaaacccaaaagtgagagccaactagttcaaggatag

SEQ ID NO: 146769 - DNA, 399 bp, Enterobacter cloacae
gtgcgattaattgataaaaaccagcttgaggctttatatgatcaagccgggcaatctgaacggttgcgttctcacctgttattacacgagtcccaccaggataaggtgcaacgactacttatagccttggttaagggtagttatgtcgacccgcattaccatgagcttcctcatcaatgggagatgtttatcgttatgcagggacaggtgcaggtctgtttgtataatgaagatgggagaatcattaatcaatttgtcgccggagcgaatacagcaataagcgtagtcgaattctctcctggtgatatacacagtgtcgaatgtctatctccaagagcactaatgatggaagtgaaagaggggccttttgatcctacctttgccaaggcgttcatctaa

SEQ ID NO: 146770 - DNA, 1212 bp, Enterobacter cloacae
atgaaacttgctttaatcatagatgattacctgcctaatagtacgcgtgttggtgcaaaaatgtttcatgagttggctcaggaatttattcgccgggggcacgatgtcacggtaattacgccggacatgcatcttcacaaccaggtatcttttgacacctttcagggagttaaaacatggcgtttcaaaagtgggccgctcaaggatgtgggtaaaatccagcgagccattaatgaaacacttctctcccatcgtgcctggaattccattaaaagtaagataaaaagagacacgtttgatggggtggtttactactcaccttccattttttggggatctttagttaggaaaattaaatctcgctgccagtgcccggcctatctgattttgagagatatgtttccgcagtgggtgattgacgctgggatgttaaaagcggggtcgcccattgaccgctatttccgtctcttcgaaagatcctcttaccgtcaggcaaatcgtattggcctaatgtctgataataatttggaggtctttcgcatgacaaacaagggctacccttgtgaagtcctgcgtaactgggcttccctcacgccgactgtattacccaaagactatgtgccattgcgtcaacgtctaagccttgaagataaagttatttttttctatggaggtaatatcggccatgcgcaggatatggccaatctgatgcgtcttgcacggaatatgacaaagcatccaaatgcccactttcttttcatcggtcaaggggatgaagttgaattaatcaagacattggctgccgagtgggcgttgcccaattttacgtatttggcttcagtcaatcaggatgaatttaaatttattctatcggaaatggatgttggtctattttcactttcagccaaacacacttcacacaattttccagggaaattgctagggtatatggttcaatctttacctatcttaggcagtgtgaatgctggtaacgatttgctcgatatcgtcaatcaaaataacgcaggttcaattcatatcaatggtgaggatgacaagcttcttgaatcggcacttttgatgctctatgacgatgctgcgcgctaccaattcggctcaggtgcgaatgcattattaagagaacaattttccgttgaatctgcggcacaaacaatagaaataaggctggaggcgagtcgtgcgattaattga

SEQ ID NO: 146771 - DNA, 1131 bp, Enterobacter cloacae
atgaaaaaattaaaaattatgtctgttgttggtacgcgtcctgagattattcgtctttcacgcgttcttgctaagcttgatgaacactgcgaacatattcttgtgcatactggtcaaaactatgattatgagttaaatgaagtgttctttaatgaccttggtgtacgtaaacccgattactttttaaatgctgccgggaaaaatgctgcagaaactatcggtcaggttatcatcaaagttgatgaggtgcttgaaactgaaaagcctgaggcaatgctggtgctaggtgatactaactcctgtatttctgctattccggccaagcgccgtaaagtgcctatcttccatatggaagccggcaaccgatgtttcgatcagcgcgtcccggaagagactaatcgacgcatcgtcgaccataccgctgacatcaatatgacctacagtgatattgcacgtgaatatcttctggctgaaggcctccctgcagaccgaattatcaaaaccggtagcccaatgtttgaggtacttacgcattacatgcctcaaatcgataattcggaagtactcacgcgactgaacctgcgtccgggcgaatttttcgtcgtcagcgcgcatcgtgaagagaatgttgattcccccaaacagcttgtcaagcttgcgcttattctcaatactattgctgaaaaatataatttgccggttattatatccacacatcctcggacccgtaaccggattaacgaacaagggattgaattccatccgaatattaatctgctaaaaccgttaggtttccatgattataatcatttgcagaaaaactcgcgtgctgtactgtctgacagtggtacaatcactgaagaatcatccattatgaatttcccggcgttaaatattcgtgaagcgcacgaacggccagagggttttgaagaagcatccgtcatgatggtgggcctggattgcgagcgcgtgctacaggctctggatatattggcaacacaaccacgtggtgaaactcgtcttttacgacaagttagtgattacagcatgccaaacgtatcagataaagtcgttagaatcgttcactcttatacagattacgtcaagagagtcgtctggaaagaatactga

SEQ ID NO: 146772 - DNA, 174 bp, Enterobacter cloacae
ttgttaattttgtgcgacggccatacgcagtttgccaaactgatgggtaaggcgttaatcacggacgatggcgaggcgatagaaggcccggcactggaagaggttgaggtaatggggcgggtgacgttcttcattaaccgtgcgagggatgatgacgactgcccggtgatgtaa

SEQ ID NO: 146773 - DNA, 624 bp, Enterobacter cloacae
atgagaaaaaaaatcgtcatttttggagctggtggattttctaaatcaattattgatagtatcgatcaggatttatatgatgttgctgggtttattgatacctataaaagaggttttcaccaaggctatcctattctttctagttcaatagaagaacttgatcaacaagataaatatcattatttcataggtataggtgaaccatcagtccgtcattatttttatacattattaaaaaaatataatctaaaacttatcaatataattgatcgatccgctctagtatcggagaaaaccatattaggaaccggaatttatattggtaaaatgagtataatcaatcctgattctaaaatttcagattgcgcagtcgtcaatacacgttcactcatcgagcatgggaattttgtaggatgttgtacaaacatatctacaaatgtagttttgaatggagacgtgaaagttgatgacctgacatttgtaggtagtagtagtgttataaatggacagctttcgatcggaaaaaatagtattgttggttctggatccgttgtcatcagaaacgttccagacaatgttgttgttgttggggctcctgccaggataatcaaagagcgtaaataa

SEQ ID NO: 146774 - DNA, 1041 bp, Enterobacter cloacae
atgaagaaagtatatattgttgcagaaattggttgtaatcataatggtgattttattatcgctagaaaaatgatagatgaggcaaaattagcaggcgtcgacgctgttaaatttcaaacttttaaagccgaacttctgatctccaaatttgcccctaaggctgaatatcaaaaaaaagtcactgatgctaccgaatcacaacttgatatgacaaaaaaacttgaattgccatatgatgaatatataaaacttgctgaatacgctcaatcattaggattagatgtattttcaacaccatttgatatggaatcaattgattttctttgttcacaaaaacaaataacttggaaaatcccttccggcgaacttttaaatttaccatacctagaaaaaattgcaaaactgccaattcatggtaaaaaaatagtaatatcaaccggaatggctactgtagaagaaataaaaatgtgtttgtctatattcgaaaatagtcaaattccgaaatcagacataactattttacactgtaatactgagtatccgacgccatttagtgatgtaaatttgactgttatcaaaagttttaaagatatttttcctggatataatatcggtttttcagatcattcaccagggttctatgctggggttgcatctgtttcgtttgggatcacatttattgaaaaacattttactctggacaagaatcttccgggaccagatcataaagcttctgttactcccgacgaattaaaaatgctatgtgaaggtataagatgtgtagagctcgctctcggtagttcagaaaaaaaagtaacaaactctgaaagaaaaaataaaatagtagccagaaaatcaattgttgcaaaaacgaaaataagtaaaggtgaattgtttacaattgataatattacgacaaaaagacctggtaacggcataagtccaatgttttggcatgagataatcggtaaggtagccgaggcaaattttgaagaagatgaattagtgacgcatacagcttttaaacctcaagagatttaa

SEQ ID NO: 146775 - DNA, 1074 bp, Enterobacter cloacae
atgaaggaatatctcagtctattagcactcatgatgctcggaatgtctggcgcagcacaagctcgtgaatgtaaattttacgctggcacggacgatgtgttaattatgtctccgggaacacaaccggtgattacccccttacccgtgggtacggtaaccaccccaacgcagatcagcaccacgatcctgatggagacaacaccgacattaagatcgcactgctcaggcggtgatgatggcgccgatgtttatcagttaaccgataatgccatgctgagtggggaaatagatggcaaagccacgttcagtaccaacatcccggggattgtctacaccctggcattttacccggatggcaatggcgtaactgcatggtttcctccaaatgcgtacgcattttatagaacgggtatcgtcggttatgattatgacatgcttgatgagaaaaactggcacgttcgtatggagttttggcagacgaatggatttaatggagtgcccttagatcagaatttcctgaccgcaagcagtggaccaatcggtcagattgtcatcggcgacccagatgagcagaaaaaagacgaccatccacgtccgcgggtaaatatgtctcagatgtctttcagcattcccctaaaccgtccgacctgtgcattacgcgctccgacaacggttgacctgggagactggtaccccgctgaagtggaaaacgataatacccgtaaagtcgagtttcacattacgggaacatgcgtaaatacaatcgctgtttactatacgttatcctccacgcataccaccgctgataagaaatattttactaatactattgagagtaatagtgggattactgcggcaggaggcgtcggcgtcatgattttagatgcagataatagttctatgcccgtgccggcagacagttccaaacgaactattgctacaggaacgatatttggggatcccgttaatatcattgacagatcaatttgggccaagctggtcaaaaccggcagcgacccggtaaccgtcggtattttcggcaccaacgtgaccttccagatcacctacgaataa

SEQ ID NO: 146776 - DNA, 441 bp, Enterobacter cloacae
atgctgggatgggtgattaccagtcatgatgacgatgcacaggagatgctggcgaagcttgaggcccgtttcgggccgctttcacagtgtcgggcggtaaactactggcgtggactgagcaccaatatgctcagccggatgatgtgcgacgcgctgcacgagaccgattccggcgatggtgtaattttcctgaccgataagtccggcgcggcgccgtatcgctctgccgcgctgatgagccacaaacatgaccgctgcgaggtcatatcgggtattagctttcccttacttgaacagatgtatccgcagcgcgacacgctcagcagcatggcgtttcgcgacgcgatcgttaatcgcgggggttccggggtgagtagcctctggcaccagcagcaaaaaaatccaccgtttatcctcatgcaggacgcgtataaaaattaa

SEQ ID NO: 146777 - DNA, 192 bp, Enterobacter cloacae
atgaaaaagattttagttgccactgccgttgcgctggccctctccgcgactgccgctaacgccgcctctaccgccgtactgaaagtgaccggtttactctccgttgccgcctgcaccccgcagacgcggcgggcggcaacgtttccgacaccacccagtcctacggcgtgggcaaaaccgcgggcggcgtga

SEQ ID NO: 146778 - DNA, 189 bp, Enterobacter cloacae; identical to SEQ ID NO: 120374

SEQ ID NO: 146779 - DNA, 351 bp, Enterobacter cloacae
atggcagctgaaacatatagctggcgctctcagctcggtgctggcgcgattgaatatagccaggcggtacgcgcagcgcagttcggtgatggctatgagcaggttgctgataacggtattaacagcacggctattcagatccctatgaagcacacaggcgcagaatcggaagtggacaggattcgtgatttcctccttgctcataccgtgaaggctttcatcattacgccgccaggtgaagaaaaggggctttaccgcgtcgtagccgattcggttcgtaaaacgcagatcagcagcaaatatgctgagttgacgttcaccatcaaacgggcttacggagtgtacgcataa

SEQ ID NO: 146780 - DNA, 570 bp, Enterobacter cloacae
atggatgagaaagtgatggcgttggccactctaaaggccgctcaggatgctgctagttgggcattttggtcaatgataggtacatgggttgctggaatagcgacctttttggcagtgtgtgtatctttacatctgggtctaaaaaagcctaaggcacatatcagttgccgtataaatgttggtgtaacgtggcaaggaccctatcaaaagaaaggggtgatgattgttattacaaatcttgcgctttataccgtaaaagttacagctataaattggacattcaaaaaagatattacgttttatcaaccgttccactcaccattatcaatgcagctgcctcaaaaattagattatggagaacaggcaactttatggatagatattgatggtggctctgaatggattgaaaaaatagcattgggtttaaaagaacaaaatgccaaccccaaagattttaaatgcgttgtcagtgttacaactggagaaagcttcacatttgaaatcgaaaaatctttgatggacaaaataacaagtagttaccaacagatctcagaggctgagagccgctaa

SEQ ID NO: 146781 - DNA, 135 bp, Enterobacter cloacae
atgtccacaaacttattaatttcatttgtaattgccatctcgccatcaatcaacgagatcgtcaaaacagtttacctgtcgaaaaggcttcaacttttagagcgctacggcattatcaagcccacccgcagatag

SEQ ID NO: 146782 - DNA, 243 bp, Enterobacter cloacae
atgaagaacttccagctttatgttggcggcactaacaacatcacctatcgttacgaaatcagaaaggtggatgatgcttttagtgttcgaatattcaacgtcataaacaaggtgcacaaagaggttggtagcaagtcgcttcgctttgtgtcagttcatgatgttattgatgagtgcacttcgcattacaggaggcaagctgaaggcctaagaggctttttgcgcgggctcaaaatgtggtga

SEQ ID NO: 146783 - DNA, 441 bp, Enterobacter cloacae
atggagtttaagaaaggagatgttgttacgtggtcaagccaggccgcgggaagctggaagacgaaaactggagtgattacggaagtgtgggaatacaaaaaacaaacgcgttacaccgtaaaagttgatccgaaggaagggtcgacggcgaaaccgaagttttactatgcgaccaacaacattcgccagctggcgccggcaatcatgtccgtattgccgctggagtaccgcaaccgcctggcgccgcagaacgacatgatgtcgctgatcgcatccgcgatgaaagagtgtgccgaagctaaacaggccgtgctgctggacgctccagagcatcagaagctgaaagaggtaagcgagggtatagcgtcgctgttccgcctcatgccggagcaggtaggccctctgatgacgatggttacgtcgatgctgggggttatgtga

SEQ ID NO: 146784 - DNA, 483 bp, Enterobacter cloacae
atgaaaaactcaattttgttatcgctactgctttgctcaacatctctatatgcccaagacatggtcttggttgatcaagcaaaaaccgccattatcgataacctcaagacccgagaagcaacaaacaagtgcgcagagtttatgggggtagctgcaactgatcaatcaaagcaaccttttgccttagctacctgtgataacacctttgtagttgcaaacggcctcacctttagtgacgtaaaagttgttgaatcagaaagtggaaaagcagtctgtggagtagtttctgggaaaacatacctcagcaaaattggcgcaaggttcgtatatgttgaaaaaaacaacgctgtgacaatcaaaccttctaagcagccggtaatgacaagctctgcggctggagaattcgggcgcaaccaagtaaaaattgaaaataaacaatatgatctggtatctaccgctcattgccagtctcctgcaaactaa

SEQ ID NO: 146785 - DNA, 267 bp, Enterobacter cloacae
atgaagcgtacaaatattttaatgattcttataactacgtcaaagaacgaacgtttcaagacagagctgaaaaataccttgagttctattttcctaagggtgcgcaagttcgtttttttcataaaaaacaaatcaaactttaaacaagaagttcatcccatcgccatttttaacgatttgattttatgctttctgcacgcaacttacctttttctttacgtcatgctcattcttttaagtgtaaagtctttagatattagactctga

SEQ ID NO: 146786 - DNA, 321 bp, Enterobacter cloacae
atgtttcggcatgatatacgggaaaaacctgtactatataaagagattctaaaagcgatctctaaaagagagcttttagaagatctatgtttttgcgcttgtcgcaaagatcattttgctggcggctcttcgccgtcactcaaggggaaatgtcctggtacgccgtttggtggcttcccggacacccacgttccgctcacgacgctacgcaagttacaccccctgtatggtgcaatggcgttagccaccgtgaaaacggttgcacatgatcacttcgccgtgggcgaataccattgcgctgtgcgctttgttaccatctga

SEQ ID NO: 146787 - DNA, 177 bp, Enterobacter cloacae; identical to SEQ ID NO: 34619

SEQ ID NO: 146788 - DNA, 834 bp, Enterobacter cloacae
atgactgacattataaacagtaaggtttttagttttaccaatacagaagacgctttcaacgaatgcacccggatcaccaatctgaaaacgggcgttacagtttcattatcaccaacaaacaaacagctatttgtaagaatacgccatcgttttcacaattttgtgaaaaagagaggtgggaagtattacgacaacattgatcagcttggtgagagtgtcggggtaaaatacgatgcagcaagcgacggaataaagaaacttaaagctgtggggctaatttcgggaactattaaaggcagatcctaccagtgggaaagcgttgcagatctaacgccagaagatttcctcttcgagcgtgatattaacgcgatgaaacgcaaaaccgcgcctgaatgggtggattgtctaaaacatccagtgtttggcaacgctaaagaagacgtagcgccagaggtgcaggaagaaaagcaacagtctgttccagaagccgatccgatgtgcgagtttgacgatatgccggaagaagaagcgccagcgccggaaaaagtggagccaacaccgaagccaaagcccacgaagaaaccaacgccaaagaaagcaccagccaatcagcaagccatttccccattcgagtttaagaaaccacgggacgagcgtttagatgggtggaactttgaaagattaaacgacacatcttatcggcaccagacgtttaatgactttgatctgccttatctcgttttattcgagagtcaggggaagctaacaaacccgaaagccatagaacatctgaaaatgaagagaaatctcttcgaaagaacagggcgcttgtag

SEQ ID NO: 146789 - DNA, 351 bp, Enterobacter cloacae
atgactcttaatactatggacaccgtgaacatcgtgaacatcgtgaacaccctaattaactatttccacgatatctggcatttaccagcattgcagcttgttaatagggcgtggcgcgagagaacgccctccgcgctcctggaagcgatacaatacactgaacaggcaatcaacgcgcttgaacactggaacgctgctgtagagcacctggtgcagatgaacggggataccgtcaccgtggatcaggcgtggcgaattgccaatgatatggaggagcttgccctcgctatggaacacatcaccgttgaactcggagagcttgccatccagatcgcggaagaatgctcataa

SEQ ID NO: 146790 - DNA, 672 bp, Enterobacter cloacae; identical to SEQ ID NO: 128414

SEQ ID NO: 146791 - DNA, 654 bp, Enterobacter cloacae
gtgacgccaacgaattccagcggctggcctgtaggggttccatcaggatattaccgaatctctgcaatggctgggcgtgatagcggaacagaatacactctattaatgttttctgattcagcgggtggggatctttattatgcgaatagtcgtgctggaaattttattggcagaaaggtgcttacaaacggtaataccaccgttgatagcaatggttttgttaaatcagcctcacctatagtgaaaatattccgtgatggaaaatttgaaaccaatgacgaatcagaaggctgtaccgtaactcgcatgaaagccggagagtatctgatcgagggctgcatgggtatgaattcagatgcggcgtggggtgggattgatggcgggttcgatatccctaaagatcgtaatgggcaggccctaatctggcttgactatgaggtaaatgccgacgggtcagtgctggtgaaaacattccaccgggaatacccgtcagcaccgatatttgcgagaaactcacgggaaggttttgtggatggcgaaccggccgattttccggccgatcagtttgtcagtgtccgtgtagagatgccgcaaaacagtatctggaatcagcgtgcagctaaggctgaagtttctgattcatcatctgattaa

SEQ ID NO: 146792 - DNA, 207 bp, Enterobacter cloacae
atgaagatggcgattaccgctggtaaagcgctggcaatcactctggcgaccctgttaaccggctgcggtctgacgcagaaagtgacggatgccaccgtcgccgtcacgaagtccattttttacagacaggtgaaaacccttcacctggatattcaggcgcgcgaagggggcatcgctggcaacggtggtgcgaatttaccagcttaa

SEQ ID NO: 146793 - DNA, 504 bp, Enterobacter cloacae
atggctaaaaaaaccgcaccactacttcctgatacgaaccagttgctgatcgattttggtgagcggctcaagctggcgcgcctgcgccgtaaactcaccgctaaacaggtcgcagagcgggcaggcatgtcgccaatgacgttgcgttctcttgaagcgggcggagcgggagtcaccataggcgcatacctgtccgttatgcaggttttgggacttgagagcgatttgaacaagcttgcggctgaggatgacctgggacgccagcttcaggactcccggttgataaggaaatcgtatagcgagcgattatcacaaagcccgagcaaagcttcccggcgagacgcgcagaccggaaccgctgttaagcccgacatgtgggataagcaggttgaaacaccggcaacactctctaccccgcaaaaaaaagcgcagaccaaaacgtcgggtacgacatcagcgtctctcgcggcacttctaaaaaccagaaaaaaacataacgggtaa

SEQ ID NO: 146794 - DNA, 1272 bp, Enterobacter cloacae
atgacaatgatcggcgtgtatgcagactgggaaggtttgaatggccccaaacggatcggattcctgcacagccgccgaacccgtgcacgcgaattatttgaatttgagtacgatgtacaagcccttgccgatccccagttgaatttcctgccgcttgatcccgaaataggattgtttgcgggtgctcagtacccaacgcctccgcgcgataaattcggtatgttcggtgactccagcccggaccgctggggacggatgttaatgaaacgacgtctggaacgggatatccgtgaagggatcagggctgaaggaacgcagctgtatgaatccgattatttgctgggcgtacacgatctttatcgggttggcgctttgcgttatcgactggaagacgaaggagaatttctcgataaccgaatcgacatagcagcaccgcctttcactgaaatcgctgcattagaaagagcaagtcgggcactggaagacgatcctgataaccgcgcacacatgggccaggaatggctaaggatgctgattgcgccaggcggttccctgggtggtgcccgcccaaaggccagcgttgcggatgacaatgggcatctttatatcgctaaattccccagcaccagagatgagtatgatgttggcggctgggagatggtcgttaatgcgcttgccgtcggttgcgggctcaacgtagctgccgccgaagcgcgtaaatttgccagcgatcatcactgtttcatggtgcgccgtttcgaccggaccgacgctggcctgcgtcttcattttgcttccgccatgacattaaccagacatcaggatggtgaggatgcctcaacaggcgtcagctatctggaacttgctgaagttcttataaggcacggcgcacaaacccaggctgacctgcgcgaactctggtcgcgtatcgtttttaatattctggtatcgaacactgacgatcacctgcgtaaccatggatttattctggtccccggtaaaggctggcgtctctccgaagcctacgatatgaatcctgtctccagagcagatgggctgaaattaaatattactgagtcggacaatgccctcgatctggaattagcacgggaagtatctgactatttccggcttaatctaaagcaagcggatgaaattattgccgacttccgtgaagttatcagtcaatggagaacaattgcacagcgtcttgccttgccatttcgcgagcaggagcacatggcggaagcattcaggttagccgacaggtaa

SEQ ID NO: 146795 - DNA, 282 bp, Enterobacter cloacae
atgtctacaaaaagcgcatggtctggcgccattgattcaacaaaagaacagggtataaataccggtctgaaggtcaacaaaggcgataagatcaccattatcgctacaggtctgataaaatatggcaaggaagatcacgcatgggcttacccgggcggcaatatcggtaaaggcggacaaaaaaaggatattgccatcctcaaggcacgttttagcgaatctggcaaaagctatgatatcggtaccggcgtatatcaactggctgcaccggaaagcgggtag

SEQ ID NO: 146796 - DNA, 297 bp, Enterobacter cloacae
atgtctgtagaaaatcaaaatgccgttacgggcgaaagtgttgtgctggaacgcccgcagacgggcggtgtttatgcttccctgtttgagaaaatcaatctcagcccggtttctgaactgagcgcactggatatctggcaggatgcgcaggccatgtctgatgcgagcgctgacgagcgtctgactgccggaatgcaggtgttcctggaatgcctgagtaaatcaggtgcaaaaattgagaagctggataagaccctgattgaccatcatattgccacgctggactacccggcctga

SEQ ID NO: 146797 - DNA, 2676 bp, Enterobacter cloacae
atggctgaatttatcacttggctggatattgaacgacaagttaaaagagaatttaagtttaaaaatgcattgaaaaatattaaagctatctattgttattcatcagggatggaagtcgagtatatcaatgataaagaattagctatttctgatttaaagaaaatttttaatgactcgctcacccataaagatgatgttttatttttatctctggaaataggtggcccggaatatttcattgaattaattcctactgttgggttgaagaaagataataatgttgtatacccattgtggcgtgagcatgtatatgttgatcaggtagtagaattcaaacaacctgaacaatgggtagatggacctaaattttgtgcatttcattcgtttaagggaggggtcgggcgtactacttctttaatgacttatgctagcgcagcattagaagatgatcatataaagaaaatattattaattgatggagatcttgaagctccaggtctaactttatggcttgatgctgaaaatttggggagagtaacgtatacaaattttttagaggcgatccaatattccgatggaaaatttgatgcaacattagatttctttgcaaaagagttaagaaaaagctctattagtattgatggtaattctaaagagatttttgttctcccctctgcattatctttagaaagtataatggatatgcctgtaactccagatcatatttctaaaaatattgataatccatatatactaagcgatttattacggcttttaggtaataagctagaagtggatgttatactaattgacttacgtgctggtttaagtgagctttctagtcctttgatttttgatcctagagttgagcacttttttgtatcaactattgctaagcagtcggttgtcggtattggtgaagtattgaagaagattcacaattcagttaataatacttatcgtaacgtgagtgataaaccaacagtaataataagtatgctcacaaaactgctccgagaatctgcaagttacacagaggcaattcagattgtgaatgaggcgtatcctaccatcgaagatgaagatatgatctctcagtcaatcgagttattagagtttgattttgatgagaatttaatgagtgtttctaatataagagacgctcttaccttattgagaaaatcaagcatatatgaaaatgctaaggattggattgccgacgttaaattgaatgagtcttcagaaaacaatgaagtttctcaaggtgacgatagtggattgaaacgattatatgatacatgtcaatccttccagtttgctgagaataccagcgaagatgacatgttggtcatcgatcctattcgtaatcttgcaaaaaactatgccgactcattaccaaatgttgtttcaataggagcaaagggagctggtaaaacatttacatatttacaagtatgcaaatcaaaaacttggagtaatttcatatttaaagttaataataatgtcaagtctgatgttcatgcgaatatattcccatggatttcctctactaaccttaacgagaaagttagggagcaagtagcagatgagcgtgagaaatgcttgactgaaatttcagctcaatcaccacgtagcttatccttaaatgtaaaaaaaataactgatgcattgtcagccgataccactaattgggatgagttttggcaagatttattagtttctgaaatagtaggggattacaaaaatttaaaagatttgaatgatcatcttatcagtgtggataaatctattgttttattggttgatggtatagaagatatcctttttgcgccagaaaaagatgcaaatcataattctgcaattagatctctattgaatttgccaaatgccatttcagatttgccgaatagaagaatagggttggtatgctttgtgagggctgactatgttcaatctgcgattaaacaaaacgtcaaccagtatattgctaagtatcaacagttcagacttgagtggacccctgagtcttttttacgattagcttattggataagcgcgaaagccgaagttatagatgctaatgaactggatgcggaatcgagtagtcttaattttctgctaactaaccttgagcgtttatggggcaaaaaattaggtcgagataattccaaagaggccagttctgcgagatgggtttttgcagctctttgcgatttaaacggccgtcttcaagctcgagatcttgttagattcttgaagttttcagctgataatatgctaaaggcaccttcaaatggaataaaagtagagttttggttagatcgacttttagcaccggaggctattagacgctcattgaattcttgcagtcaagaaaaggtagatgaagctgagaaggaaattaaacctttagaacagtggataagcattttaaaaactgtatcgccagatttgaaaaaagttcctttcaacccgcaagaggtcggattggacttgtctcttttaacctctctaaaagaactaggtgttatttatgaagatacagaccaaccaaatgaagagcgcttttatttacctgagatttaccgaactggcttgcaattttcatcggctgtaggtggcagaccgcgagttcaggcactactcaaacgtaatctaggtggtataccgttctaa

SEQ ID NO: 146798 - DNA, 189 bp, Enterobacter cloacae
atgaaagagggatattattggataagacacaatgactgtgtccagattgcttactattcacatggtcaaaccgaagacatgctgactggtaagattgtcagtggagtctggcaccttacacatggcttcgatctttgccataacggtgaagccgtcgttctgaaaggtccaataccaccacctctctga

SEQ ID NO: 146799 - DNA, 174 bp, Enterobacter cloacae
atgttggaggtggcaacagaagacaacatatcttccttatctgaggatgaccgctctcatgtcgagcctcttttaatgcagatcgcagaaaaactgacggcgagaattgagaacgagacatccagcctcagaaaagttctgtctatgctttccgctattaaaaaacccacctga

SEQ ID NO: 146800 - DNA, 246 bp, Enterobacter cloacae
atggcgtattcatcaagaattgtacaaaaagcatctgacatatcagacggcaaggacagccttaagccgggggtgcgcataacattctcctttgatagttggtctgaacggctttgttgtttgcgcttctttcttctctccgccattgcagctttgctgaacaaagagctggaacaaatcttctatgatgaagattttgaaaagatcaccaaagtaccgcaaaaaagagaacgccaggaagcctga

SEQ ID NO: 146801 - DNA, 225 bp, Enterobacter cloacae
atgaaggagatagtgattgaacttatcaactcaggaccattctgggcggcttttagcgcctgcttcatcgcttatctaaaccgaaacagaggcaagaaagcgaccattgaaaaggacgggaagaagatatcgcttgataacatcacccaccacgaattgactgaaatccttgaggacgccaaaacaatcgtattcagcgagagcgacgacaaaaagcccacctga

SEQ ID NO: 146802 - DNA, 207 bp, Enterobacter cloacae
atgacaccatccctgctttcactgttgcgaagcggaaaacacagcattcgcgacatggcaaagattttaggcatttcaaggtctcgcgtttcatggttcatcgccgagcttgagcggcgtaaatggatagaagtcaacaggtgcgcgatatggtttcacgatggcacccgttcaaataagcagaacgtatacagggtaaaactatga

SEQ ID NO: 146803 - DNA, 2457 bp, Enterobacter cloacae; identical to SEQ ID NO: 105688

SEQ ID NO: 146804 - DNA, 2682 bp, Enterobacter cloacae
atggaagctatcaataattacaatagcggtttaaatcgccatcaattaggtgggtttatccctgtttacgatcaattagcagggactcactattttttgattgatggcaacagattagggtttatgtttatctgtaatccatcccctggagtttttgataatcagcaagatgttcttgctgaaatgttcaaaatggatttccctacagatactgtctgtcaaatatctctgactgcattgccagacctgactttacagcttagtgcttggtcagctgtgcgaggtgggcgtatgactgggaacgataagcttaaagcagatctgcttaatggttatcagttggactactacgacagaagtatgcataagcctttaaaacctgatcatgataaccttatgttgagggattttcaggtatggatctcgctatcgattcctttacagtctgcccttcctaccgagctggaacattcgcgtatcgattcactttactctgaacttgtaagtaagttaattacgattggattgcatccgtttaaggtcgatgcagaaaactggctctattgtatagataaggtcgtaaaccccggaaagaactcccggtgggctgaaggtttcatagacgttaacactatgaaaaggcttaatgaacaagttaacgttcccggccgtaagtatacagtcacagaaaatcatttctcatcagtcacacaaagtgacgacgaatctgagcatcgttacttcaaacaactttccgttgtaaagtttcctgaatacgtcaatttcggttgtatgtatgagttagtagttaactggatgcatggacgtaagacaattttcagcccatttatgatcactcagactgttcagtttgccgatccgctcaagttgtcaaaagaaaacgtccgctacaaagcaatcactaataaacaggcaagtataccttcagttgtcacattctgccctcgcctgcgggatatggataatgactacatggccgtaactcgcgagcttgaggatggcgcaaagcttttaagagggtatcttactttcactgttatgggtagtaatgccaattctgtgcagacagcagctaacgatctcaaatccttttacctcgaaagccgggtcaaagtagcagatgattcctttatcgttttcccgtcatttatgtcatgtctgccaatgtgcaatgacccaaagacaattttcgaccttgaccgttccgaagtagtgagcaacaccggagcggctcatatgacaccgatctttgggccctggaaaggtaatacagatagaccagtactgagtttagtttctcgtgaaggtcaactcatgggacttgatattttcaagacttctgcaagctataacatggttattggtgcaacgtcaggtgcagggaagtcattctggacagcatatctaatcaataactatcttggagctggaccgcgatctaataacctcgttcattatcactcaacatttaagcattttttagaaaacgaatacccagatgatgatcctgacggtgctcaagtatttgttgtggacgtgggccgttcttaccaggggattgcggaacaatatacaaacagtcaatttattgatttcggtaaaacccctgacttcaccctaaatccctttgccttcctaactgacatcactgttaacgacgatgtatttaacgaagcacctgaatttaccggtgaatcaacttcaaacgatgcagaaaaagacaaagttgctcagaccataatggttttgaatcagctaaaaattatggcttcagagaaaggccttatcgatgattatcaacaatcagtgatgcttcagcttattgcagaagagtaccaagaatccagaaaatcaggtcggaccggttcaataaccggctttgctctgcgttgcaagaagcatgaagacaaacgtataaaggatattggggagcaactcggagcatggtgcgaaggtggaatttatgggcaccggtttaccgatacgttgcctccaatcaacttcgacagcagatttattgttttggaactggaggagctaaaaggcaccccccaccttcagacagttgtattaatgtctatcattcaggctgctcagcatgcaatgttcatcaaaaaagatgggcgtcgtcgcttgttcatccttgatgaagcatgggagtacattcgtcctgataattcatcaggtgccggaaatcaatcaaaccaattcttctcttccttcctcgaagcggcatggcgtaggttcaggaaaacaaactgcgctggcatctgtatcacacagtcgtttgaagattattttacttcttctgttggccgggccctgactgctaactcgccttggaagataatcatgaaacaagaaaaagaaagcattgaagcaatgaaggctaataaatatttttctacttcagatgcagaatatgaacgtatgaaaaatattcgtacagtcaaaaaggtgttttcagagatgttagtcaggttcgaaaacttccaagagatctgtcggttatacgtagaccggaaaatggagctttgttttactacggatagtgctgacaggagtaaattatgggaaattcaaagccgcgagaattgtagctatggcgaggcaatagaaattctctatgctcaagaagtagcagcgggtttggccgcgtag

SEQ ID NO: 146805 - DNA, 633 bp, Enterobacter cloacae; identical to SEQ ID NO: 52831

SEQ ID NO: 146806 - DNA, 537 bp, Enterobacter cloacae
atggcaaaaagtcctttcttacttagcatcagccaagatatgcggcaaaaaggctattcgttgcgtaccgagaaaacttacattcactggattaagcggtttattttgtttcatggtaagcgtcatcctctagagatggctggtgaagaagttaggctttttctttcacatttagcgaatgcggaaaacgtctctataaacactcaaaaaactgctcttaatgcgctcgcttttttatataaccaatttttaaataagccattgggtgagcttgattttgtgccagcatccaagccaaggcatttgccgacagttttatcgactgccgaagtacaggctatttttaataatacggaattaccgcgaaataaagtgattttttctttgctctatggtgcaggcttgcgtatcaccgaatgtttacggctacgggttaaggatattgattttaacttaggctgtattcaggtgcaggatggaaagggtaataaacaaagaacgactttattgccgtccaaactgacatcatctgcatga

SEQ ID NO: 146807 - DNA, 267 bp, Enterobacter cloacae
atgggcaaactccaccacgccatgatgggaaccgcctccgtggccatcgccaccgctgccgccatccccggcaccctggtcaacctcgccgcaggcggcggcgaacgcagcagcgtaacctttggtcacgcttcaggcacattaaaagtaggcgcagaagccaagctagttgatggccaatggcaagccaccaaagccgtaatgagccgcagcgcaagaagaataatgcaaggcgaagtgctagtgccgcaggagcagattgtttaa

SEQ ID NO: 146808 - DNA, 915 bp, Enterobacter cloacae
atgcttttatataaaatgtgtgacaatcaaaattatggggttacttacatgaagtttttattggtattttcgcttttaataccatccgtggtttttgcaagtagttcaaagtttcagcaagttgaacaagacgttaaggcaattgaagtttctctttctgctcgtataggtgtttccgttcttgatactcaaaatggagaatattgggattacaatggcaatcagcgcttcccgttaacaagtacttttaaaacaatagcttgcgctaaattactatatgatgctgagcaaggaaaagttaatcccaatagtacagtcgagattaagaaagcagatcttgtgacctattcccctgtaatagaaaagcaagtagggcaggcaatcacactcgatgatgcgtgcttcgcaactatgactacaagtgataatactgcggcaaatatcatcctaagtgctgtaggtggccccaaaggcgttactgattttttaagacaaattggggacaaagagactcgtctagaccgtattgagcctgatttaaatgaaggtaagctcggtgatttgagggatacgacaactcctaaggcaatagccagtactttgaataaatttttatttggttccgcgctatctgaaatgaaccagaaaaaattagagtcttggatggtgaacaatcaagtcactggtaatttactacgttcagtattgccggcgggatggaacattgcggatcgctcaggtgctggcggatttggtgctcggagtattacagcagttgtgtggagtgagcatcaagccccaattattgtgagcatctatctagctcaaacacaggcttcaatggcagagcgaaatgatgcgattgttaaaattggtcgttcaatttttgacgtttatacatcacagtcgcgctga

SEQ ID NO: 146809 - DNA, 2085 bp, Enterobacter cloacae; identical to SEQ ID NO: 105639

SEQ ID NO: 146810 - DNA, 3549 bp, Enterobacter cloacae
  misc_feature (3533)..(3542): n is a, c, g, or t
atgagaaaatcaggtttaggtttagccctgttgttttctttaattgctccgattaaagcggtctatgctgaagcgattatgatttcaggaaagctacaggctgatttgccagccgtatcctttgacccggggccgggcgactttgttgcatacgttaattctaacactatcactgcctcaggtgcaggcacagcctgtaatgtaacggttgatgatcgagcgacttcctctgttgataacctcgtttgtttttttgagtggttacccaataccttgggattaacttctaacggcttcactctttcaggcgttcccaacaccaccggtgatttaaaactaccttacaagatttcttacttctctggttctgaacggaaaaaagttgaaatagtaaaaggtgaatattcaatcaaaagtgtggcaccggtaaaaccaactatcaccggtcttaaatcatccctgaacggattagtctatgacggcttttctttcaaatcgtatttaaaggatgaagcgatcaaagatatcgctgtttctgttgaaccccgcaattatattcaatacatctcaataggttcaggctccgcctgtgaagtacctattggcggaacttcctgtaccattgaagttggaagcattaaggccagtgatacagatgaacttttgggttcacgtgatatcacaattacagcaaactctaagaataattatttcgcacctcctgaatccaaaaagcttgttgttaactgggattatcggcctcctgtagtagaccatacactttggaattttaccgatgaggctaaaacaatcaaagtaggtggccaggacatctataccggagccaaaaccgttgctgtggccgttaaggtaccccagcaagaaacagaaggtgaatggtggctcccaacagctatgtcgctcactatgactccggatggcgtgtttaagccgacgactaaagtgactttagatgatggcactgagattgatttcaaacagtcctgggcaacccctttacgtagaactttacagccggtaagtggacctcaaaaagtcggtgatgagtacctctatatctttgacttaacggatcttataaacgggtcctacgcagcgacttttacagtagaaaatacgagcaaaaactcttctacgtacactgagcctgaaagcaaactgatgctgtctgataacccaacgcttatggttctcaaagatgggcaggtattaactaaacgagcacccgtatacttcctgaacgagattatcgttgcagctttccaggggcaggctggggttgctgacataaaatcagtaacaatagacaacaaagtagtttcgttaacacctacaaattataaaggtatttactacctgccggttggagacgatttagcagttaattcggatcacgagattactgtggtggctgaaaacctttatggaaaaaacgtaaatttcagtaccgtgttcacttatcaacctactggattcactcttaagaatctggaaaaaaacgtaactctttactcgcgcgtacgtcagtatacggacctgcttagtcaaacagctggtgataaatgcactctgtttaccacagaggaaaatgcgaatgcttacctcgcctggtatggggaaaaatcagatgttacagcatgctaccctcagtggaacaatgtccctgatgggttggagttctattttaaaggacgtaccccgggtctaactggattctttaataaaacaggtgagaatctgctcgactatcaagtctatatgattaacgggaagggctctaaagcggtttccgcaaggaatcgccgtactctgaccacacaattaccatacaacccgatcatctcttacaaaaagaataaagtcatagcaggcatcaatccgaacactgctctggcttatacgaccgggggggaggccgctcgaatattagcgaaggtggtaccagctgacgttacgatgatcgtctctcaaaacggctctgaggctgtcaaaacgtcatttaaaaatcgttcctcaaacaacgatgcaacgacctttgtacaaagggtcaaggttgctgctgcaccattgtggacaaagaacgtctttgacatagctgtagaatactcaaaggatccagaattaagaactacagacaccctcaacgtatatacggtgcctgatttcaatattcgagcatcgatggaagtggatgacaaaaaaacagccacatctcttgaagtgcccttaaaggtaacagtggggcgttataacaactccacacgtaaaagtgcatttgaccgtaaaacaatgggagaatgggacgtcacgatatactctcaaaaaagtgtatacggcaaagatccagaaacaggccgttataaaactacatacgaaagaactgcgctgactgaagcattgccggtcaatgatgcgggcattgtcgaaaccaagattaaaattgaaaatatggatctgggtaatatgcgtctggttggtgtggctaaggtcagatcgccattctctgattttgaaatgaaacgtgagaccagtgctgtaggcattcgaatctataaaggtgaggaactggagggtaacctgtcgaaaagccttattatcggaaggatcccacttagtactctggtaagcttcaaatctgccagtacggctaactctgatgcactcgcccccaccgaatggcagcagtcctctgataatggtcaaacctggaccatgctttccgacatgaccggaaagagaagtgtaagtatcaaaaagacagaagtaggaaagtggctttatagggcaaaaatgactaataaattcacatccaagatttcctacacagatgccttaacggtagttacctacaagcagcctaagctcagtatagatgttacagacattcttcagggctcagatatacctgtaaccctgcttgataacgatgaacctataccagcaggcaccgctgaggttctctggtcagaggataaagtcaactgggtgcagggagatacaacttacactgtggcttcagctgataccctaccgtctacgatttatgcccggatgcgttaccttgattccgatgaactggcagaggagtcttcatggaaggaaacgtctgctcggttggcagccgcaaaacccaagcgcctttctgtctcggtaacgggggtttcaaaggtagaggttggtcaaaaagttactttggaaggtaagttcacgaaccctaacagtaagtaccagaatggtaataacgtagttgaagaatggaaaacaccggatggccagacatttaagggctcttcactgtctgttacccttactgagcaaatgttggataaacagggatatgctgcttttgaatacagtgcatggttagcggacaataaggagaatacggtttctacccgtagagtttctgtcaaatcgtgggtttataaatttcccgagatgaaaataagctccaaacttaaatacgacatggcaccgaccaccctacgcgttgcgttgagcggtattaaggnnnnnnnnnngtattaa

SEQ ID NO: 146811 - DNA, 1353 bp, Enterobacter cloacae
atggactttacggaatatcaagaagaaataatcgaagatgttaaatcttgccttgaaaacttacaagtccaacccattttattcatgggtgcaggtatttcacaacgatatataaaagcgcctgactgggaaggtctattaaagcaactagcggaaatatgccccttgatcaaacgcccttatggttactacagccaaacaaagggtgataacaagcctttgattgctagcgatttttgtgacttctatgctgaatgggcttgggatgatggcaaggatcgctatccagagacatactttgaaggaacgactccaaaagatatttatattaagcatgaaattgcatccattctgaatgaattatcaaactccgttgatttctcgaacatggaatatacagaggaagttcagaaattaaggaaagtaaaacctcatgcaataatcacaacaaattatgacgacacattagaaaaaatatttgacaattatcaggcaatagttggtcataacgttgttaaagtgaattattcatcttatggcgaaatcatgaaaattcatggtagcagtcatgaagttgaaagtattgttattacaaatgaagattatgttgatttctataaacgtaagaaatatatcagtgctaagttgctaacatattttgctgaacaccccttgtttttctttgggtacagtatcaatgatgaaaacataaaggcaattctctctgatatagatgaaatcatcgctcccaataatgcattgattccaaatatttatcttgtctccttcagtaaggactgcgaggccactggttctcatcaaaaggaattgctaatcggtgttggtgagaataaaagcgttcgaatcaaggtgatatacgcaaataattttggttggatttttgatgcgttatcatctaatacaccggaaattagcgttaatccaaaacttgtgcgtgcatttctagccagaacgtacacattcgcatcagaatcccttgttaaacaagaacttccatacgattttgagatgttccgcaatattgcagagcatgatgatgcattagcaaaaatgtatggtatcgctgaactcaataatgggcaggcactaaatgctagttttccatatacaatgtctgatctggcaaggattctcgacatgggatcgtggcactatgttaatcaagaattcgaaaaattaagaaaactaaccgactttaacattaaagcatcagacaacaattatcatgttttcattaaatctgggaaaagtggtgtcggaaaatactcatctgaggcacttgacttattgcgaaaattaataaacggggaacagtttgagttaaacccataa

SEQ ID NO: 146812 - DNA, 144 bp, Enterobacter cloacae
atgtcctgcagaggcagccgctcgaagccactcgccgaactggagttcgcgtcgtgcggggttgcgccaggggacaacctcttcccgcgcaacaaccgttacctccagagcgcggagagacttgctttcagcgggtggagctga

SEQ ID NO: 146813 - DNA, 318 bp, Enterobacter cloacae
ttgcgagtgttggccgaaaccaccgacctgtggcactcacctcaggactgggaaggcgatgaacggaacgtggtacttacgttggcccgcatttggtacagcgcagccacacgaacgattgcacccaaggacgccgcggcccgttgggcattggagcggttgccgagtgagcataagtccgttcttcaggaagcctgcaacgcatacctggggtacaaggcagaagatcttgcatctcggccggtcgaggtcgccaagttcattcgcttcgtgaaagaccgcaccaacgatctgctcgcatccaagaatgacgcctaa

SEQ ID NO: 146814 - DNA, 195 bp, Enterobacter cloacae
gtggtgactaaacaacaaagaacggcactgaatatggcgaaattcattcatgtgcaatccctgcttttgctggagaagctcaatgaactggatctcgatactgaagccgacctgtgcgaaaaactgcacgaggatgcggaacagctctttcgcactctggctattcgtctggatgattttcaagaggatttgtaa

SEQ ID NO: 146815 - DNA, 432 bp, Enterobacter cloacae
atggcccgcgtatccattagcgaagcggcacgtcttgttagtgtcagtcgcccgaccatttacaagctacttaagtctggcgaactaagttacacctcagttgtaaagcatggaaaaccggttaaaaccattgacactgctgagcttattcgtgtttttggtgaacttgaggttgtaagcgttggtaaaagtgatgctgtaaaatttgacgacgtgtctacgtctgttaacagtgattttttacagtctttacagcatcagttgacgcttttacagacggagaatgctgggcttaaagatgcggtgaatgcacgggatgagcatatcagttcgcttcgtcaggccatgcaacttcttgagcataaacagagcgctcctgacccgcagagtgttcctgctaagtcctggtggcaattctggaaatcccattga

SEQ ID NO: 146816 - DNA, 300 bp, Enterobacter cloacae
atgaccatcacgcgcagcttctcggtcgggatcgaatcccccgcagatacagacaccgcttgggggatttacgtcccggcgttcgacggcacagggtatggctgcgtgtcagcagccgacacacaggaaggcgctgaagctgcggcacgcgaagctatccttgccatgaccacgtatatgcaggctgccggggaagatccgcaggcactacgggatgccggcacagcaacatatcaggctaacccggattaccggcactgtgaccagtggctgataatcgacgctgaattaccggagtga

SEQ ID NO: 146817 - DNA, 678 bp, Enterobacter cloacae
ttgaataacaacgaaaaaaaaataaaacgcaatcagataccagtaatactggcaagcagatggggttacagcattcttgaggaagctggatggacgaccatccctaatttactacttgaaaagcagatggttcttgacttaagcaacacagaaatgttgttactcattcacctaatctcgtttattcactttgcagatactcctgcattcccaagcatttccacactggccgctaggatcaaccagcatccaagaacagtgcaacggaccataaacaaattaatatctaaagggtttctaaaacggaagattcgcgctaaatcagttaatgataaaggtttgagcaatctctacagcgtagagcctttaatagaaaagctatttaaatcaatagataataaatctgaagaccatgtcagctctaatgatcaacagggagtcggagaaatgaaaacaatagaccagcttgtacggattgcagcagctggaggcggcttacgcataaatgcctcaacaaagacggtagaccagctagtgcggattgcagcagcagcaggtaactcaatgaatccaaacaaagcacaactagtgctttttgatctggaatcaaaatctacagaccaacttgttcggatcgctgctgccggaaaaggaacggtactgtttgaattggaatga

SEQ ID NO: 146818 - DNA, 231 bp, Enterobacter cloacae
atgactacggctatcggtaaatggggtaatggcgctgctttgcgtatcccgcagccgttcatgaagcagcttgggctcagtattggtgatgctgttaatttctgcgtcaccgaaagaaatttagtaatcactaaagctggcccgacgcttgaagaactgctcggacagtgcactgcagaaaatcgccatcacgaatatttttgtgactctcaaggtaaggagatgctgtga

SEQ ID NO: 146819 - DNA, 1434 bp, Enterobacter cloacae
atgacagagaaaaaagcacgcagtatggccggattgccgtggattgcagccatggcgttctttatgcaggcacttgatgccactatcctcaataccgcccttcccgccatagcccaaagccttaaccgctccccgctggcgatgcaatccgccatcatcagctacaccctgacggtggcgatgcttattccggtcagcggctggctggccgatcgtttcggcacgcgtaaagtattcatgctggcggtgacgttgttcaccctcggttctctggcttgcgccctctccacctctctgatggaactggttatcttccgcgttctacaggggataggcggcgcgatgatgatgcccgtcgcgcgtctggcgttattgcgcgcctatccgcgcagcgaactgctcccggtgctcaactttgtgactatgccggggctggtcggcccgatacttggcccggttctcggcggcgtcctggtgacctgggcaagctggcactggatcttcctgattaatattccgattggtgtggcagggctgatttatgctcgcaaatatatgccgaacttcaccacgccaagacgcagcttcgatatgggcggcttctttctgtttggcctgagcctggtcctgttctccagcgggatggagctgtttggcgagaaaatcgtagcgacgtggctggcgctggccgtcatcctcagcggtattctgctgttccttctatatatacgtcatgcgcgtcgccatccgacaccgcttatctctttatctctgtttaacacccgaacgttctccgtcgggattgcgggcaacattgcctcacgtctgggcacgggctgcgtaccgttcctgatgccgctgatgctccaggtcggtttcggctatccggccctgattgctggctgcatgatggcgcccacggcgatgggctcgattctggcaaaatcgacggtcacgcaggtgctgcgctggtttggctatcgtaagacgctggttggcgtgacgatctttatcggattgatgattgcgcagttctctctgcaatctgcggcgttaccaatctggatgctgatcctgccgctgtttgtgctgggtatggccatgtcgacgcagtttacgtcgatgaacaccatcacccttgcggacctcaccgacgagaatgccagcagcggcaacagcgtactggcggtcactcaacagctgtcgatcagcctcggggttgccgtgagcgcggcggtactgcggttttatgaagggtttgacggtacaaataccgttgagcagttccactatacctttatcaccatgggcgcgcttaccgtggtatcggcggtggtctttatgttgttaaaaccaaaagacggccggaacctgattaaagagcgtcacaaagagaaggctaaaccgaaccgcgttccatcagaacaggagtaa

SEQ ID NO: 146820 - DNA, 513 bp, Enterobacter cloacae
atgcagctggagtcaccggttgaaagcgtgctggccgctgcgaaaattgcgcatgaaaatcatacctctgtcgtacttaacccggcacctgcccgtgtattatcagacgagctgctggcgctggtggatattatcaccccgaacgaaaccgaagcggaaaagctgacgggtatccgtgtcgaaaatgatgacgatgcagcgcgtgccgcgcttgcgctgcatgataaaggcatcggcaccgtgatcatcaccctcggcagccgtggggtgtgggctagcgtcaatggcgaaggtcgtcgcgtgccgggctttaaggtcaaagccattgataccatcgccgcaggagacaccttcaacggtgcgctggtaacggcgctgctggaaggaaaagcaatggatgaagcgatccgcttcgcgcatgccgccgctgcgatcgcggtgacgcgtaaaggcgctcagccttctgttccatggcgtaaagagattgatgaattcttaagtcagcaggggtaa

SEQ ID NO: 146821 - DNA, 603 bp, Enterobacter cloacae
atggttgcaaaatctcgtaacgttaatagtgaaaaaacagttatatgtggtactcgctacggtaatgtgatggcttcccgcggttctgttattcctttattcgttgatttgattaaagcaggtaaagcgctgacgattactgacccaaatatgacccgttttatgatgacgcttgaagatgctgtcgatctggttctatatgcctttgagcatggtaatagtggcgatatttttgttcagaaagcgccagcagccacgatcgaaacattagccattgccctgaaagagttactcaacgttgaacaacaccctgtcaatgttattggtacgcgtcatggtgaaaagctttatgaagcgctgctaagccgtgaagaaatgattgcggctattgatatgggtgattactaccgtgttccacctgacctgcgcgatcttaactatggaaaatatgtagaacaaggtgatagccgtatctctgctgtagaggattataactcgcacaatacgcagagactggatgttgaagggatgaaaacacttcttcttaaattaccttttattcgcgccctgcgcgcgggtgaacaatacgatctggacgcctga

SEQ ID NO: 146822 - DNA, 369 bp, Enterobacter cloacae
atgcagaaggagatcctgaacacgatgcatgaaaaatttataactgatgttgaacttggacggggtaaaaagcttctctcgcgtcatgatgccgatgctgtttctctctattcaggccgtgtatggccaacacctcaggcagttaagtacggcctggtggatggagatcttacgtcagtagagatccgtacacgtctttcaaaaatgtactccactgacacgttcaaaaactacaatgagcctcatcgtaatctccgttctgcactcggcatgctgatgagcctgtcttcaaatattgagagccttaccggtaccactacccgcttggtagaatctgttaatgccaccagctacccctctgtgaggtaa

SEQ ID NO: 146823 - DNA, 1002 bp, Enterobacter cloacae
  misc_feature (147)..(156): n is a, c, g, or t
atgcagaccaatttgttgttagatgattcgcaaatgaacaaattgagtaatgaagaaagccagaaagtatataaagaaatggttaagcaaaaccgacttgaccaaaatgcggcgaaagaggaccgcgaaaaagcagaaaaagcccannnnnnnnnngttgcaagtttaacttctcaacttcagcagctgtctcagcaaattaatgatatgcagacaaatcgaaacggcaatcgtaacttggatgctggtagttcgcgtaaaacgattaatgagcaggcaccggcagctccttatcagcttaatgctaatgcgccgattaatggcgtaaaccctaattacgcttctatcacacctacgcgtaatagcccaatgagaacaatcacacaaagttccattaagactaatggtaccgatggtgtcattcaggttatgcccgtgtctgaaaacagaatcaaggaaggcagagaggtcattgcaggagataaagcgccaactcggactgtacgaggtgatggtactgcgccagttgatagcaaagcgcggcatgctgcccgaaaagatgaaatgtttcttccggcaacatctattatcactggtgttctgattaccgggcttgaagcgcctacaagcctttcttccaaatcagaaccaatgccagtaacgatgcgtattaaaaaagatgtcatcatgcccaataatttcaccatggatttgcgtgactgtaaccttctgggttcagctgttggtgatctggcgttacagcgtgcttacatacgtgccacttctatctcttgtgttaattcaaaagggaaagcttttgacgtaaaactggaagcatatgctgtaagtgaaaatgacggaaaaaatgggatccgaggcacgcttatcagccgaaatggtaacgcaattgcaggagctgcatttgccggtggactttcttcacttgccggtagcttaagtcccagtaagggagtatcggccatcggtcgttactgccattag

SEQ ID NO: 146824 - DNA, 150 bp, Enterobacter cloacae
atgaaagagcgcattttgcccatgtccgttgatatggtgtatattaattccataactgagcaggcaatccatggcttccagggttctgcaggcaaaaatggcattgttgccgttactgttaacagcattaatgtcatagcctatttttaa

SEQ ID NO: 146825 - DNA, 228 bp, Enterobacter cloacae
atggccgctgaaagtttgtcaaaaatgcatgtctccaatatagtttttcccttcaaggaaagtgaatttgagattatcaaaacgtttgatcaaagcgttgaggaatctctatcgaaattcactctcggaagggttaatcgcatcagtatcgtcttcaataatgttatcacccgtgggattgccaccggtgggttcattatttccctcgttatcttcagcaagttctga

SEQ ID NO: 146826 - DNA, 258 bp, Enterobacter cloacae
atggtgctatttgcctgctttatcaccttcaaaatgatgggcaaagattatgatgctgtcgtgatcagcgcgggtcactgtggctttggtatgggagcaacaccaacagcaattgcgaatatgcaaacagtcacaaaagcatttggaccatcacataaagctttccttgtcgttcctatggtcggtgcctttattgttgatatttcaaacagtatcttaattaaaatatttattgaaattggtacatactttacctaa

SEQ ID NO: 146827 - DNA, 171 bp, Enterobacter cloacae
atgacagatgtaattaacggaaagaataggaaacggcgcgccagtctcaaagtggttttacccatctttactcagcacgttagcgctgaaggtggtcatttcttctgcaaaagcatgtgtaaccagtatgaacggcggtttaaaagtatttaccagatcaacctcttatag

SEQ ID NO: 146828 - DNA, 633 bp, Enterobacter cloacae; identical to SEQ ID NO: 132486

SEQ ID NO: 146829 - DNA, 360 bp, Enterobacter cloacae; identical to SEQ ID NO: 132507

SEQ ID NO: 146830 - DNA, 831 bp, Enterobacter cloacae
atgcagctagattcaacagtagcaattcgcttaggttacgttagggataatagaggaaatttattaaatcctgcggattatagtaaggcttcaagtgttgatcttactattggagagattcttaaaaaggacaataatgaaaatattgttcagggggtaggtgcaaaacttaaacctcaagagtcattagtgattatttccgatgagataatccatgttccacccgatcatgttgcatatgttttcttaaaaaacaggttaagtcaaaaaggacttttagctttaaatactggtattatagatgcgaactatgtagggcctatatcaacagtggtaataaatttttcgaacgtagatgcagttattccttcaggaagaacaaaagaacaaaaagagtttttcagagttgtttttcataaattagattcagcactgcctggttctcaggttctgcaagccgtaggtaattatagcgatcaggattataatgattataaaaataataaattaaatgatttaaagaatttccctaaaacatttttagaaccaaaggttttaaaacaacagattcaagacgagatatatagtaaggtttcagaattttctatggttaaagtaggctttacaattgcgctacttggtttgttttttactttcttacccatggtaaaagattggatatttgcttggcaatatgatttcaaagatggcctgattacacagaaaaaaaatgagtataaaattgaaagtcttgaaaatgatgtcgaaaaactaaaagaacagatacgaaccttagagcttaagcctgataataggaataagggcagatag

SEQ ID NO: 146831 - DNA, 186 bp, Enterobacter cloacae
atggataagtacgtgctggaaaataatctgttccgggtaatcaaagaagccagagtacctagtgatgtgctatctataccattactcacaattcgggcttcagaaaataataataaccgccgtaccggtaactatgagcaagatgagctggtgaggctgttcaaggagatgaactactatgagtga

SEQ ID NO: 146832 - DNA, 444 bp, Enterobacter cloacae
atgcgctttggtacgatagcaaacaacttggtattcaattacctggactacttactctggtgtcgtgacagacataaagctgaggtagtcaaacgttttgaatttaccttccgaagctcggtagagcatttctatcctcagcaccccatggatggctataggacattaccagatacatcgttgcataccttcggtaatctcagcctgattagccacagcaagaattcgcgacttagtaatttccagccaaaacaaaagcaagagcacttcgaagcgagtcttgaacggaatgaaattgatagtctgaaactgctcgccatgatcgagctgatgaagaagaacaatcagtggggggaagaagaaatcgccactcacgaagcggaaatgctggctgtgttaaccggtgcaggtggtagtgatagcgtatttagggaggtgttatga

SEQ ID NO: 146833 - DNA, 585 bp, Enterobacter cloacae
atgctggatctttgggtggatgccgatcctagtgaaacccttatggattttgaggaactaggactgcttgagttgattattgaacgcggggaagaagcactggatggacttccagctgacatgcgtggcaaccaagaggctatggctgaagcgattgaaaataacgttcgcagaaccattgttgatgaaaacccagtcaacccgaaatactacgaaaaaatgtcggtattgcttgatgaactgatcgcacttcgtcgtcaacaggcgatctcctatcaagattatctggagcacgtacgtgaactagcgaagcaggttaaacatccgcagtcaggtagtaaaagtacttatccagtaagtattgataccctcgccaagaaagcgttgtatgacaacctcgggcaggatgaagtgttagttttaaagatagatactgcagtacgtcacactaaaaaggccgactggtatggggatcgttttaaagagcgcgagatcagctttgctatcgcagaagaaattaaaggttattcagtgacggtcgcggatgttatggctctggtgaaggtacagaaggagtaccgctga

SEQ ID NO: 146834 - DNA, 360 bp, Enterobacter cloacae; identical to SEQ ID NO: 132507

SEQ ID NO: 146835 - DNA, 267 bp, Enterobacter cloacae
atggcacgcgtaactgttcaggacgctgtagagaaaattggtaaccgttttgacctggtgctggtcgccgcgcgtcgcgctcgtcagatgcaggtaggcggtaaagatccgctggtaccggaagaaaacgataaaaccaccgttattgcacttcgcgaaatcgaagaaggtctgatcaacaaccagatcctcgacgtgcgtgagcgccaggagcaggaagccgcagaactgcaggccgtaaccgccattgctgaaggtcgtcgttaa

SEQ ID NO: 146836 - DNA, 852 bp, Enterobacter cloacae
gtgataaaacgagaattcgcaaagggtagcgatgggtggagccttaagcgcctgcgttggtattcggaaaagagcaccagctataccaatacgttcaatgaagatgatggtagctatgtagacatcaaccgacagatcttgatgctgctttccgcatttcacgtttcaacccctactctggtttacaaacactggttgaatggggctttgttctatctgtttaatgcccattccgctgtaagccagatcgaagcaagggagtatctcgaatatctggagcatcttgcctccgcatttgtctttcagaacttcctgtcagaagaaacgccaaaatcatattttgagattatctacggtaatgagccgcatatccaacctgttgtactgtcagatcagattcataagaagatgcgctttggtacgatagcaaacaacttggtattcaattacctggactacttactctggtgtcgtgacagacataaagctgaggtagtcaaacgttttgaatttaccttccgaagctcggtagagcatttctatcctcagcaccccatggatggctataggacattaccagatacatcgttgcataccttcggtaatctcagcctgattagccacagcaagaattcgcgacttagtaatttccagccaaaacaaaagcaagagcacttcgaagcgagtcttgaacggaatgaaattgatagtctgaaactgctcgccatgatcgagctgatgaagaagaacaatcagtggggggaagaagaaatcgccactcacgaagcggaaatgctggctgtgttaaccggtgcaggtggtagtgatagcgtatttagggaggtgttatga

SEQ ID NO: 146837 - DNA, 675 bp, Enterobacter cloacae
  misc_feature (13)..(22): n is a, c, g, or t
atggaaagacaannnnnnnnnnaccctgagttgctccctgctttattagctggtgcatggagtacatgttcagagaaagataagttaattctcaagcaactagctggctatacagactattctcaagttgaaaatccattaaggctattaacaaagcgtcgcgattctccaattgatcgagtggatgatatttggtcattgcgttcgtcggtagatacttttgtacatttaggctatttactgggtgaagaacacttggagcgttttgagaaggctgtaagagaggttttttcctatattcctgaatctccaaaggccgaagatctgtttgttcctgacaatgttattaaaacgtcttatagctcgtggttacgtaatggaatgacaacagttttgctacatatggcaatactacatgaacaggccgaattccgggttactggtatgacaccccaagattttgttaacaaaatagttcagagtattccaggacttgctaacgaccatcgactttttgttagtttgcgggatcaacttccactgctggcagaagatgccccgggccctttatcttcattgaatattggagcaatcatttccccattgcccttaagcaattgctcaagggcatcaaggaaagggcccggggcagcttctgccagcagtggaagttga

SEQ ID NO: 146838 - DNA, 510 bp, Enterobacter cloacae
atgacggcgttcactcttcgcccgacgcgcatcgacgacgtcgctgccctgcccgccattgaacgcgcggcggggcagcggtttcgcgacgttcctgagctggcctggctggcagacaatgaggttatttctgttgaagatcacctcggttacgccggacgcggattaagctggctggcgctggctgacgacaggcccgtgggttttattctcgccgaagctcatccatcgtcgctgtttattgtggaactgtcggttcacctggactggcagggacgaggtcttggacgccagttaatcgcccgtgccgccgcgcatgcccgcagtctggggctgaactcgctgacgttaacgacgtttcgtgatgtcccgtggaatgcgcccttctacaggcgattagggtttgaaatgatgacgacgcagacgccggaactgcgccagaaacgcgaggaagagacggcgcacggtttagcgtatggttcccgctgcgccatgcgcctgcctctgtaa

SEQ ID NO: 146839 - DNA, 141 bp, Enterobacter cloacae
atgattacgccgagaagttatccggaatttggcattactgatgcgcctgtttatcagcagtttattgatgaccccgcacggttccagtttatttcgcgtccggataaagtcgcagaactgtggaataacttccatccataa

SEQ ID NO: 146840 - DNA, 819 bp, Enterobacter cloacae
atggaagaacgtaaactcacccgcaaggatctgcgccgctgctggcgagcgtggatgatgcacaacctctcctcaatgagctttgaacgccttgaatccttcggcttttgcctgagcatgctgccggtcgcaaaaaagctctatcccgacccggtacaacgtaccgagatgctgcgccgtcacgcgtcgttctacaacacggagccacagattggcgcgatcgttaacggtatggcgctggggctggaggagaaaaaagccaacggcgagccgattgacggtgaaaccataaataccctgaaggtaggcttgatggggccaattgccgggatcggcgattcgatgatccccggcatgctgatcccgatcctgcttagcattgggatggcgctggcggcaggcggaaatatcctcggtccactgttttataccgttgcctggctggccatcattatccctggctcctggttcctgtttctcaaaggctaccagatgggatcaggctccgtggagatgctggtcagcagcaaatctacccggctacgggaagcgctctcgctactgggcgtatttgtcatgggcggcgtggcggccagctacgtgaagctcggcaccgggctggagttcatcacccgggacggggttaacattcacgttcagcagatgctggacggtattttcccgcagctgcttccgctggcggtggtgctggggacctggtatctgatggcaaaacgcggcgtgtcgccggtaaaagccatgatattgctgcttatactggcagcgcttggcgtggcgtccggtttgtttgcaggataa

SEQ ID NO: 146841 - DNA, 135 bp, Enterobacter cloacae
atgggctggagtgagcagaaaattggccaggagttgggtatggacagcgatgaagtactgcgtctgaagcagatcaacggtctgctcgaactcttcgcagaccgtcgtttttctgaagcctggacggtgaaatag

SEQ ID NO: 146842 - DNA, 1329 bp, Enterobacter cloacae
atgcacattggacaggctcttgatctggtatcccgttacgattctctgcgtaacccactgacttctctgggggattacctcgaccccgaactcatctctcgttgccttgccgaatcaggtactgtaacgctacgcaagcgccgtcttcccctcgaaatgatggtctggtgtattgttggcatggcgcttgagcgtaaagaacctcttcaccagattgtgaatcgcctggacatcatgctgccgggcaatcgccccttcgttgcccccagtgccgttattcaggcccgccagcgcctgggaagtgaggctgtccgccgcgtgttcacgaaaacagcgcagctctggcataacgccacgccgcatccgcactggtgcggcctgaccctgctggccatcgatggtgtgttctggcgcacaccggatacaccagagaacgatgcagccttcccccgccagacacatgccgggaacccggcgctctacccgcaggtcaaaatggtctgccagatggaactgaccagccatctgctgacggctgcagccttcggcacgatgaagaacagcgaaaatgagcttgctgagcaacttatagaacaaaccggcgataacactctgacgttaatggataaaggttattactcactgggactgttaaatgcctggagcctggcgggagaacaccgccactggatgatacctctcagaaagggagcgcaatatgaagagatcagaaaactgggtaaaggcgatcatctggtgaagctgaaaaccagcccgcaggcacgaaaaaagtggccgggactgggaaatgaagtgacagcccgcctgctgaccgtgacgcgcaaaggaaaagtctgccatctgctgacgtcgatgacggacgccatgcgcttccccggaggagaaatgggggatctgtacagtcatcgctgggaaatcgaactgggatacagggagataaaacagacgatgcaacggagcaggctgacgctgagaagtaaaaagccggagcttgtggagcaagagctgtggggtgtcttactggcttataatctggtgagatatcagatgattaaaatggcggaacatctgaaaggttactggccgaatcaactgagtttctcagaatcatgcggaatggtgatgagaatgctgatgacattgcagggcgcttcaccgggacgtataccggagctgatgcgcgatcttgcaagtatgggacaacttgtgaaattaccgacaagaagggaaagggccttcccgagagtggtaaaggagaggccctggaaataccccacagccccgaaaaagagccagtcagttgcttaa

SEQ ID NO: 146843 - DNA, 315 bp, Enterobacter cloacae
atggaagagactgaactgctgctaccgcgtgaaaaaatgctgcgtcatggcgtcacgttgttaaaggacgacgagctgctggcgctctttttacgcacaggcacgccggggaaaacggtatttacgctggcgaaagaactgatagaccatttcggttcactgtatggattgctgaccgctgagctggaggcgtttacgcacgttgagggcattggcgtggcgaaatatgcccagttaggggcattgccgagctggcccggcgattttacaacgtgcgtatggaggaagaagacccgatcctcacccccgatatga

SEQ ID NO: 146844 - DNA, 882 bp, Enterobacter cloacae
atgagcaaattgttccagttaaaaagttggttgaccatcgaggaaaccgcaaacaggttaaccacaacactcggtgaaaaggtatctgtagccgattgtctacaattggctgtagaaggccacattacaatttcagcaatgctggatgaaggccgttacgctatcgcatcacaggtcatcaaaacatcacaacgaaaggtttgtgaaaaatggatcattgaaaccaatagcgacggcgcagtaattagaaccattgctggtgatgagttctattctaacgagcaactagattatgaatatgaagatatagaaagagtcagtgatgtttttcgtataaatcatggcatatacgatctaccgatggttggggcagaatctttagatgttatgcacgagtttgacctttcacgcgccaaggttccccgtgaatttcacaacatggaaggtgctttcctcttaacagaatttggtctggtgaatattctgaacgcgttcgatgaatatgccatcaagtcagatgaaaatggaaaacctaaactgtacgacaaagaatcacagaggtttgttgactttagcctcgatggttatcatccctttttctaccctgctgatgggctgggtaatgtcgaattcgtattcagaaaagaaaatattgcagaatttgaaaagaaaacactcagtgataacaacagtctcctgaacctcgatgaaagccttttactgcttggcgcggtgctcagcgctttaaaaaaagccgaaccaacctctaaaaggtggacacaagaagctctcaaagcagaaatgctggataggggtttaaaattaagctcccgcttactggatgaatatttctcatcggccaacaaatcttttaaatcataa

SEQ ID NO: 146845 - DNA, 342 bp, Enterobacter cloacae
atgattaccaaaaacttccgactgaatgcgttggcgaaccagtacgcggcggcactttacaaccatatcacggctatcaatggtggtaattacttcatggttgacgcggcaggccagcaaatccgtgtggaactggtgggcggcgtcagtggcacgcgccagcttattggtgattacgcgctcgaagcactcaaagagacataccctcaatcggaaagcatcgggatcaccatgctggagaaatgcgttaatgctggtggcctgactgatacggggcgcgagatatggcaaagcatggttgatgatatgggcgcgaccgtggcagggggcaatcatgcgtaa

SEQ ID NO: 146846 - DNA, 573 bp, Enterobacter cloacae
gtgagagacagaacgcgcagctataccacggacttaccccgcattggtctgaaattcctcgcgcacatccgcagcaatttggtgggcgcagtacccggtacacagctttcctgccagacagagtgcggaaccctgtatatcttccgacaggcagacggctacgccatgacaatcaacgacgttacacgggcaatcagaatcacgaccacacaggctggctacggcgttcggcaatggtacgtttgcccccattgcgtgaaacgggtagcgaagctgtatatcggttcgaaggatataggctgccggaaatgctggaaactccactacaaaagccaaagcgtggataagttagatcggatgcgtatgagcatacgccgccagcggtacgccatttggggagacggtgagcagtttcgtaatctgtttaaccacgcgaacacttttcctaagccaaagggtatgcgatgggagacgttcgagcggaagttaagcaggcttataatgtatgaggctgcatactggcgggcgttcggtccggttgtggacaagatcaccgggcgtgtgcggtcgtaa

SEQ ID NO: 146847 - DNA, 1014 bp, Enterobacter cloacae
atggctaaagatcttactacctccgcacacgatcgacagaacatacttaataattcttatgccctaactcatgctgaaaaacatatgtccttaggtgggattgagttcaatggcgaaaaagtgttcacaaaaaaccagttgattgaactttttgatgtaagcgacacaacgattgaacgctatattaacaatcacttagatgaattaaaaaacaatggatacaccctcttaagaggaaaatccctaaaggatttcaaagagatagcagatggtaccctcatcaatgaaggtaccaaaacctcaatactaggcatattcaagtttcgctcagttttgaacctagcaatgttactagttgaaagcgaacaagcacgtgcaatacgagctcgccttttagatattgttatcgatacgctggcagaacgttcaggcggccatacgaaattcatcaatcaacgtgatgaagactacttagtggctgcgttcaaagacgaaagctatagaaaaaaattcactgatgctttagatgagtacgtcgaaggcaacaaatggaagtatgggaatttaacaaactcgatctaccaaagcatttttcatgaaaatgccaatgagtatcgcagtgttcttaagctacaccaaaatgacaagattagagatactatgtactcggaggtgttgactttaatctctagctttgaggctggtttagcacatgaaatcaagcagaaagccgaacatcttggtcgcaagctcacttataaagaagcagaatccatacttaaacaaatggaggggcatcctctatacgagccaatgctagtagacgttaggactaaaatggctagcagagatttatgctttcgcgatgccctacatgaaaaacttgaagcgtatgttaaagctgttcctgcgggtgattttgagcgttttcttggagaaaaaagcaagtcattagaggaaaggctgaatgaccctgaaaccctagaagtgtttaaaagactgaaagatcgctag

SEQ ID NO: 146848 - DNA, 462 bp, Enterobacter cloacae
atggacgatataacattcaattattttgacattcatcacgctattcgagttcatgattggatcattgataaaacaggcggcttacacggaatcagagaccaaggggtacttgaaagtgcccttgagcatatccaaaacgattggtattaccccgagttcgtggataagctaagtcacttattctttgcaataaataaatttcacgcttttactgacggaaacaaaagatcaggcatcgccctttcaacatactttcttgagataaatggtttcggccattgtgtgcagctttttgtgcgcgaaatggaaaacatcgctgtttgggtggctgatggggcgatagaaaaggaattgctcaaaaacatcatccatgatctgatcttgtgcgaagaaatacttgaaacaaccaagctgaatatcgccatagctgtaatggagtttgacgctcaaaggcatggttaa

SEQ ID NO: 146849 - DNA, 861 bp, Enterobacter cloacae
atgttgtcaaaacaggtcccgcttggcatctatgaaaaggcactccctgcgggggagtgctggctggagcggttgcagctggcgaagcagctgggtttcgattttgtcgaaatgtcggtggatgagacggacgagcgtctttctcgcctggactggcgtcgcgaccagcgtctggcgctggtgagcgccattgccgaaaccggcgtgcgcgtgccatccatgtgcctgagcgctcatcgtcgttttccgcttggcagcgaagatgatgctgtacgcgccgaagggctggagatcatgcgtaaagccattcgctttgcacaggatgtcggcatccgcgtgatccaactggcgggttacgatgtttactatcaggaagccaacgatgaaacgcgccgtcgtttccgggagggcctgaaagagagcgttgagatggcaagccgtgcgcaggtgacgctggcgatggagatcatggattatccgttgatgaactccatcagcaaggcgctgggctatgcgcactatctgaacaacccatggttccagctttatccggatatcggaaacctgtcggcatgggataacgacgtacagatggagcttcaggcgggcatcgggcatatcgtggcggtgcacgttaaagatacccgtccttgcgtgtttaaaaacgtaccgttcggcaccggggtggtggatttcgaacggtgcttccagacgctcaaacagacaggttattgcgggccttacctgattgagatgtggagcgaaaccgcggacgacccggcggcagaagtggcgaaagcccgggactgggtgcgcgagcgcatggcgcgggcagggctgatggaggcggaacatgcttaa

SEQ ID NO: 146850 - DNA, 651 bp, Enterobacter cloacae; identical to SEQ ID NO: 114182

SEQ ID NO: 146851 - DNA, 963 bp, Enterobacter cloacae; identical to SEQ ID NO: 114406

SEQ ID NO: 146852 - DNA, 921 bp, Enterobacter cloacae
atgaatcagctgcaagaaatcgtccagatgcttagttccggtgatgaaggcactacaaacgctctcttaaaaaccaaagtccttctcttttctatcggcaaaaaagaattggccgcttgggttaatcacgaacttcatggttatcctccagaagtcgatttaccttcatacaggacggtacctgcacgcttacttgtaaacgctaataatggagtacggagttataaagggattcaggttccactagctcatttggatgatgatgagtatgaagagattcatagatcaagagttaggatatcaataagccaaatcgagcagttagttttaaatgccggagagcaatctaaattaactcagtctatacccattgaattcgcatactcgaagtattgtaaagaccttgaagatgattatgaaattacaagttgttataaagacatttcaattcattactttacatcaatcttaactcaagtcagatcaaggcttttggattttgttttagaactatcagatcaagtatcagctataccaggaaaaaattcaatggaggataaattgaagaaaattgattcttcaaatgtttttcatcaagcaatttttggtgacaacacagtcattaatcttggagataataactcttcaaccataataaataatgtagcaaaggatgaccttttagcattaaaaaaacaattacttgaaaacggcttcgagcaatcagatattgaagacttagagatagctattaagacagatggaccaatatcaggcaaaaaagctcattacggctcggccgttggaacatggtttgctaatgtgatatcaaaatccgcaagtacaagcataggaattggggttgccgctgcaacagaagtggcaactaaggcattaaagcgctattacggatttgattaa

SEQ ID NO: 146853 - DNA, 321 bp, Enterobacter cloacae
atgggatttccctccccggcgatggattacgttgagcaacgattatcacctgtcgttctctgcaatataggacctgatagcagggtgcttgaaactgatgttgggtacgcagtcattgagcctgttacgaagaagacacagagtgatgtgttgttgatcctctgcgacgggcatacgcaattcgcaaaattgatggggaaggcactcatcactgatgatggtgaggcgatagagggaaccgctctggaagaggttgaggtcttagggcgggtaacgttttttatttaccgtacacaacaagatgattgcccggtcatgtag

SEQ ID NO: 146854 - DNA, 240 bp, Enterobacter cloacae
atgccacgcacagcagatatacaaacagcattccaagcggctatacagcttaatccaaaaggctaccgctacctgagcactgacagcttcatcgggaaattgagggagttcagctggcactttagccgtgccgatgcaaacgcatggattgagcgttaccagcctgacttcgctgacaagaccaccgacggcactgataaccgttactggatcctgcgcaacatggggagggttttctaa

SEQ ID NO: 146855 - DNA, 1032 bp, Enterobacter cloacae
atgtcgaaccgggtaatgactacgctcgaggaaatgagcccccgcgtcgaaatttacagtatcgacgaggctttttgcgacctgacaggtgtccgcaactgccgggagctgacggagtttggcaaagagattcgcgctacggttctgaagcgcacgcaccttaccgttggcgttggcatcgcgcagacgaaaaccctcgctaagctggctaaccatgccgcgaaaaaatggcagcggcagacgggcggcgtggttgatctctcgaatgtcgatcggcaacgtcggttgttggctctggtaccagtagaggacgtgtggggcgtcggaaggcgtatcagtaagaagcttaacgccatgggcattaaaacggctctggacctctcagaacaaagcacatggattatccgtaaacactttaacgtggtactcgagcgaacggtccgggagctgcgcggcgagccttgtcttgatctggaggagtttgcgccagcaaagcaagaaatcgtctgcagccggtcattcggcgaacgcgttactgagtatgagcagatgcgccaggctatctgcagctatgccgcccgtggtgctgaaaaacttcggggtgagcatcagtactgccgctttatctctgcgttcgtgaaaacctctccctttgcgcttaacgagccgtattacggtaacagtgcgtccatgaagcttctcacgcccactcaagattcccgcgacattatcaacgccgcggtaaaatgcctggacaaaatctggaaggacggccaccgctatcaaaaggctgggatcatgctgggagattttttcagccagggggtggcgcaactgaaccttttcgatgagaacgcgccgcgcgcaggaagcgataagttgatggaggtgctcgatcacttgaacgcgaaagacgggaaaggaacgctctactttgccgggcagggcatacagcagcagtggcagatgaagcgagaaatgctttcgccaaggtatacgacgcgttactctgatttattgagagttaggtag

SEQ ID NO: 146856 - DNA, 471 bp, Enterobacter cloacae
atgacgaacaaggaacttttggattggatccataacacttctccaaccatcgaacagcagctgaagcgctggttggatgaaattctgcagaatggacataactcacctgagtaccgccatggcgtagagttgtacgacaaaaatcaattggcgttattaaggccctacaccaataaatataacgggttttgtctttcgatttgcaccgtgcggttgcctgctgagattcaggggaagggatggtttaaaagttttcttaaactatgttgcgagatgaacccttggcgcgatgtaattttagaagatgttgagaatgaacatttaaaatcattctgcgagcgcaacaattttcatgtattggacccgttttataaaacaacatatgtggttaataaacaggctgtaatgaatttagtaaccagcccccttggtcgttacactgactacctaactctcaataaatcagagtaa

SEQ ID NO: 146857 - DNA, 819 bp, Enterobacter cloacae
atgactacgccatgtctatacagcattgtaagatatgcgccgtttgctgaaactgaagagtttgcaaacataggcgtcgtcctttgtgcgcctcaaaaacatgtatttttgtttcgtttgacccaaagcaatgacgcacgagtcacctctttcttcaaagatgatacgattttcccaatagcaaaagacgcggttgccagagaacttaagctggctcaagagcaaactaagaacattagctctgccgacgatattgcaaactttttcagttacttaacagctaaacgcgagtcaatatttcattttagctctacacgtgtggtgcttgcagaaagccctgaacacgaactgcatcgcgtttatgataaatttgttaatcattctgattacaacaaagaacgcagagaagaaattctaacgcgcgagctaaaaaaccgtttgaattcatacacagagcttcaaaacgttttccgtaaggaaacatttggaggaactcttacgcgcttcacaatgccttttgttgctaaaaatgaggatgagatcctttgcgcgattaaacctcttgcttttgttcagcaagagccgggcaaaatgatggaacattgtgattcgtgggtatcacgggtaaaacgtgctgctgatgaacgtttgctaaatcttgcaaatgtactctttacaattgatgggcataagcatccgagcagttcagaagcaaaagctatggatgagattcgacgtacgtttgaccgtaacaatttagctcacttcaaccataacgatgaaacgtccattattcagtttgctaaagctgcgatttaa

SEQ ID NO: 146858 - DNA, 741 bp, Enterobacter cloacae
atgcccatcgaacccttgcgcgttatcgaaataattcgacgtataccggattgtgcaacggaaccttttctatgcaaatgtgatgatggagagttatatgtcgtaaaaggtatgcctagcgtaccccgcgtacaactcattgctgaatggatatcagcgcatctaggtaaagaattgggcctttctttaccagacttcggtatggcttatgttgacagcgctcttactcaatacgtgcctgaatggcggaatgcgcttaatgagggcctcgcatttgcgacaaaatttataccaggtgttgcccctattaccttttcacaagcacaccataacgtagatgttcaagcacaaaagataatctatctatttgatagatggataaataattcagataggtcgctttctcctaacggcggcaacgtaaatatcatctttgattaccgcaataatagatactatctgattgatcacaatctggcgttcgaccagaatgatgatgtggcatcgtttgactaccatgtctacgctccgcggcataggaagtgggtgtttgacatcgttgaccgccctcattgcgaagatgaaattattcgaacaaaaggaactttgcctgtttgtataggacaaattcctgaggattggttgcctgagtctgaagaggctcgtgagcaatgttttagtcaaatcgcacaactactgaatcgtaacgaaactgaagttttttggagtaatatcaaatga

SEQ ID NO: 146859 - DNA, 654 bp, Enterobacter cloacae
atggcgataccgtttgaagcaccagagtttgaaaaacaagccttcaactgcccgtactgtaatgctttcgctcaacaacgatggcaacagctttattattacagcagcggttcaagtgtccctatgcacacagcaacatgcgatcattgccgacataaaagttactggtttgagggaaggttaatcattcctgctgcaagtggagtggagttgcctaaccctgatatgccggaagactgcaagtccgattacatggaagccagaagcattgttaatctgtcccctaaaggcgctgctgcgcttctacgcttgtgtcttcagaagctaatggtccatctcaaggagccgggtgaaaatattaacactgacattcggtctctcgttaagaaaggactccctgttcgtatccagcaggccgcagacatttgccgaatcgttggtaatcaggcagtccatccgggagagattaaccttgatgatgacccgaagttagctcatggtctctttaagttactgaacattattgttgatgaccaaattacgagaccgaaagagcttgatgatatgttcaagagtatgcctgaaggtccacgccaaggtattgagaatcaggataagaaggcaagggaacagcaacaggccgctaacgagtag

SEQ ID NO: 146860 - DNA, 192 bp, Enterobacter cloacae
atggctatgattgacccacgcactcccgaaggccgtttgaccctgcgttaccgtggtctccgtacttcactacttttgtcgatgcttggtttggataaagacgccacggataaccgaccgttttatactcgtaatgagctaatagaaagattggttatccgtgatatggaaattaaccgaggaaataagtaa

SEQ ID NO: 146861 - DNA, 255 bp, Enterobacter cloacae
gtgccttaccggcaaatcgctcagcaggtgaaagccccccgcgagcgcctccagctggcgctggaacaggggcttgcggtcaccgcgcttgacgggcttttctggtttggcctccagcgcatagccgccgaggtgcagcggttaaggaagaccgggatgagaatagtcacgtccgatacggaggtgttcgacacccttaccggaacaatacggcgcattccggtttatcgtcttgaggacgctgccgctacttag

SEQ ID NO: 146862 - DNA, 888 bp, Enterobacter cloacae
atgaaatatggactcctggcggggctggtcttcacgacggcgagctacgccagcattgatttaaaggccaacgaacagccgctgccggtgacggttgatcaacaggcagtggcgaaaatcccggcgaactataaatttgttgagccgggtaccctcacggtggcgatttcagccctgaattctccgccgctggcgctgctggccagtgataagcgcacccgtattggcagcgacccggatatcgcccggttgctggcgggcagtctggggctgaagctgaagctggtgccaacggcgtgggaagactggccgctggggatcacttccgggcgctatgacgtggcgttggtgaatatcgccgtcaccgagcaacgtaaggcgaagttcgattttgcgacctatcgcgtcgattcccttgccttctcggtgaaatccaccagcaacgtacagtcgatcacccgtgcgaaagatctggccggtaaaaaggtgattgtcgggtcaggcaccaatcaggaacgtattctgctgggctggaacgaagagaataaaaaggccgggcgcgagcctgcgttgccgttttatctgaccgacgacgcctcaggcaatctttatattcagtccggcagggcggatgttttctttggaccgcagtccgtttctgcctataaagccgcgttaaccggcaaaacccgcgtcgtgggattagggccgaagaaagcctatgtcgccaccacaaccaaaaaaggcaatgggctggtgtatgcgttgcaggctgcgctggacggtgcgattaagcgcggggagtatcaaaaggtgctggcgcgctggggggaagcgggcgaagcggtgacgtcttcagacgttaatccgcccgggataacctactaa

SEQ ID NO: 146863 - DNA, 312 bp, Enterobacter cloacae
atgcgtcgttttattcactggtttttctacctgagccttctttcgctttttggcatgctgagttttcatgcccatgctcagacctcatcttgccgcaccacgcgcgatcagtgggtcgttcaggtgccctacgccatagggtatgcgcccggcacggcggactggacgccgatatctgcgccgatacagtctaccggggcggatttctacagctgtgatggcgggaatgatgcctggcgtagtatcggctttgtcgacgtggataaccccgtcggcaccgtggttggtgaagacggggcgtcacgtctataa

SEQ ID NO: 146864 - DNA, 231 bp, Enterobacter cloacae
gtgtatatctcccggagaaaactcgactatgtttattgctgtattctctccggctacaaatttattgataatgtcgccatctttgccatacaaacagacctgcacctgtccctgcataacgataaacatctcccattgatgaggaagttcatggtaatgcgggtcgacataactacctttaaccaaggctataagcagtcgttgcaccttatcctgatgggattcgtgtaa

SEQ ID NO: 146865 - DNA, 270 bp, Enterobacter cloacae
ttgctcaatatcgaggtggaagatgacagatgtatcatattcctgatcttctgtactgatgataaatggctgattgaaaacttcagtacccgtgtcatccttaaatacgacctgcacactgtttgcatattgcgcataaagaccaataacagggattttaatggtttgcgtaacaccataaatgagatccgatgtataggtaaaatctacgctggttggactggtcgtcctttttgtaacagtgtaagaataacttaccggggtatctga

SEQ ID NO: 146866 - DNA, 1254 bp, Enterobacter cloacae; identical to SEQ ID NO: 117777

SEQ ID NO: 146867 - DNA, 672 bp, Enterobacter cloacae
atgtgtggacgctttgcacaagcccaaacccgggaggaatacctggcctacattgccgatgaagccgatcgcgacattgcatatgacccggagccgataggacgttacaacgtagcgcccggtaccaaagtgctgttgctgaatgaacgcgacgagcagctgcacctcgatccggtgttctggggctacgcacctggatggtgggacaaatcgccattgattaacgcgcgtgtagaaaccgcagccaccagcagaatgttcaagcctctatggcagcatggtcgggcgatctgttttgcggatgggtggttcgaatggaagaaggaaggtgacaaaaaacagccctacttcattcaccgtgctgacggtcagccgatattcatggcagccattggcagcacgcccttcgaacgtggcgatgatgcagaaggtttcctgatagtgacgtctgcggccgacaaaggtctggtcgacattcacgaccgccggccattggttttgtcaccggaagccgcccgggagtggatgcgccaagatataggcgggaaagaagctgaggagatagccgccgatggcgctgtgcctgccggcaagtttatctggcacgctgtgacgcgcgccgtgggcaatgtgaaaaatcaggggccggagctaatcatggcagcacaataa

SEQ ID NO: 146868 - DNA, 633 bp, Enterobacter cloacae
atgctggttgaaacagagagtgagcgctgggtaatcccccctcagcgggcattatggataccgcctcttcagatccatagttacaacctgctttcacaaacagacctgcgtgctgtttatttcagcagcagccttatcgctgaatgcacgaattttacaaagagtcatcaggtgcatgtgattacagctacggcactggtgaaagagctgatagccgggctattcagtgaggattaccagaggccgagtcaacggaaaatggccctgttgcttctggaaattctcagcgagacttctcccttaactacggagcttccaatgccgcatgatgagagattattccgtgcggccagagaactgttggttaatcagcgctgggaagcatcgctgagcgaactggcttttatcgcaaccatgtctgaacgtacattttcgcgattgtttattaaggatacaggcttcagttatagaacatggaagcagagagccagaatttgtgcttcgttagatcttctcgcgaatggcatcccaatcaaacaggttgcttacctgctaggtttctcatgcccggcatcatttacagccgcttttcggttcattctgggctcaacgccgcgcgattttttgccttaa

SEQ ID NO: 146869 - DNA, 726 bp, Enterobacter cloacae
atgcgagtccactttatcgtacatgaaagttttgaagccccgggggcttatgaaacatgggcaagaaaccgaggtcatgacctgacgtattcacgtgtgtacgcaggtgacgtgctgccagcagacgcggaaggcatcgatttcctgatcgttatgggcggtccgcaagatccagtcactactctggaagaatgcccgcactttgattccaaaggtgaacaggcgttgattgcttctgctattcaggctgataaagccgtgatcggtatctgccttggctcacagctaatcggtgaagcgctgggcgcgccattcgcgcacagcccagaaaaagagataggtaaatttccgatcacactgacggaagttggcagcaaagatgagatgttctctcactttggctgtacgctggaagtcggacactggcataacgacatgccgggcctgacaccagaagcaaaaattattgcttacagcgaaggttgtccacgacagatcgttgcgtattcagatcgtgtatttggtttccagtgccatatggaactgacgctggaagtagttgaactgctgattgcgcattctgaaaaagacctgagccgcgccgcagaataccgtttcgttaacacacctgaagcactccgggcgcacgattacagcgaaatgaatcaggtgttgtttggcttcctggataagctggaagctcgttacaaagcaactcaagaataa

SEQ ID NO: 146870 - DNA, 843 bp, Enterobacter cloacae
atggaacgattgagagagcaataccaagaaagaataaacagtgtcctccttgacggctttgagaaggaactattagattctgcctttattaatcttttgacacctaacccacttaggttgaacaactttgcatatgctctacgtgaactaacaaggcatgttttacaccggttagcaccagatgatgagcttaagcaatgccaatggtttttgccggataagacatcatcaacagaaattactcgaaaacatcgcattaaatttgcgattcaaggaggcctttctgatttctatgtaacgaaaaaactttgcattgatgagatagatgaggtatcaagcgaattgattgctatcataaatcgtctaagtggatttacacatatagaagaagcaaccttcaaaagctcaatcgaagatattgaaagaaccgcagatgaatgtctttcagcaacacttgactttgttaacaagatagatgaactgagagccgaagttgcagataagctcttcgatgatatcaatggagttctgatcgacagaataaacagcgaatcggttgttgagttaatggaaatatcgccccatcagtatattgatgaaataacagcagaaaaaatttcagttgctaaaattggcgtaaactctatggagatgcatgtcgatgggagaattggagcaactttaatgtacgggtcagcatccgatcggcgtagaggagatggagctgatatttcggcctcatttcccgtatacagtgaaatggaagttctttttaaacaaccattgggtagtgccattaaccttaatcagtttagcgtagatatttcgtgctggtatgagtaa

SEQ ID NO: 146871 - DNA, 228 bp, Enterobacter cloacae
atgatagatagaaattctataaaggtatttaatatgaaaaaaaccttggtattgattaagagtttggcctcaaacaacagtgaaataaatgacctattgaaatcatatcaaaatggaaatattgacgaagacacactcatcagcaacgctattttagtcttaagctcagaagagtctaaatcagaagaggatggtgacgacattaagcttgatcttatgacttggtga

SEQ ID NO: 146872 - DNA, 2190 bp, Enterobacter cloacae
atggctactacacctactcagaactcggttccaagtgaatctccattggacctgaaatataacgcaggcaaaattgacgagtttgtaacatctctcgcgcaacagtacattgaccgatttggtaatgctcattacaccatcgaaggtcttaagcagctcgcactccagcagatctataaccttggatggaaccttaaaggtacatttcagggcggcgcaacggtgactgctgccggtgaccttttacaggacacatcaaccgggatttggtatcgatgggatgacctctcttcgcttccaaaaactattccagcaggatcaacgccgtcatcagctggaggtactggtccaggaaagtggcaaccagttgatgttacagatgtattgcgtaaagaccttgctttggatagtggggctactttagtaggtactgaaggaggaaacactgttcaggatgaactaaataagttaaatatttatttaacaggttctattagtgcaacatatcgtctcaaaaacctaaagttgcttgcatctgcaaataaaagacttaagtatggagagtctttgcagattgtctgcgtaggcgacagtatgactgctggttacgatgttaattcagcagataaagttcctgctgataatggagactgggcaactcacgcccctatccaatatcccctccaggttcaaactcaactaaatacgtatacatcttcaccaactaccgtaattaacagaggttactcaggagatactgctaaggcatgttttaataggtggaataccaatccaaacgctcatgtagcacatattatgcttggcataaatgatgcccttccatcaagtgggacgacatttgatgagtatgtagagtacatggaaaaattaattaagaagtatattgattggggttgcggcattgtattgcacactgtaacagcgaaaacgtttaacaatgtcaatgatttatctacatgcttcacgcaatcactcagggcgatagctgaagtttatgggtgccctgtttttgagagtgaagaggttcatcaatttaggatttactcagctgttcattcagacggaacccattttaataaaacagggtatgcgctctatggtgatgctgtaacatcatttatcctggctggtggttgggttaatcaatacaggaaagtgaatggattgacatatatccagacagggcggggctctgaaggaatagggttcttttctaaaaatgcggcccttgcgacagatctaacaaattcatatttaacaaacggtagcgttggtagaattcccgccggttcatcgggtgttgtgtcttatcatttttatatggattgtgatgtggcaaacatcagtgtaataggtaatatcacagactgcctggtatctattagcaggctttatgatggtggagattctgcatctaaccgattgacgattaagtcaaaccaaaacagaagggtgacagaaacatcttccgctattgttcaggctggcagatctggttatggaaggaatacgcttgcgggaactttggttggcaggggctggaaaacattatttattcagtttgacggaagacaaactgtagatagatatgttcagggtatcattattgaacccatgatgggcagcgaagtctcacaagtaaatttcggtgacttcaggaaggcaaaggatgaggtattaatagctcaatacccaggttatacatacaattcaagcgcttcttcagttccggctgctgtgtctatatctggtgataaatttattccactacctgatggcctttttcctttcgttggtccggcaaataacttttttgattcagcgccagtttatgtaacgatcgaagtatttggctcttcagataacacaaaccaccccaatggaattacgcaactcattctcaggaggtctggaacatctacatcattaacgatcgaaaagatatactcgacatcccctaacagcctgacccctactgcggccggcattggttcctccgcttatgttgagggctcgcaaggaccaacttcagttaacaaaacagtagaccctacagcaacccagcagggatggctgtggttaaccttcccatctagtagctatacggcttattatcgaatagaagtccgttgcgccagtaaaggaacgcaaagcacctggatggcataa

SEQ ID NO: 146873 - DNA, 174 bp, Enterobacter cloacae
atgacgtacaaatcagttaagcacgggctgccgcgctcattcacccgcgtttgggtgatgaccgacaccgggcgggagactaccggatacgtgaaatcggacggcgagtggttcatcaactgcccgcgcatccgggcgaccggcgcgaaggtgctgcgctggaaggagggctga

SEQ ID NO: 146874 - DNA, 285 bp, Enterobacter cloacae
atgagcgaagcgaaaccgcaggatggtagtaccgttaagggataccgtactttaaccgctggcgatattgagcgcatgaaccgcctgaagggtgtaagccgccatttttgtaacctactggatactgagcgcgaaggctcttcgtccgaggttgtagagcgtggcagccaggccgaaactgagcgcgcagaagcgcttcgttgcctggcgattgcccgcaccaaaatgcaggaagcctgtatgtgggcatgtcgagccgttgcccgtccagatgccgactgttag

SEQ ID NO: 146875 - DNA, 579 bp, Enterobacter cloacae
atgattacaggaatcgaagcgctagctttacaggctacagatatccttgcagcctccagggcggcgcagcaaatagtttccccacttgccagagctaactcgagactggcacagtctgccatgcctgaaaatcctgatgaagttaagcacgccttagatcgtgcctctattgcgattgcaggtgtagagcgcaaattagttgagtgcaatgaaatagttaattcattaaacacactttctgatgaagatcttcatttcaccaatgagtttcccattgaattaaaggttagggctgaaatgctgactgggcacatagagaatttacgcgatgtgttttctctagttgaaacgtcgagcgcttggaagccatacatgccattggtttatgaaaaaaaacgcaaagcaattcgctctgtttctgatctgcgaaatgcatatctaaacattgctctcctggcagagcaatttgtctcacccgtgccgaccgtaagcagtagtgttgagggtaactcagaggaattttcatctgcgctctccgcatcacgccagctgctaaaaatcggctcggagtggagataa

SEQ ID NO: 146876 - DNA, 198 bp, Enterobacter cloacae
atggttctggatgaagagcgtataagcatgaaaattcaggcgatggggcgggcggtgatggaattgtcactggctgaattacccatgacccagcaaaacatcatcgacaagctgaagcagtaccggaaggaaacaggaaacgtgatagggaagggagctaacagggatgctgcggagttggtgaggaaggggcaataa

SEQ ID NO: 146877 - DNA, 561 bp, Enterobacter cloacae; identical to SEQ ID NO: 115171

SEQ ID NO: 146878 - DNA, 1263 bp, Enterobacter cloacae
atggcactgactgacgcaaaaatccgggctgcaaagcccaccgacaaggcttataaactcactgacggggccggcatgttcctgctggttcatcctaatggttcccgttactggcgtctccgttatcgtattctgggtaaggagaaaaccctggcacttggtgtgtatccggaagtttctctctccgaagctcgtacaaaacgggatgaggcccgaaaactgatttcggagggggttgacccttgcgaacaaaaaagagctaaaaaagtagtccctgatttacaactctcttttgaacatattgcacgacgctggcatgccagtaataaacaatgggcacaatcacacagcgataaagtactcaaaagcctcgagacacacgttttcccctttatcggcaaccgggatatcacaacactccgtaccccggacctgcttatccctgttcgtgccgcagaagctaaacaaatttatgaaatcgccagtcgtctgcagcaaagaatatctgctgtaatgcgttatgccgtacagtctggcatcatcagatataatcctgctctggatatggctggcgcattgaccactgtaaaacgccagcatcgccccgctcttgatctttctcgcctgcctgaacttttgtcgcgtattagcagttacaaggggcaacctgtcacccagcttgccgttatgctgaatttactggtttttattcgttccagtgaactcagatacgcccggtggtctgaaattgatattgacaatgccatgtggactattccagccgaacgcgaacctctgcccggcgtaaaattctcacaccggggctccaagatgcgaacaccacatcttgtgccactcagcaaacaggctgtagccatactgacagaacttcagacatgggcaggtgaaaatggtctgatatttacgggtgcacatgacccgcgtaaaccaatcagtgaaaatactgtaaataaagccctgagggtgatggggtatgacacaactcaggaagtctgtggccatggattccgggcgatggcgtgcagtgcattgattgaatcaggtttgtggtcccgcgatgctgtggaacgtcagatgagccatcaggagcgtaatggtgtacgtgctgcgtatatccataaagcagaacatctggaagaacggcgactgatgttgcaatggtgggccgattttctggatgcgaaccgggagaagggtatcagtccgtttgaatatgcaaagattaacaatccattaaaatag

SEQ ID NO: 146879 - DNA, 1005 bp, Enterobacter cloacae
ttggagtcattaccaggaaagggcagttttaaacggaaagacgcccaaaatttcactcactggcatgggatagcggcgggacgtcttgacgaagcgattgtcagtaaatttattgagggagaaaaagacgatgtcgaaacggtcgatgtcatcttgcgcccaaaagtttatttccggttactgcagcatggtaaggaccgttccgcaggcgcgcctgatattgttaccccgatagtgacgccagccttgctaagccgtgagggttttttatatccgacgccagcgacctccattcccagagacctgcttgaacctttgccaaaaggagcattttcgattggtgagattgggcagtatgacaaatacaagacaatccatacctcattctctatcaactttgatgacggcattgataagactgccgaaacggatgaagaacgggaagcacgatatgcagccttgcagcaggagtggcgtcaatatctggatgattcagagaggctgctgaagaacgttgccggcgactggattaaaaatcctgagcaatatgaactcgctgagcacggttatattgttaaaacggcgcaatctggcggtgccagtttccatatcctttctctttatgatcacctgcttgtttgcaagaaggatgtgccgctcttcaatcgcttcgcctcgcgagaggttcatgctgcagagtctttgctagccccaggcgcaaaattcagcgacaggcttggacactccggagataagtttccgctggcaaaggctcagcgcgatgccttaagccattttctggatgcaagacatggcgatatccttgctgttaatggacctccgggaaccggaaaaaccacgctggtgctttctatcatcgccacgcagtgggccagagcggctctcgaaaaatctgagcctccggttattatcgcgacttcaacgaacaaccaggctgtaacgaacattatcgaagcgttcgggaaagatttttcacagggctga

SEQ ID NO: 146880 - DNA, 135 bp, Enterobacter cloacae
atggctaagaatatgatgagcctcgtgtttagtgttatgattgtgttaagccacaaaaactttactttaaaatggctttatcagattctaataagatggcgccattcttgttatcacttttttatccaagtctaa

SEQ ID NO: 146881 - DNA, 717 bp, Enterobacter cloacae
atgcgaatgacagtgcgccgttaccggcgtcgtcggacaggaagtgattcactgggttctacgcactcgccttttgctctcccattttttgatcgtctcgaatatttgagccagtcaatcaaccagacccgcaaaaccgatgctccctttatcattctggtcacacaggataattttttccgttccggtttactgagcgggcagtcgcccctgagcaattgctgcgactattccacgctggaagccgccctcagtgatttaaatcactggccttcatcgcgtctggtaatagacattgagagccgcgcctcgccgctcatcgacctgctggaccgattacgccgccacagcctgttcgccccctacctgacaccctacctgctcgtccgcgccgatgattatgatgctcgcctgttttgtaaagcggctggcccttttcatgtgcttgaacgccagctaacggcgctggctatgcaacaaaccttgctggaagcaccgtcacccgccggcaaccgcaaagagtggttttcacgggatgaatggccgatcttacaggcgctttcgcaggggagctccttgcggcagatcgcgcagttacagaaccgcccctacagccgcattatttaccgtctcagctgcatcctggcgaaacttgggctgaatcatcgtcatgagttgctacatcttctcaacaacctctcagatttcacgtattaa

SEQ ID NO: 146882 - DNA, 1269 bp, Enterobacter cloacae
atgtttgcccttgtcgatgtgaactcattttatgccagttgcgagacggtattcagaccagacctgcgcgggcggccggtggttgttctttcgaataatgacggctgcgtaatcgcgcgtagcgccgaggcaaaggctgccggtatagcgatgggtgagccgttcttcaagcagaaggagttgttccggcgcgctggtgttgtttgcttcagcagcaactacgagctctatgcagacatgtccagccgggtaatgactacgctggaagaaatgagcccgcgcgtggaaatttacagcatagacgaagccttttgcgacctgaccggcgtaagaaactgccgggacctgactgaatttgggaaagagatccgcgcgactattttacagcggacgcatcttacagtcggagtcggcataacccagaccaagacgctggcgaagctggctaaccatgctgcgaaaaaatggcagcgacagacgggaggcgtggtcgatctctcaaacgtcgaccgacagcgcaggttaatggcactggtaccggtagaggatgtctggggtgttggtcgtcgcatcagcaaaaagctgaacgccatgggcatcaaaacagctctggacctttcagagcagagtacgtggattatacgaaaacactttaatgtggtgctggagcgaaccgtccgtgagctgcgcggcgagccatgtctggatctggaggagttcgccccggtaaagcaggaaattgtatgcagccgatcgtttggcgaacgtattactgactatgaacacatgcggcaggcgatttgcagttatgcggctcgtggagctgaaaagcttcgtggtgagcatcaatactgccgttttatctccgctttcgtcaagacatcaccttttgcccttaatgagccgtattacggaaacagcgcatcggtaaggctgctcacgccaactcaggacagcagagacatcatcaacgccgcggtaaagtgtctggataaaatatggaaggacggtcaccggtaccagaaagcgggtgtcatgcttggcgacttcttcagccagggcgtggcccaactcaacctgttcgacgacagcgctccgcgtgccggaagtgaaaagttgatggaagtgctggatcacctgaatgcaaaggacggaaagggcacgctctattttgccgggcagggtatacagcagcaatggcagatgaagcgtgaaatgctgtcgcctcgatacactacgagattttcagatttgcttgttgtccgataa

SEQ ID NO: 146883 - DNA, 309 bp, Enterobacter cloacae
atgacaagcacagcagatatgcacgccacattcattacggcagcagagcctttccttcctccatctgccaacattgtcgaaacgcaggacggctacgatgtcattgagtactcatcgctgtttaagcgcggagacatcttgctcatttggttttgcggcagacagcagcacgcattttgggccggtgatgcgctcatcactgatgacggcgaggccatagagggcgaggcattagatgatgttcgctttgttggtgtggtgactcataccattatccctgtgtgggtagacgacaatccggtgatgtga

SEQ ID NO: 146884 - DNA, 1128 bp, Enterobacter cloacae
atgaaaaccaatagattagacagtatacagtttcttcgcggcttggctgctttgcttgtcatagcattccattttaagcagtatttgaatggtgtgtatgcgcaagcagatttgggtgacagattgtttgggctaggagaggtaggtgtagatatattttttgttatcagcggattcatcataacctactcaacagcaaatatagaaaaaaactcccctatcgaattttctattaagcgttttttcaggctttatcctgttttcataataactcttactattttaattatttttgacacgtcgtctactgcaacttcatcgcagataataaagagttatctattgatacctaacgactataattttataggtccatggtatggttacaacgtgaatctcccggcatggacactcacctatgaagttcttttttattcgatatttttgatggcgttatctataaatcatcagcatcgctccatcattgctgccgtactaatagtcttgatctgttgctctgctcaactctacttcagagggttcttacaaattgatgcaatcacaagggacaacggagagccttcatttgtcaggaatttcactttcatttccaacccaatcatatatgatttcatctatggtatgttaatagctgaagtattcatgagggttaaaaatacattccttgcgcaaaagtatgtacaggttattttagtctgcgcagcatgtttatcaattgcagttattgtttccgggtggaacagaggggcagggatagacaggtgggggcttttatcttttattcttgttggtgctgtggctttgatatctaaagtcagagactttaagttttcttctttttgggtgttgatgggggaaatgtcttattctctttacatcaaccacatgattgtaaaaaaactgtcaggaatttatctgcgagattttgggatctacaaggctaacgggggaatgacactgttcataatcctgatgatccttacatttgtaatgtcatacatcacatacaattttattgaaaagcctactgtgtcttttggccacaagctcgctgagcgcacaaggataaaccgcatcagacgagaggaagaagaatcgatagcttag

SEQ ID NO: 146885 - DNA, 1989 bp, Enterobacter cloacae
atggctacgcaacctaccaatttgcctgtcccaagcgaatcacctcgcgatctgaagtttaacgcggggaaaattgacgagtttgttacctcgcttgagctgaagtacatcgatcgtttcggtggtcagcattacacgattgaagggcttcgctggcttattcagcaggctatttcatctatgggatgggtgctcatcgactcattccaggacggggccgaaattactctgcctaaccaggcgctgcgcgatgaagttagcggtgagtattatcgctgggatggtccccttccaaagcatgttgatgctggctctacgcctgcgtcatcaggtggtgttggtgttggtgcatgggttgggataggcgatgcgtctctgcgcgcatatctggctactgtagcaggggcggcatcaatcggcctgcaacctgggggtaatcttcagcaggctatcacctgggtaacccctgaacaatttggagcaattggagatggtatagcgcatcctttatctgagcgttatgcgactcttgcagcagcgcaggccgtgtacccatttgttacctcactgacgcagaccattgactgggcagcgtgtcaggctgctgagaattatgctcggggaaagtgtattgttaaaaccccatattatgcaacctatcactttcagtatgactacttaacacttgggataaattcaaaatgggtggcagggttcaacccacagactgattcaggaggtactaccataaaaagatccgttaatccatcacctcctatttttggtcaagattgctttgcgagggtaatgaacgcttctgctgctggaagtgctgacgagtttgttagagggatagtttttaaaggcataaagctaacttatggtttagctaggcgctcaccaacaaaaggaactggtagaattggcttgcaccttaattatgccattaaggctgagattgatgttacagttaacgactgtgaatacggtgtttttggttattcttgctggggagcaaaaggtgttattcgtatagattcttgtcataagggcttttacgctgacccaagaacagcaactccggataacccggttccgtcaaataacactatcaccagctttgatcttaggattgagattgacgcctgcccgtttggcctagtcttacgtgactgcttctattctaaattcacaggctggattgaaggatgtgtagtcgggcaaggaaactatgacagtgcgaatgaaacagcatgtgctatcactatgcttgggggtgatggtgttgaaatgaatctgggtattgaagcgtggcaggggatacatgcactcacgagtaattctgttctggagttatctgagacgtttgctcagcagcaaaatattgtcagcactactggtaaaaatggtgcatggcatgccatgtccacacttacaggtaattcacaaccactaacggtacccgctggagataacgcattattttattctatgtctaatggacggctaaccgttaaaaatttgcaaatggatgcctctggaactgcatataactcagcatacctttcatatcaggatacaacaagcagggtgctgttcctcaatacgagaatttatacaggctctattcgtcgtgtgtctcctgcaaattgggcaaacgttgatgtcattaatgacagataccttgagttctgcttcctcccggggtcaggaagcaattataagtatcttggtaaaggtgtctgcaaagccttcgcctacagtaacgcgagcattgcagcagacggaacagtcgtcattacaccacctacgggatggcagatcttaggttgcgaggcgtacgtgattactagcactgcgacccaggctcaaacaggtgccatgacagtcaaaacccttgcagatgatggttcatcgataacgtttcaaacagcaaaagatgcttcgtacgggatcaagtatcgacttgagctactgatctcaaagtaa

SEQ ID NO: 146886 - DNA, 618 bp, Enterobacter cloacae
atgaaacgttattcactctgcccaatatgcggggatgaagggttgcatgaaacgaaaaccaaaatcctcagggagtttgagggttttaaaaaagaggtcccgttccatgcatctgtttgcgaatcatgtggctcagaaactctgacagttcagcaggcaaaatttaacaaacgccagatgactgatttttatcgagaagctgatggattgcttacaggcggtcagataaaggcaatcagagaggatttacatcttacccaatctgaagcagcaatcatttttggtgggggcaaaaacgcgtttactaaatatgaaaatggtgacgttacgcaatcatttgcgctggataagcttttaagaacggcttactcggttcccgctgcttttgagtttctccgtaaaggttgtccagccgtaaccaccgtagagtataccaatcgcactaccgagttagagatgatcaagacttattttgtttcaaaaactggtcaccttaaatacgcgaaaagtcctgctgaagattcggtaaaagtcgtcatccagaattatgtgtctgaaccaactcagcataatacttggcatatgattgaaacgattgccttaggtagtaaattatga

SEQ ID NO: 146887 - DNA, 480 bp, Enterobacter cloacae
atgattttaagagaagtaaaagatgtactgttgagaaagtcttctctcacttttgatgctgacacaaacatttttatgttagagggcatggatctaacccttcactcgaataaccgtattgttagcgtacaagttgctgaaaagtatgaagatgaagagctaactaagataagtcgatgcgcatgtcttttcaggctgcaatgttcgataagagcaactgaagcagggcaagatccagaaacatctaaagttctgttcgaaattgaagctcagcacgatgttgtttttgactcagactcagttgtaacaatcgaagagatagaaaagtttagcgctgatgacataattaacaatgcggcttggccgtattggaaagagcatgttacttcgctttgttccaaagctggactcagccctttgcaggtgccatcagctcagaagaatgatccaataaaaattacagccaagcgagagttgtaa

SEQ ID NO: 146888 - DNA, 2391 bp, Enterobacter cloacae
atgacggaacaatatcaacatcttagtattgctaaagaatctcttcagaaccctagacgcacacgccagttcaaaattccgagaacacagcgtgctgacttgcgcttacatggacgcattttgtctgagcaattacgaagtattacacaattagctaatccacaaattccaggaagggataatgatggtcggtatatgctgaaattacagtataccgggatgttagatattgctcatatggataggcatggaatagagttcgtcagtcaagaagataaaacaatatgtattgcctttgctgatgaacgaggaatcgctctttttgaggaacacctttcacagcttggtcacgctcatataacctaccagcaaattttaaccgcattggatagcgttgatgtttggactaatgaggatcgcaaaagctggtcagtgaaacagtatgggtttcctgattcagattccttcggtctagatgttgagctgtggccggtagaaacgacacaacatccttctcgagctcggatctgcggagaatttgaaaactggctccgtgaaaatatgattcatcgcttggatagaattaatcttgatagtttgctgatgtaccgagtacgagtaaatttagagcaagctgaaaaactgcttgagcaccgtgatgttcgaatggtggatcgtcttcctgtcagtggaatctcttatgagaaactgaacaaagatatcaattttatccccgaatatatcccatctccattacctaatgccgtaaaagtttgcatccttgatagtggaattaataccgcacatccattattgcgtagtgcaatagccgagagtgcctgcttcgtggataatgaagatgaatctgaccattttggacatggtactgctgttgcaggtattgccctatatggtgatgttgaggcttgcgatgctagcaatttctggcaaccgtcaatgtggttatataacggcaaaattcttaatgcccaaggggaatttgatactgctacgattgaaacaactttgaccgaagcagttgaatatttcgttggtctaggatgtcgtatttttaacttatcacttggcaatgcaaatgcgccttacgatggaaagcacatccgaggtattgcttatgtgcttgatgtgctggcgaggcgtcacaatattcttttcgtagtttccgcaggtaattttaatggtagcagtgaccctgatgttccagtagaaagttggcgggcagagtatcccagctatttaatccacgatagctcagttattattgatccagctcctgctctcaatgttctaacggcaggaagttatgcaaggcataatgcaacatttgacgctcaacgtcgtgctgatgaaattagccatttaagccctgcaggtgaatatcaaccttcaccattcacacggcatggaccttctgtgaaaggtgcatttaaaccagaaatagttgcgcacggtggaaactttgcggcacctatgcgtaatgctggaggtcaatggcgacaacatgccagaggacttggtgtgctaagctgccaccatcaattccaaggaagtacacttttctcagaacaaagtggaactagtttttctgcaccttatatcacgcacctcgctgcacgtttactcaatgaatatccagatatgtctgccaatatgttgcgagcgatgcttgtcaatcacgctgcgctgacaccgcagatggagaatacattctcagaagaggttacagaacattataaatctgcaccttcaacccgaaatcgtagtgttattcgagatgtcgttggatatggaattgttgaggaagatggtttatatcgctcgtccgaggaagtagttgttatgatgtgtgaagagcaaatctctgatgatactcatcaattctttgagcttccattacctacatcttttttaagaactcagcgagcagtaagagaactgcacattactttagcgtattcaccagcagtcaggacaacgcgattagattatacagcaacgcaaatatcttacaggcttgttaaaggttcttcgttgcaagatgttcagcaatactttaatcatgatatacaagatggtactgattctaggaatgacgatgcggtaagcaatcgttctattactgcacaacaacgtgatcatggtacagtacaatcctctagttggacttttaagcaacggtctccagatgaaaagtggtttgtggttgtaactagaaatgatcgtgagtggggcaccccacttaatagccaacatgaaccttatgcattagttgttactgcaacggacagagaaaacgctgaagctaatctttatgccgaaattgaggcacgaattcgtgagcaggagcgttccagggctcgggtaagttaa

SEQ ID NO: 146889 - DNA, 987 bp, Enterobacter cloacae
atggctaacggtaaggttctcagacagcttataaaagctggagcgacaggtgatgtcgcggccttccgtcgtgtttcggaagtgatcattgaagaagaacgacaaaaacaacatcatcttcttgccaatgaccttgaacatattctttatggtgatcatgcgatacaaacctctcgagtgcccgctgcaccgccagtgccagtggacaaagagcgaggcttgcccttgctagatattagacagccaagtcgttctttagatgaaatcgtactacctgaatcaagttcagatgctgtcgaagagatacttgaagaaaatcgtagggctgatgtgttacgcacttacggaatgaaagctatcagtaaagttattttttttggtcctcctgggtgcggtaaaactcttgctgcagaagtagtggcttgtgaattggatatgccgttggccatcgtcaggcttgatactctggtttcttcatatcttggtgaaactgctgctaacctacgccaaatatttgattttatctctcaatacccaatggttgtactcttcgatgagtttgatgctataggtaaagaacgtggggatagtggggatcatggtgagttaagacgagttgtaaatgctgttttacaaatgatggatgcataccaaggaaaaagcttaattcttgcagcaacaaaccatgaacatatcctggatagtgctatttggaggcgttttgacgatgctatcgagtttccactacccgataaacatcagttgtcagaattgatgaaactcaaacttcgtggtattcgccgccagtttgagcttgaagacgatgaggttctctcactattccttggaaaaagtggtgctgatttagaacggattgtaagacgtgcaatcaagagaatgattttacgtagccaagagtttttgactctcaaagatcttaagaatgcacttttacgggaaaatataaacaaaactcgtcagggataa

SEQ ID NO: 146890 - DNA, 819 bp, Enterobacter cloacae
atggaaaccgtaattcaggtactggaaaaaatggggcgggcgacataccgcgaagttgctgaccgtcttgaaatcgacccggttgatgcgctcaccatgttacgtgagcagcgtgatcaggggttatgcgattttggagacggcggctggttcctcggtaccgtgaaaggtcagtctcagcagtcaacgccaaaggcacctgttcatcaggccccgcgtctgaaaggtgaggagccggaacccgttgatcctaatgtcgtccgactgcagctgcgtgagcagggggcaatgacgacagtttcgctggctgcggccgtcaatcgcaatgcccgcggaatggtctctgttcttcgcgcgctggagcgccagggcgttgtggtgaagaacgggaagggtaaaggcgttacctggtcccttgctgttgttacagaacccgttaagcaagaaccggtaattgagcagaacgccacggcgaagactgcaacgcaggcaagcggtgaacagagcgcatcaacgtcagtgctgggtatctgtgtttccaacgtttccgaggcttacacgctggcgctgggctggtgtgcgaaatacctcggaattaaggacgaatcgacgagctacaccatcaaccaggaattcatcgcgaaggttgccgaatccgggatggtcaccgctattgttaacgcctggcagtccggcgcgctgcgtgatactgacatgattcgggcgcttcagaaactcgacctcatcaacccggcagacagcccggatgatgtgattgatgcgctccgcaatcaggcgccctcattgaccgggggctga

SEQ ID NO: 146891 - DNA, 771 bp, Enterobacter cloacae
atgttaattcgaaacatgcttctgaaatattacgcacctgaaagcggcggtgagggcagtggtggtggcggtatcgaaatcacccccgaaatccagaagctgattgatgagcgtgtgaccagtgaagttacaggcctgaaatcaaaaaactctgagttgctgggcaccatcaagcagcaaaaagaaaacctgtcacgttttgacggtatcgacccagacgctgtacgcggcattctccagcgtttttctgacgatgaagaggcgaagcttatcgccgccggaaaaattgacgaggtgctggataagcgtaccgagcgcctgcgtgctgacgttgataagcagatcaaagcggcaaacgaacgcgcggaaaaagctgaagcgttctccaacaaattccgggatcgggttctcggggatgcaatccgtgcagcagcctccaaagcgggcgcgctgcctgaagcttctgacgatcttattctgcgtgccaaaggcacattccagctcaacgacgaaggcgaggccgtagcagttgatgcaaatggcgatgttctgttcggcaaagacggcaaaaccccactaagcccgcttgaatgggcggagtctctcaaggagacggctccacatctgttcccgcgcgcagaaggcacgggcgcgggtgtacacaagccaaacggtggtggaagcctgaaacgttccgaaatgagcgccagcgacaaagcggactacatccgcaaacacggccagcaggccttcctcaaacttccgaaataa

SEQ ID NO: 146892 - DNA, 879 bp, Enterobacter cloacae
atggcaacgactgttaattccgacctggttatttatgacgatctggcgcagaccgcgtttcttgagcgtcgccaggacaacctggaagtgttcaacgcttcctccaacggtgcgattttgctggataacgaactgattgaaggtgatttccgcaagcgagccttctacaaagtgggcggttctatcgaatcgcgtgacacgaactccaccgataaagtgaccggcaagaagattggcgccggtgaatccgtatccgtcaaagcaccgtggaaatatggcccgtatgaaaccaccgaagaggcattcaaacgccgcggccgctctgtcgacgaattctccgaagtgatcggcgttgatgtggcagatgccacgctggaaggctacgtgaaatatggtctgaaagcactgactgcggcgattggtgctaacaccgacatggtcgtaaccgccgacattgcgaccgacggtaaaaagaccctgacgcgtggcctgcgtaaatacggcgacaagtttaaccgcgtggctctgttcgtgatgcactctgcgacctacttcgacattgttgatgaggcgattgccaacaaaatctacgaagaagctggcgtggtggtttacggcgggcagcctggcacgctgggtaaacctgtgctggtaaccgacaccatggacgctgatgcgatccttgggctggtggccggcgcagtgactgttaccgagtctcaggcaccaggcttccgttcctacgatatcaacgatcaggaaaaccttgcgattggctatcgcgctgaaggtaccgtgaacgttgaactgctgggctacagctgggataactggacctgggtgagcgccaacacgttcaccagcaccacctgccaataa

SEQ ID NO: 146893 - DNA, 6990 bp, Enterobacter cloacae
atgaaagatggcagcgtgatccgctgcaataattattttgtcgaagacacggaaacccataatcattccgaactggtatttaacgataaccaggagctgacgcatatttcatttgccgatgccgtggaagcatcaggcgttgccgccaccgaattaaccgcccaggctgcacccattagcagcattgaacctttcctggagcagggaagcgtcttaagcgatgcgccgtggggctggattgccggtgcggcgttagggggcggtgcgatcggcgcactgctggctcacggcggcgatggcgaaaccaaaaccaaagttattgataatacaaaagaagtcgaaagcgccacgccgacatttttgctgacggacaacgcgggtgacaagcagggcgtgctgagtgcaaaagcggtcacggatgacaacacccccaccttcagcggtaccgggcagccgggcgcgaccattcaggttaaagacggcagcggcagcactatcgccagcaccatggtcgcgaaggacggcacctggacggtaacactcccgacccaggccgacggggagcatacctggtctgtcgtacagatcgacggcagtaaaacgacctctgcgggcagtatcaccgtaaccgtttctacagcggatgccagcgtgacgctcgccaccacggcgggcgataacgtgatcaacgccagcgagcagtccgctggcattacgctgtccggcaccagcaaaaacctggcgcagggaacggcgcttaccgtcacgctcaacggcaaaacctattccgcagaagtgggggcaaacggcgcatggagcgtgaaggtgcctgctgccgacgcgcaggcgctgggcgatggcacctggacggtcaacgtcagcggtaaagacgcggcgggcaacaccgtgtccggcagccagacgattggcgtcgataccgcctcgccagtgatctctgtcgacacgatcgcccaggacaacatcatcaacgcggctgaacataatcagccgctgacgctgaccgggaaaaccgatgcggaagcgggccagattgtgacggtcacgctgaacggcaaaaatcacacggcgaccgtgggcagcgacggcacctggtccgttacgcttccggccagtgaagtacaagcgctggctaacggcgagcacaccctgacggtaaacgtcagcgacaaagcgggtaacgggtcctccgtcaccgccgatttcacggtcgataccgcagcgccggtggtcaccatcaacaccgtcgcgggcgacgacattctgaacaccagcgagcaggggcaggcgcagattatttccggccaggcgaacggcgcggcagcgggcgacgttgtcaccgtgaccgttggcggcaagacctttaccggtgtcgtccaggcggacggcagctggagcgtcggcgtgcctgcctccgtcattggcgcgctgggggaaggtagccacagcatttcggtcgccgtgaccgatgcggcgggcaacaccggcagcgcgacgcacggcattacgctcagcggcaacccgccggaatttacctttgaccccatcagtcaggataacgtcctgaatgcgcaggaggccatgcagcccctgagcctgagcgggaccagtaatctgccgaacggcagcaccgtcaccgtgacgctgaacaacgttaactatcaggccacccttgagaacggtcgctggtccgttcaggtgccggtttccgacgtgctggatctggcgaataccctgtacaccgtcagcgtcagcggcaccgacagcgtgggtaacagcggctccgccgaggcgaatctgctggtcgataccgcgctgccgcaggtgatcgtcaacacctttgccggggataacctggtcaataacgccgaagcggcggttgaccaaaccctcagcggacgcgtcaccggcgcggcggcgggcgataccgtctctgtcaccgtgggcggcaagagctacaccgcgacggttggcagcgacctgaaatggagcgtgacgatcccatcggccgacctccaggcgtttggcgacggcgatttaaccttcagcgcctctgtcaccaatgcgcacggcaataccggcaccggcgaacgtgatatcaacatcaacgccgaactgccgggcctgcgcgtgaacacgatctctggcgatgacgtgattaacgccatcgagcagcagcaggatctggccgtcaccggctccagcactcatctggctgaaggcacacagatcaccgttaccatcaataatgtcgaatacgtcaccacggttaacgccagcggcagctggcagattggcgtgcctgcggcggaccttcaggcatggacggcgggaggcatgaccgtcagcgtcagcgcggaagatgcctggggcaacaccgtggcggctgaacacccgatcgagcttgacctgaacgcggtggccgtcaccatcgataccgtaaccactgacgatatgctgaacgcggcggaaaaaggcgcggatgtcacgctttccggtcagacgcagggcgtggaggccgggcagaccgtggtggtgaaattcgcggatcaaacctttaccgcacaggtgcagcaggacggctcctggcgcctgaccgttccggcgagcgcgatggaaacgctgatcgacgggcgggcgcaggtgagcgtcagcgtgactaacgtcaacggcaacagcgcggacgcttcacgcgtggtgatcgtcgatacgcagccgccagccattacgcttgataacctgaccgacgacaacatcattaatgcggcagaagcgcagcaggatctgatgctcagcggcagcacaaccgctgaagcgggccagacggtcaccgtgacgctgaatggtaaatcttaccagaccacggtccaggcggacggtcgctggcagctgaacgtgcctgccgccgacgttagcgcgctgagcgatggcaatgtcaccgtgacggccaccgtcagcgacgtggcgggcaacagcagcagcgcggaccgcgttgggctggtggatgccaccgtgccgcaggtgaccatcaacgatttcgtcaccgacaccaacaccgttaaccagctggcccatgctcaggcgcagatcctgagcggctccgtcaccggcgcggcggcgggtgatttggtcatcatcaccatcaataacgtggactacaccaccgtggtggatgcggcaggcaactggagcctcggcctgcctgcgtccgtcgttcaggggctgacggacggcacctggaccattaacgtctccgtgaccgaccaatccggcaacaccggcagcagttcagtggatgtggtggtcaatactgtgacgcccgttatcggtattaacacgctggccgcggatgacgtgatcaatgcggcagagaagggcgaagatctgctgctttccggcaccagcaaccagccggaaggaaccaccatcaccgttaatctgaacggtatcaactacaccgccaccaccgacgccagcggcaactggagcgttaccgtccccgcctctgcggtgagcgcgctgggtgaagccaattacaccgtgacggcgagcgtcaccgataatgtgggcaacagcgccgctgccacgcacgatgtactggtggacagctcgctgccggttgttaccctcaacaacttcgcgggcgacaatatcgtcaacgcggcggaagtggccgcagggcaaaccctgaccggaaaggtttctaacgcggcatcgggcgataccgtcacgattatcctcggcgggcagacatacacggccaccgtacaggacgatctcacctggagcctgccgttaacccagagtcagttaaccgcgctcggtaacggcgacctgaccgtatcggccagcgtgacgaacgcgcacggcaataccggatcgtcttccctggatgtcaccattgacgcccagctgcccggcctgcgcattgataccgtcgccggtgacgacgtcattaacgttattgaacacgcgcagaacctggttatcgccggcaccagcaccgacctggcggcgggtagcaccgtcaccgtgaccatcaacggcaagagttattccgcctcggtactggcggatggcagctggcaggctgcggttccggccgccgacgtctcccggtgggcggacgggtcgctcaccatcagcgccagcgcgcaggatacctccggcaacccggtgaatatcggtaccgttgtggatgtcgatctcgccccggtggcgataagcatcaacagcgtgacggacgacaacgtgcttaacgcggcagaaaaaggccaggatctggtgctgtccggctcctcctcgaacgttgaagcgggccagaccgttaccattatctttgcgggtaaaacctggaccacgacggtcgatgccaacggcgactggacctgcaccgtaccggctgccgatctgagcggcctgaaggacggcgacgccagcgtacaggtcagcgtcaccaacgtgaacggcaacgcagcctcttcctcgcaggcattcagcgtcgataccaccgcgccagcggtcaccatcaacaccatcagcggcgacaatatgctgaatgcggcagaggcggcgcaggatctgaccctgagcggaacatctactgccgaagcaggccagacggtcaccgtgaccttcaacggcaatcagtacaccgcccaggtgcaggcgaacggcagctggacgctggacgttccggcggcggatctggcggggatcgccgacggcagcgcggcggtcacggtgaccgtgtccgataaagcgggcaacccggccagcgcgggggcgtccgtgctggtcgacactaccgtgccgcagattaccttcaacattgtggcgggcgacgacattgttaatattgccgagcacggccaggcgctgattgtcaccggcaaggtgacgggcgcgcaggcgggcgatgtgattaccctgaccctgaacggcaaagactacaccgcgatgctggatgcgtccggcaactggagcgtgggcgttccggcgacggacgtgggcgcgctggctaacggcgatcagacgatctccgcgacactcaccgataaagcgggcaacagcactagcgcgacgcacgcgtttgacgtctccctgaccgcgccggtgctgaccattgacaccgtgtccggtgacgatgtgatcaacagcagcgagaaaacgcaggatctgaccatcacaggtacggcttccgggctggcagcgggcgcggtggtcaccgtgatgctcaacggcaaagcgtacagcgccacggtggacaccaatggccaatggaccacaaccgttccggcgagcgaggtggggcaactgggtgaagcgctttacaccgtgtcggcctccgcgacggacagcgtcggcaacagctccagcacctcgcacaccgtgaacgtggaatccgtgctgcctggcgtcatcatcaacaccgtggcgggcgacgacgtgatcaacgcagcggagctggcaaccggccagaccattagcggcacagtggtgaatgccgaagcgggcaacaccgtgactgtgtctgttggcggccacagctacaccgcaacggtacaggacaatctcacctggtccgtcagcgtaccggaatctgtgctcaccgcgctgggcaatggcgatctgactgtgaccgccagcgtcacgaacggcgtgggcaacagcggcagcggcgagcgcgatatcactatcgacgcgaatctgccgggcctgcgcgtggacaccgtagcgggcgatgacgtgattaacagcatcgaacacgggcagaatctgattatcacgggttcaagcgacggcctgacggcgggtacggcgctgaccgtcaccgtaaacggtaaaacctatccggccaccgtgctggcagacggcacctggagcgcggcgatcccttctgcggacgtgagtgcccttgccgcaggcacggtcaccgtgaacgttgaaggccagagcagcgcgggcaatccggtgactatcaaccatgatgtgacggtggatctggcaaacgtcgccatcagcattgacgccatcgcttccgatgacgtgatcaacgccgccgagaggggtgcggatctggtgctctccggcaccacctcgaacgtcgaagaaaaccagatcgtcaccatcaccttcggcggcaagaactacaccgccacggtggacgctgagggtaaatggaccgccacggtgccgtctgcggatctgaccggtctgaaagacggcgacgccagcgtgcaggtcagcgtcaccaacgtgaacggcaacagcgcgtctgcgggacgcgagtacagcgtggatgctaccgcgccgtccgtgaccatcaacatgattgccaccgacgatatcctgaacgcctcagaagcgcagtccgacctggcaatctctggcaccagcaccgccgaagcaggccagacggtgaccgtatcgctgaacggcaaagattacaccacaaccgtcagcgcgaacggcagctggacgctgaacgtgccggcagctgaccttgcaggattaaccgacggcagcgtcaccgtgaccgcggccgtcagcgacaaggcgggtaacccggcgtcggtggaccacaacctgacggtggacgtcaccgttccggcagtgaccatccacaccgtggcaggcgacgacgtgattaacgtggctgaacacaatcaggcgcagattatcagcggctccgccaccggcgcggcggcgggcgataaggtcaccgttaccatcggcggccagtcgtacaccaccgtgctggatgcggcgggtaactggagcgtgggcgttccggccagcgtcatttccggcctcagcgacggcagcgtgaccgtcactgcgtcagtcaccgacgcggcgggcaataccggcagcggcacgcataatgtgaccgtcgataccggtctgccgtcggtcagcttcaacgccatcagcgatgacaacgtcctgaacgccgttgaaaaaggctag

SEQ ID NO: 146894 - DNA, 1392 bp, Enterobacter cloacae
gtggtctggcatatcgacctgacctggaaatttccggatggctcaggcgacacggcctatacagagattcagcgcgccacaactgccgactacgccaatcctgaactgctggtcctggtgccgtacccggctgcagattatcagcatggccccatgcctgccggcgttcgccagtggtaccgcgcgcgcctgattgaccgtatcggtaacgccggggactggaccgactgggtcatgggcacgtcctcgatagatgtcagtgaaataaccaacgacattctggaggacatgaaaggctccgatacgttcaaagacctgatcgagaacgcggtggacagcaatgaaaaaattgctggcatggctaacgatatcaaacaggccaatgacgaactggagcagcaggcgcaggaaatcgccaaaaacgcccaggatattgggaaagttcagaccagcgttacaaacctgtcgagcacggtcggaaatgtgtcttcttctctgagcgagcttgagcagacagtggcgaccgctgataccgcgctgggtcagcgaatcgataacatcagcgtgtctgtggacggtatgacgggaggagtgaagaactctgccatcgcgattattcagggcaatctggcgcaggtagcggcgcgcaaaacgctgtcggcatcggtcgccggtaacagcgcgcagctggaccgcattgatgaggtgatcgtcaacgagaaggaggcaacggcgcgttcgctgctgagtttgcagactgacgtcaacggcaataaggcatccatcaacagcctgaaccagacgttatccgattaccagcaggccacggccacgcagataaacggcatcacagcgaccatcaacggacatacctcagccattaccactaacgctcaggccattgcgaacgtcaacggcgacctgaaggcgatgtacagcatcaaggtcgggttatccagcaacggccagtactacgccgcagggatggggataggcgtggagaatacgccgtccggcatgcagtcgcaggttatcttcctcgctgaccgcttcgccgtcactcaccaggccggagccacggtgtcccttccgttcattatccagaacgggcaggtgttcatcaacgatgcttacttcagggatgccagcatccagttcgcaaaaattaccgattcactgaaatccaataattttgtgaccgggaagacaggctggaatatgccgaaaagtggtaacgctgaactgaacaatgtcaccgttcgcggggctttgtatgcaacgactggtaatttcgggtttagcgggccgaacaaggcgacggtgatagacagtaatggtgtaactatcaacctgaccggaggcgggcgtatcgtacttggagaatgggaataa

SEQ ID NO: 146895 - DNA, 1992 bp, Enterobacter cloacae
atgtcgaagattaccgttaaagcaggtgctgatcacatcaatgatcttgcaactgctaagccagtctcagcgatcagtgaacttatatggaatggatttgatgccaagtctcaatgcgtagaagttataattaataaaaaccctgcgtttgaatcaatcgactccattatagtgaaagattacggttcaggaattgatcacaataaagtatctgatttattcggcaacttaggtgagtcttggaagaagcaagccagagcaaacggtgatagatcactccatggccaatatggccgaggcaggttcaaggctttatccttgggctcaaaaattaaatggaacacgatctttactaaagatgataagagtttcaagtatgtaatttcttctgatgctaacagcgtaaaagattttgagataggaccgataacatctcttgaacgtacagatagcggtaccgaaatagaaatttttaacgtcactgaaaatgttaactatttgcttagtgaagaagcactttcagagttggtgatggaattcgccttattcctgactgagtaccccaataggaaattaattttctgtggtgttcatgttaaacctgaggatgcttgggatgataaaacggactttgatttaggtgatattgagttgcctaatgagcaaaaggctaaggtttctctatctataattgaatggaaaaagaaaaatatacagcgtgaatttcattattgcgacgccctagggttttcctattacaaagaaaaacttggacaattagtcagagcgccgggttatgaatttaccatttatgcaaaatgtgattacttcaaagcactaagtgaaagaaatgaaatctctttgggagatatgatcccggaattaaaagtaatcaaagacgcagtgttgcaaagagcaaggttgcattttatcgataaagcattcgttaagaaaacccagatagtagattcatggaaagaggaagaaatctatccgtacgatgatgaattggtgcttgatcctacaaaaatcgttgaacgaaaagtctttgatatcttagcggtcaatgttcaaagttatcttaaaactttcgaaaaggctgataagaaaacaaaaaaattcactttcatgctattgtctcaagccatcaaacagaatcctgcttctgtgcagaaaataatctctgaagttcttggattgaagaaaaaggagcaagatgaattggcggaattgcttgagagcacaactctctcatcaattataagtgcttcaaaaatagtgactgaccgtcttaattttcttaatgggctcgacaatttggtgcacgacaaagagtctaaaaagaatttgttagaaagagatcagttgcacaaaatacttgagcgtgaggcttggatctttaaagaagattttttcttggctggttcggaaaaccgtctggaggaagtactacttaaacatatcaaacatctcggaaagcgtgaggatgatacgccagcagggccggtgctcttacctgatggaaggcaggggcgtgtagatttgatgtttgcaaaatcacgtcaaccatatgaaggttttactgagtatttagtagttgaattaaaaagaccgtctcagaaaattgattatgatgttattggtcaagtagaaaaatatgctttggctgtaagtgccgatgaacggttcgaccacgcaaactccaagtggaccttcatagctgtttctaactcgatggatgcatatgctacgaaaagagctcgtcaacgtggctggcccaaaggaaagacccttgatgatgctgatgctaacgtcgaggtttgggtaatgacttggtcagaggtgattcatgctgcaaggtctaaattaagtttctttagccagcagctgaagtatgaggctaccagaggaagctcgacagagtatcttgagcagaagcataaagaatttcttcctgaattacctgctaatgaagtaacaaaggtctcatag

SEQ ID NO: 146896 - DNA, 516 bp, Enterobacter cloacae
atgaaaattaatccgggtcttatatgcgttgttgttattgctgtcctttcggtcgctctcgctaagagttgctccgacgccaatagccttcagagcgataacgacgttttgcgaagtgacaactttatgcaggggcaggtgattgccacccaggcattcaacttcaatcgattcaatcaggttgcagaacatgccaacaggcttaactccctgatcgacaccagcaccgaagaaaccgtaatcgaataccgggagattctacgccgtgaaaaaacctgtgatctgcctgttcctgctgacattgctggtgggctgctcgaatatgcgtaccgtttacgttccagcgcaatgcacaccgataccggcagacctgacgaagccgatgatcgttccgctgccgccagctcaatgacgtactgccaggctgtgctctggattaagccgctgctggccgtgattgaaaagggtaacaacaacttcgcaagtattcgtgagacggagaaagagcgtcaatag

SEQ ID NO: 146897 - DNA, 399 bp, Enterobacter cloacae
atgaaaaaagacgtatgcaaggaagtaagggctgcttatgtctcatttatgaaaaaccactcgcttttgtatagtgcgaaacagaattacaagtctttggaacaacgagacgatgctgaaggtaatacgaaaagagccattgctcatgaagttattatggaaagaggacagttgtgtttagaaagcaagatgctaattgattcgtatttagacctcaaagatactcatgataaggagttttttgatagtctcaataacgttagccgtatggcatttaaggctgaatgtgacggtgcccagttaggccaagctcagggcaagtgtgcgggtatttgttttgagtttattgaaagaagacgtaaagaaattacaggcctggtagatactatcgggaactaa

SEQ ID NO: 146898 - DNA, 465 bp, Enterobacter cloacae
atgaccaccaacaaatacgcgacattgcgcggcacaatcgccagagctaaacgcaacgactgtcacaaggtagtgatgcgtgtgacgttagttgaagaactccttctccaactgtcaaacgctgagaagcagattgctgaattggctacggagaatgcatggctgaagcagtttcctgaccaaatcgttggcttcatcggaaagctgggctcaagcgaaattggtagcgaaacgaaagaaaaaattgaggccgcagcgaagaaaatcaaaaccccagccaccgacgtttttcaggctgaagtgattaccaacgctatcaaatccgcgcttaacgattgttcggagtgcctcgatagggactgcatcatggattcgaacggcataagttatgaagatgctgcactccgtgaagcgggtgctatggcactgcatgatgcgttacttcgccaggagcgtgccgtatga

SEQ ID NO: 146899 - DNA, 510 bp, Enterobacter cloacae
atgagcactattaccagagaacgcctactcataatccagctgtggcgcgaaacatatgggcctggtagcaacgttgttttgccagcagaagaagcggaggagctggcgcgtatcgcgcaggaatcgctgggggctgagcctatttatcaatgtgaattctgccaccatgacggcgatggtgaactgcaatggcattgggaggatgtgaacaaagacttttacgaccagtacgatccagagcgccgcggtaaacgtcgtattatttacacaacccagccagtgcagagagtgccggatggttgggtaatggtgcctatcgagccaacagaggacatgatcatccacgggctcgaggcagaactgcgcgaggagtttcgtgacgcggaggcatgggaggcattcgaggaaatgagcggttgtgaacaggcagcccaacgcgccaagtggtgctggtctgccatgattgcggcagcgccgaagccgctaccatccaccagcagcaaagggtaa

SEQ ID NO: 146900 - DNA, 1059 bp, Enterobacter cloacae
atgcgtttgaatcaactgcccggatatggtcttccagatcttgccttctggccacaaccttggtacgaaacagatagatggcaaatgtacagtctgaaacttcgtaccgatggaacagttcactggttcaaacgttacttagaacgcggtattcctggccatgcatacgccgacatctatgaaaattacgacgatgccagaacatcggcaattgagctgaataaaaatattgattttgatattgacaaacttcctttacccttagctgaaaaagagtcattgcgtttaaaagtcgataaagccctaacagctaaaacgcgtttgattgatgaagagcaagcaatgctcaaagaagctttaaaaaaacacgcaaatgattcacgtatttcagcggatgagctaattctcaagcccgagttagagaagctgcgcgaacctttatacattgctctcaatgaaatgccttatctgcgttgcatttttctacctcattatcatgtttgtctttatcttgaagaaggtaatacctggcagcggttaaattgtcctacgtcaaaagcggcaaaaatttattatcaggagcgtattgcacgaggttttggtttatctggagaagcacattggggcaaaaccaaatcagagattcgctcgatgcttcttccgcgagccaaccaactgctacaggaatctagtgtaaagagaatgttggatgaagccctaagaaacgggaaaaaagtacttgtctcaggaaattatgttttctggtatgaggacaagaaccaattaggatggtgcgttaaagtgattaacgacattgatggtaactcaagaggtaatacaatctggaaggcgggtacaattatttctaaaaatcatggccggattgttgtgcttccgtacacgaaggaaaatggcgaacacgtcaaaggctatacaaagaacgctcctaatgatggaaatgcgcttccaagacataaggatgaatatgttgagcttcccttcgaaattcttgatggtgacttaatgtatagtttgttcggggagcttaaatacgaatag

SEQ ID NO: 146901 - DNA, 843 bp, Enterobacter cloacae
atgtcagacatcacaatctcccgtccggaagtggtcaccgggcatacggacgttatctgctccaccagtatccaacacgttgtgacggtacggaatgcagcactgcaacaaaccgaaacgcttatccggcaactggcagaaatctcagtgctgacagcaggcattggcggcaaaaccgccctggactgggcgatgaaacagaattttcgctgtggctgctggctgatggaaaaaccggaagcagcaatgaaagccatcacccgcaatctcgatcgagaaatctggcgtgacctgatgcaacgttccgggatgctgagtctgatggatgcgcaggcccgggacacatggtaccgatcactggaatatgataattttccggaaatcagtgaagcgaatatcctgagtacattcgaacaactgcaccagaataaggatgaggtgtttgagcgaggggtgatcaacgtcttcaggggactgagctgggattacaaaaccaactcaccctgtaaatttggcagtaaaattatcgtcaacaatctggtgaggtgggaccggtgggggcttcatctgaacagcgggcaacaggccgatcgacttgccgatctggaaagaatgctacacctgttcagcggcaaaccgatccccgacaaccgggaaaacatcactattcgtctggatggtcacatccagtccgttcagggtaaagagcgctatgaagacgagatgttcatcattaaatactttaagaagggatctgcacacatcactttcaaaaggctggaactgattgacagaattaacgatataatagccaggtactttccttctgtgctctcagcctga

SEQ ID NO: 146902 - DNA, 198 bp, Enterobacter cloacae
atgaaatcattaaccacggaaactgcactggatattctgattgcgtggctacaggacaatatcgactgcgaatcgggaattatctttgacaacgatgaggatagaacggattcagcagcactgttgccctgcatcgaacaggcccggaaggatgtccgtgctcttcgtcatctgcagcttctgcaccagaaccggtga

SEQ ID NO: 146903 - DNA, 489 bp, Enterobacter cloacae
atgaaactggccctgacgttggaagccgacagcattaatgtgcaggcactgaacatggggcgaattgtcgttgatgtcgatggtgttaatctcactgaactgattaacaaggtcgctgaaaacggttattcactccgcgtggtggaggaatccgaccaacagtcaacctgcacactaccaccgtttgcaacccttgccggcatacgctgcagtaccgcacatatcacggaaaaggataacgcctggctgtactcgctgtcacaccagaccagtgacttcggtgaatcagaatggattcatttcacaggtagcggatatctgttacgtaccgatgcgtggtcatatccggttctgcggcttaaacgcctggggttgtcaaaaacgttccgtcgtctggttgtcacactcatccaacgttatggcgtcagtctcattcatctggatgccagcgctgaatgtctgccggaccagcccactttcgattggtaa

SEQ ID NO: 146904 - DNA, 294 bp, Enterobacter cloacae
ttgctggaccagcattacggccttacgctgaatgacacaccgttcgccgatgaacgtgtgattgagcagcatattgaagctggcatttcactgtgtgatgcggtgaactttctcgttgaaaaatacgcactggtacgtaccgaccagccgggattcagcgcctgtacccgctctcagttaataaacagtattgatattctccgggctcgcagggcaaccggcctgatgacccgcgataactacagaacggtaaataacattacccaggggaagcatccggaggcgaaacaatga

SEQ ID NO: 146905 - DNA, 327 bp, Enterobacter cloacae
atgagcaaccctactaggggcctgcagcgggagattacactgcgcctgggagcccgtctggtgcaggaaggcaaccgactgcattatctggctgaccgggccagcatcaccggcaagttcagtgacatcgaatgccggaagctggatgaaacattcccgcactttatccgccagatggaatcgatgctgaccaccggtgaactcagcccccaccatgcccactgcgttaccctgtaccacaacgatttaacctgcgaagccgacaccttcggctcctgtggttacgtttatctggctgtttatccgacgcccgaaacgaaaaagtaa

SEQ ID NO: 146906 - DNA, 222 bp, Enterobacter cloacae
atgaaaattatcagtaaacgcagggcaatgacgatataccgccagcatcctgagtcccgaatctttcgctaccgcaccggcaaataccagtggcacggtagcgtctgtcattacaccggcagggacgttccggatatcgccggagtcctcgcggtatacgccgaacgccgccaggaccgcaatgggccctatacctgcctgatgagcatcaccctgaactga

SEQ ID NO: 146907 - DNA, 210 bp, Enterobacter cloacae
atggttgaggtaattaggtggtatcaaatctggcttattgagtttgtgttggatgttagttgggtgatgctgactaaattgcttggtgtgtattgcgtaggtgtgtattactggaatattggggtttatgtactgatatatattaacaatccgtcacgtattaatactcaacattcaggccagatgcggcttgatatttcattgtgttaa

SEQ ID NO: 146908 - DNA, 957 bp, Enterobacter cloacae
atgtttattatggcgatcagcgcctggtatttactgcgcggacgggagcgcgatgtcgcattacgctcgtttgccatcggttccgtcttcggtactctggcgattattggcacgctgcaactcggagacagttctgcgtatgaagtcgcgcaagtacaaccggtaaaactggcggcgatggaaggggagtggcaaacggaacctgcacctgcaccgttccatgtggttgcctggccggaacaggatcaagagcgtaacgcctttgccatcaaaattcccgcgctgctagggatcctcgccactcactcattagataaacccgtgccgggtctgaagaatttgatggctgaaacctacccacgcttgcaacgcggacgtatggtctggctgttaatgcaggaaatatcgcaaggcaatcgtgagccgcatgtgttgcaggcattccgggaactggaaggtgacctgggctacggcatgttgctctcccgctatgcgccggatatgaatcatgtcacagccgcacagtaccaggcggcgatgcgtggtgcaatacctcaggttgcgccggtattctggagtttccgcatcatggtgggctgtggttccctgctgctactggtgatgctgattgcgcttgtccagacgctgcgtggcaaaatcgaccagcatcgctgggtgctgaaaatggcgctctggagtttgccgttgccgtggattgcgattgaagccgggtggtttatgaccgagtttggtcgtcagccgtgggcgatacaggacatcttaccgacatactccgcgcactccgccttaaccacaggacaactggctttctcactgatcatgatcgtagggctttacaccctgttcttaatcgccgaagtctacctgatgcagaaatatgcccgtctggggccgagcgcgatgcagagtgaacaaccgacgcagcaacaggggtaa

SEQ ID NO: 146909 - DNA, 363 bp, Enterobacter cloacae
atggattacagcaaactcagcgatggtcaaatcagcgtgcttctcgcaaaccttcttaagccgaaatatgaagcagaaatcagtcctcatcactctggaggtgctcaacttagctgggattggtgtggaaccaaagcaaccactggcttcttccctttgcacaaagcggaagagcttttcccgataatgaagaagcatcggatccggctcgttccatcaggaaagactgtgtggatggcatcacacgaattaggagtcaccgccactcaccgtaatccacttcgcgccgtggcaatcgtctacctccttttgcaggagtcagccaatgttccaactaattcaacggggtcagatttacgctga

SEQ ID NO: 146910 - DNA, 432 bp, Enterobacter cloacae; identical to SEQ ID NO: 28367

SEQ ID NO: 146911 - DNA, 351 bp, Enterobacter cloacae
atggaggtggtagccgagggtgtggaaacacccgactgccttgcgtggttgcggcaggcgggttgcgacacggtgcagggtttcctgttcgccaggccgatgccggcggcggccttcgtcggcttcgtcaaccaatggaggaacaccaccatgaacgccaatgaaccgagcaccagttgctgcgtgtgctgcaaggaaatcccgctcgatgccgccttcacgccggaaggggccgagtacgtggagcatttctgcgggctggagtgctatcagcgcttccaggcgcgggccagcactgcgaccgaaaccagcgtcaaaccggacgcttgtgattcgccgccgtcaggttga

SEQ ID NO: 146912 - DNA, 477 bp, Enterobacter cloacae
atgaagcatctgaaaatgattgcagccatgttactgcttactcctttgacatcattttcacaggaaacagacagcgtggaggctttgaataaatatagcaccgctctgacagagctttttatgaaggaattgcagaagtcacagcaggcaaaaaatcctggcggaatggatttggtggctgctaacgacgctgttgcttctgcactgagcaaaaagttcttcatttttaaaccggctgatgaaaccagcatcaaaacttctgctgaaaaattaaaggcactgaaagatgataccgaagctcttgaaaagggctacaccatcattcagccagataatataggaagcaataacatttcatataaggtgacgacaggctctcggatctgctttgttcaggtcacacgcagtaagtcatcttcaaatactagaacggttgctgtcgatagcatagattgcacggggcctgaacagaaatga

SEQ ID NO: 146913 - DNA, 339 bp, Enterobacter cloacae
atggcaactgaaattgaagtcatgactgtcgcggagctgcatgctcaactacaacagctggttgatgaggggcacggagatattccggtttgcgcgtcagatctccgtgccaggtatccatttaaggcttataccgtgctcagtaccgcaggctataccgaagcgctgctgattaatgtgtggccggatgcccattttacacgtaaagagcccctgcccactaactgggggaaaaaccgtgtagcagagtggaacagtgatgccgatgccgttcgccagtcctgcggggccttcgcagataatcctcaatcaagacaaatgacaggtgataatttatga

SEQ ID NO: 146914 - DNA, 219 bp, Enterobacter cloacae
atgaatatcgagctgcgccatctgcgctattttgtcgccgtcgccgaagagctgcattttggtcgtgcggcggcaaggctgaatatctctcagccaccgctaagccagcagatccagatcctggagcagcaggtcggggcgcgtctgctggcgcgaaccaaccgcagcgtgagcctgacggcggcgggaaaacagtttctcgccgccgtcagatcctga

SEQ ID NO: 146915 - DNA, 1080 bp, Enterobacter cloacae
atgcagccacatgacacatttaccggctcataccagcccggtgacgtggaatttctgctaaagccggtagtcattgagatgacgccggttgagcaaaaagaagagctgattcagtcagggaagaaacattattcggacatgctcagtcaggagccagcgccaacacaatggcatcttgatttgtttcaccgggcgctggatcggggcgcagagagacttgcaaaagaagtcacacagctcgctattgctctggccgaacgcttcggtgatgagcccattgtactggccagtcttgtcagggctggcgtgccgctcggcgttatgctgcaccaggccctgcgtgacatggggaaaacctcatggcattacggtatcagcattatccgggatcgtggaattgacggtgcagccctcgacgtcattgaagagcaccatggtaccagcggtattgtctttgttgacggatggacaggtaaaggcgcaattaccggagagcttgtacgcgcactgaaagatcgcccgggctatcctgagcagccgcgactggttgtcctggccgatccctgtggctgctcctggcttgcagccagtgatgatgactggctcattccttttggcatcatgggtgcgccggtatcaggcctgatctcccggtcagtatggtcctctgaaggattacatgggtgcatggtttgcgagcatctcagtgaattcgaatgcagccggatgcttgtcgataccgtcgcccatttccgtaagaagttaaccccgtcatccctcgctaccctgagctggaatatggagtcagcccgggtcttatggcagacaagtcgcgacgttatcgcgttcctggccgatgaatttaaagtggacagcgtcaatcgtattaaacccggtattgctgaagcaacccgggctgtattacgtcgggtaccggaccatgtatttgtgcgttctattgacgacccggacgttgccttgcttgtagggcttgctcgtgaaaagggaatagttgttacagaaatggggggaaccctcggccagtatcgggctgtaaccattatcaagaaggtactctga

SEQ ID NO: 146916 - DNA, 207 bp, Enterobacter cloacae
atggagcgcttcttcaggagtctgaagaacgaatgggtgccggcgacgggctatgtaagcttcagcgatgcagctcacgcaataacggactatatcgttggatattacagcgcactaagaccgtacgaatataatggtgggttaccgccaaacgaatcagaaaaccgatactggaaaaactctaacgcggtggccagtttttgttga

SEQ ID NO: 146917 - DNA, 1788 bp, Enterobacter cloacae
atgtcgactgtagatacctctacagcagaggaactcaatcaaggaggctcagattttattctgacttccctcgaggctatgcgtaagaagttattggaccttacgtctcgaaatcgacttttgaatttccctatcactcaaaaagggtcttcactacgtattgttgatgaattaccagaacagctttatgaaaccctttgctcggaaatcccgatggaatttgctcctgtgcccgatccaactagagcgcagctgttagagcatggctatctcaaagttgggccagatggtaaagatatacagttaagagctcatcctagcgctaaggattgggcgcacgtcttaggaatccgtacagattttgatttaccagatagccataaaacggttgtttctgattcagatagagagttgctggaaaaagcccatcagtttatcttgcaatatgcccaaggccagaatggaaaattaacagggattcgttctgaatacgttaatcaaggtatagctttgtcagcgttgaaggaggcgtgctgcttagcaggctatgaagggcttgaggattttgaacgacaggcaaaggctgggaatgagattagtatatcttcttccaattcctctcatgacgataatcggatacaggctctgctttatccaaatgaactggaagcttgtttgcgcgccatctatggtaaggctcaaactgctttggaggagagtggcgccaacatcttgtatttggcgttagggttccttgagtggtatgaaagcgattcctctgaaaaggcacgttatgcaccgttatttacaattccggtgagatgtgaacgaggaaaattagatccgaaggatggtctttacaagtttcaactttattacacgggtgaagatattttgcccaatctctctttgaaggaaaaacttcaggctgactttggcctcgctcttcctttgttcaatgaagaggaaactccagagtcttattttgcttcggtgaagaaggttgtagagcagcacaaacctaaatggtctgtgaaacgttatggtgcacttagcttgctcaattttggcaagatgatgatgtatcttgacctcgatcctgcccgctggccttgtgacaagcgcaatatattgtctcatgaagtaattcgtcgctttttcaccagtcagagctgtggtcaagagaattccggcttacctggtggcttcggtcagcatgagtactgcatcgatagttaccctgatattcatgacaaggttccactaatcgatgatgcggatagctcgcagcacagtgcgttgatcgatgctatccgtggtcaaaacttagtcattgagggccctcctggtagtggcaaatcacaaacgatcaccaacttgattgcagcagctctgctcaacggtaagaaagtcctgtttgtggcagagaagatggctgcactggaggtcgtcaaacgtcgcttggatcgtgcggggctaggtcaattttgcttagagttgcacagtcataaaactcataagcgcaaggtgctggatgatattaatgctcgcttggtgagtcaggcgaccatgcctactatggaagagattgatgctcagattttgcgttatgaagatcttaagcagcagctcaatgaatatgccgcattgatcaataaccaatgggcgcaaacaggcaaaacgatccatcagattttgagtggtgcaacccgttatcgtcacaaattagatattgatgcaacagcacttcatattgaagtggtcaacaaaaactggccaccgcgttag

SEQ ID NO: 146918 - DNA, 207 bp, Enterobacter cloacae
atggagcgcttcttcaggagtctgaagaacgaatgggtgccggcgacgggctatgtaagcttcagcgatgcagctcacgcaataacggactatatcgttggatattacagcgcactaagaccgcacgaatataatggtgggttaacgccaaacgaatcagaaaaccgatactggaaaaactctaacgcggtggccagtttttgttga

SEQ ID NO: 146919 - DNA, 498 bp, Enterobacter cloacae
atgtgcatatcaagaaaggaaaatctgtcattcgaacaagtatcctccttgtttcaatacaacaaagataatggcttgttttttaggaggacagggcgtggatcttacaaaagggagtggactgtaggaaccagacaaactaatggatacatgtttttcataattgatgggaaaaaatacttagcgcatagactggcatttctactcgtacatggacggtatccggatggtgttattgatcacatcaatggagtcagaaacgataaccgtatcgaaaacttgcgagatgttagccaagggcaaaacacgaagaacgtgaaggtatcagtggcaagaaaaatgaagtttgctggataccactttgattcgtccactgggctatgggccgcggaagctaaagtgaaaaggaaaagatatcacctagggagatttaattctaaagaggaggcccaccaagcctacttagattttatgaagaaaaatgaagatcaatattga

SEQ ID NO: 146920 - DNA, 663 bp, Enterobacter cloacae
gtgccgctcattgcgcagggggaagccaatggtttgctgtcgtttcagaacatcacgcctgaaacagcgccgtcccgcgcatatctcgaattaatggcggaagccctgggtctggcgctggccaaccagcgtctgcgcgatgccctgctggaaaaagcgctattcgacccgctcaccggcttgcgtaaccgccaccacctggaagataccctgcgcactcagatagctcaggcaatgcgcaatgatgagccggtgagctgcatgatgatcgacatcgatcactttaaaagcattaacgatcgcttcggccatgaggctggcgatcatgtgataaagagcgtggcgacaattgttcagcgtgccgtgcacgatgccggcctggccttccgctttggtggcgaagagtttctggtgctgctaacgggtgcggatgaggaagcggctcacgcctgcgcaactgagatttataacggcgtccatacgctgtcgctgcgctatgggcttgctgagattggcccagtggatgtgtcgatcgggatcgccagttacccgcagcacgcccaaagcgacgacctgctgcgcgcggcagacgtggcgctttaccgggcgaaagagctggggcgctcgcggatcgtcagtttcagtatgctggagacgggttaa

SEQ ID NO: 146921 - DNA, 711 bp, Enterobacter cloacae
  misc_feature (692)..(701): n is a, c, g, or t
atgagtaatgtattttatatgccgcctgtaaccctaatgggacttaatgctattcgtcttttaggggatgaacttgtttcaagggagttaaaaaaagcgctgatcgtcactgaccgtgttttggctgacacgggactggttaacaaactgacagatgagcttgaggcgcataaaattagttatgcaatatttgatggtgttcaacctaatccaacagagaaaaatattgatgacggtttagccttgcttgcaaaaagtaatgctgattttgtcatttcctttggtggggggtcttctcacgatacagctaaaggtattgcattggtggccactaatggtgggcatattcgggattactcgaaaggtgtgcatctgtccaaaaaaccacaattaccattagttactgtaaatacgacagcgggtacggcatcggaaatgaccgtatttgcaatcgtcactaaccaggaagatgaaactaaatacccggtagtggataagcactttacgcctatcattgcggttaacgattctgaacttatggtcgcaatgcctgcgttccttacggcaactacaggtatggatgccttaactcatgcaattgaagcgtatgtatcaacagcagctacgcctgttactgatgcttgtgctatcaaagcaattgaaattattgttaataatcttaaagacgttgnnnnnnnnnnttgtagatga

SEQ ID NO: 146922 - DNA, 483 bp, Enterobacter cloacae
atgaaaagatatatatcattatccattctgtcggttttaattgttttttttattgccgcaggtctgttttacaaaccgtcgacacattacccgtttaagtgctacggattcatagaatataacctggttcttgataataaagaggtacaactgaacctttcgcaggacatccggctttatgatgataaaacaggtgagatctcattcagtggcagagtgatgtatgataacaggaacacggttttcaatcgtaagatcatgctcaccaatacctccagacttgatgaagacacactgaaattcactattaaaaagaccgtgaaatcactctcggataatacgccggatgatgtttacaatttactgatggatgaatatgttgcctctcagcacaccatacaaattgatctgattgagattgtgtctggcctttgggtcatcggatcaccgacgtcttttattatgatatgccaagcgtactag

SEQ ID NO: 146923 - DNA, 753 bp, Enterobacter cloacae
atgatcttctcgatatcagacatcatcatctttaacaccctggacggtaccctgacattaaccggcgaacagcgacagataaaactgccgttgccggcctgcagattactcgaaacgctgctatcagaaccgggaaaaatttatgaccgggagttcctgttaaccgaagtctgggataaacagggtctgaccggttcaaacggtaatctgaaccagtacatcagtattttacgccgccatttcagcacgcttggcctggatgatctgatccagacggttccacgcatcgggtttatgattaataaagatatcgaggtcaccgtatctgatgtgtctaatgatgcccgcaccgcaacggatctttttcccgccgaacctcccggcaaaaggaatctgtatctggttggattagcgttcctgacggtttgttcagccctgttttgtgtgtactccctgatgtttaatgctgcgccgtctgaagtcaaaattgtaaaatccatgtataagggatgcaatattaactacctttctcctttcagtaattatgaagtacaaaaactcaatgtggttgtggcggatctgctttcttcacatgcgatacaatgcaataccagtaatattgttttctttgactattataagtctgtcaattccgctgattttggcagagccttgctctcagtgtgtcagaaaggtcaggcggactcagccctgaaatgcaatagtttttattattataatttaaaagcataa

SEQ ID NO: 146924 - DNA, 1038 bp, Enterobacter cloacae
atgaagccacacaataacaatatgaatcaatgggatataattgatttggtagatcaattattcgaaattgatcgttcaaaacgatcaatcatagttggcgcagttgatggccataatcacgttcctcagattcgaatacgtaacgttctgaaggttaccgccgggggttgtctgcggcctggcgaatatccgcgtattgcttccctcggtttgggaagtagcgcgacgagaaacgcctatagcagctccggcgatatgctttctgttggggattttgggataggttcggtcagaggtgatgcagcttcaattcctgactcaatgagtggaaatagcgttgatttgaaaactgctttctatgcttcaaatggtgattttgtcgataatcctggaggaattggtaacggccagtacgttggggtcatcgcattcaactgcacgaataacaatctctataaatttcagattgccgggtcatattctgcatcagggcgaatgttctttcgatccatgagcaacggtagttataacgcatggcgggagctttaccatacagcaaacacaacgaaggccagcgatggcaccctgaaagcagcgtctccggttgctcgcatcgttgccagcgctgatacctgcctgcgctcagatattgctgaggatggttttacctggtgcggctgcggtgcggcgaacgccgaggctgagggcattactatttcacggcttgatgtcggcgtttatgttctcacaggttcggcaggcctggcgtcagagggatggcagttactgccgccaatggaccctggcggcatgggggaactgggtgtagttgaggcagaacaaaccgaaaacggaggactgactatccgcctgtttaagcgaaaatacctgctaggcgatgacggggagatcgtcaaaacgaaaggggaaccgatggacgtgccagcgaacagctggatcgatgttcgcctggatatgcccactgattcagttttcaggcgtgaacagtacagtctgcaaagtgacggagaagattag

SEQ ID NO: 146925 - DNA, 234 bp, Enterobacter cloacae
atgaaaaatatgattctttgcctggcggtagcggtattgctctccggttgcgctggcgttattgagaagcagcaacccgtatgcaccgcaacagccctggtcggcggacaggaaagcagcgtccagatctacggagtccgtaaacaaaacaatcagacacagtaccgcgccggttatccctttaactggacctgggtgagcgccaacacattcaccagcaccacctgccaataa

SEQ ID NO: 146926 - DNA, 3552 bp, Enterobacter cloacae
atggcaactgcaaacgctataaaaggccgcaagggcggaagctccagttcccgcacccctaccgaacagcctgatgatctgcaatctgtagcaaaggcaaaaatcctcgttgcactgggagagggtgaattcgcagggcatctgacggcgaaagatatctacctggacggaacggctctggagaatgctgacggctctcaaaacttcagcggcgttacgtgggaatttcgcgcgggaactcaggcgcaaaaatatattcagggcatacccggtaccgaaaacgaaatcaacgtcggaactgaggtatcgagcgctacagcgtggacgcgcacgtttaccaatacgcagctttcagcggttcgcctgcgcctgaaatggccttcgcttttcaagcaggaggacgacggcgatctggtcggttactcggttaattatgcgattgacctgcagacggacggcggtacatggcagacggtactcaataccagcgtgaccggcaaaacgacgtcaggttacgagcgcagccaccgtattgatttacctcaggctggcagcacctggacaatcagattgcgtaagattacgtctgatgccaacagcgcgaagatcggcgacacgatgatgctgcagagcttcaccgaagtaattgacgccaaattacgctatccaaacacagcgctgctttatatcgaattcgattccagccagtttaacggctctatcccgcagatctcctgcgagccccgcggccgcgttatccgcgtaccggatacttacgaccccgaaacccgcacttatagcggtacgtgggctgggacatttaaatgggcctggaccgataaccctgcatggattttctacgatctggtggttagcgaccgtttcggacttggggatcgtcttacaacggctaacatagataaatggacgctctaccaggttgcgcagtattgcgatcaaatggtaccggatggcaaaggcggtaatgctaccgaaccacgttatacctgcaacgtgtacattcaggaacgcaacgacgcttatacggtcctgcgtgattttgccgctatcttccgtggtatgacctactggggtgacgaccagattgtggcgctggcggacatgccgagagatgttgattttacatacacgcatgcgaacgttattgatgggcgctttacctattccagcagcaccacgaagaaccgttacaccaatgcgctggtgtcctggtctgatcctgataacgcttattctgatgcgatggagcctgtttttgagcaggcgttggttgcgcgttatgggtttaatcaacttgagataactgcgatcggctgtacccgtcagtcagaagcgaatcggaaagggcgatgggggatcctcaccaacaataaagatcgcgttgttactttcaatgtaggggaagatggcaacattccgcagcctggatatgtaatcgctgtagcggaccgaaatctctccgggcgcgacctgggcggccgtatctctgcggtaaatggtcgtgtgctgacgctggacagggcgccggatgcttcagcagccgacaggatgattgtcaatcttccatcgggtgtttcacagtcacgcaccattcagtcgataacgggcaataaagtgactgttacgaccgcttacagtgaaacgcctgtggctgaggctgtatgggtcattgagtctgatgagctctacgcacagcagtatcgcgttattacggtaactgataataacgacggcacgttcacaatcgtcggtgcaaatcacgatccggataaattcgatcgcattgataccggagccatcattgaccagcggccggtgagcgtgatcccgccgggcaaccagtcgccgcctgcgaacatcgtcatcagttcgttttctgtggtgcagcaaaatatcagcgtcgaaacgatgcgcgtgagctgggaccaggcgcagaacgctatcgcctatgaagcgcaatggcgccgcaacgacgggaactgggttaacgtgccgcgcagctccaccacatcattcgacgtcccggggatttataccgggcgctacctggtgcgcgtgtgcgcaatcaatgcagcagaaatctcgtccggatggggctattcagaagagaaaacgctgacgggtaaagtaggcaatccaccgaagccggttggcttcatcgcttctgaaaatgtggttttcggcatcgagctgaactggggattcccggcgaataccgacgacacgctgaagacggaaattcagtacagcctgaccggtaccgaggacgatgcgatgctgctggccgatgtgccttacccgcagcgcaaatatcagcagatgggccttaaggctgggcagattttctggtaccgcgcgcagctggtggaccgcagcggcaacgaatcaggttacacagaatgggtgcgcggtcaggtcagtatcgatgtgtccgacatcacagatgtgatcctggaggaaattaaagactccgatacgttcaaggacctgattgagagcgccgttgataccaacgaaaaaatagctggtatggctgacgacatcaaacaggccaacgatgaacttgagctgcaggcgcaggaaatcgccaaaaacgcgcaggaaatcgggcaggttcagaccagcgttaatgagctttcgagcacagtcggtgatgtgtcgtcctctctttcagagcttgagcaaaccgtggcgacggctgataccgcgctgggccagcgaatcgacagcatcagcgtgtctatggacggcatgacgggcggggtgaaaaactcggccattgccattatccagaacgggctggcgcaggtggccgcgcgcaaaacactgtcggcatcggtcgccggtaacagcgcgcagctggatcgcattgatgaggtgatcgtcaacgagaaggaggcaacggcgcgttcgctgctgagtttgcagactgacgtgaacggcaacaaggcatccatcaacagcctgaaccagacgttctccgattaccagcaggccacggccacgcagataaacggcatcacggcgaccatcaacgggcatacgtcagccattaccactaacgctcaggccattgcgaacgttaacggggacctgaaggcgatgtacagcatcaaggtcgggttatccagcaatggtcagctttacgcggcagggatggggatcggcgtggagaatacgccgtccggcatgcagtcgcaggttatcttcctggctgaccgcttcgccgttactcaccaggccggagcgaccgttacgcttccgttcgttattcagaacgggcaggtgttcatcagagacgcgctgataggtgatggcaccatcagcaacgccaagatcggcaactacatccagtccaataactatgttgctggctcagtcgggtggaggctggataagggcggtatgtttgagaactacggttcgacagctggtgagggggccatgaaacagacaaaccagacaatcagcgtgcgggactccaggaatgtgttgagggtgcagatcgggagaatcacgggaacatggtaa

SEQ ID NO: 146927 - DNA, 2544 bp, Enterobacter cloacae
atgacaatggcattgaatacaatgcagcctgcgcgcctggcaatatttattgccctcgcgcttgctggtgtctctcccacactgtatgccagtgagacgtttaatacggaactggtagagctggataatcccggaatgggaaaagcggatttatctgcctttgaatccggctcgcaggcacccgggacataccacgttgatattattcttgacgatcggctgctggaaacgcgggatattcgttttatggcagtgaaggatgctaacggcagtgaaacgttgcagccgtgcctgagtatcgggcagttaaaagcgtggggcgtgaaaacggcgcttttcccgcagctcgccgccggggaaagtgaatgcgccgatctcagggcgatcccacaggccagcgcggattttcagtttggcgcccagcgtctggcgattagcattccacaggcggctatagacctgccagcgagaggttacgttccgccggatatgtgggatgaaggcattaccgcggccatgctcaactacagcctgagcggggcaaacagccgggcaagaagcggggcaggcacccgcagcgacagccagtatgcaaacctgcggccggggatcaacgtcggtccctggcggttacgcaactacaccacctggtcccgcgatgcgtccggccaggataagtgggacaacgtatataccttgatgcagcgcgcgattattcccctgcaagcccagcttacgctcggagacagttccgcgcctgccgatgtctttgacagcatgccgtttcgcggcgtccagctggcgtccgacgacgatatgctgccggattccctgaaaggctatgcgccggtggtgcgcggtattgcgcgaactaacgcgcaggtcgtggtgcgtcagaatggctatcaaatctaccaaagctatgtggcaccgggcgcgtttgagatcgcggatatgtatcccaccggcggcgcgggcgatcttgatgtcacgatcgtcgaagctgatggtagtgagcaacatttcaccctgccgtacgcttcgctgccggtcctgcaacgggaggggcgcctgaaatatgcccttaccgccgggcagtatcgctcgtataaccgtagcgtggagaaaacccccttcgggcaattgaccggaatttacggcctccctcacggtattacgctctatggcggcgtccagggggcagataagtaccagtcggcggctctgggggtgggcaagaatatgggcgatctcggggctgtatccgcagacgtcactcagggctggtcaacgccggagcatgccgcgaaaacaaacggtcagtcgtggcgggcccgatacagcaagaattttatcaataccgggaccaacttttcgattgccgggtatcgctactcgacccgcggctattacgggatgcaggacgtcctcgattcgtacggcgacagcagcgcgcttcaggacaggcgacgtaaccgtgccgagctgacgatgagccagacgctgggggacaacctgggcgcgcttaccctcagtgcggcgcgggaagattactggaatgacggtaagtcgatggcttcgtggagcgtcggctatagcaactactggcacaacatcagctatggcctgacatggacttacagcaaaaatgtccgctcagcgtcagaaacccgcgacagccaaaaaaacgctgaccatgaccagcttctggcgttcaacgtcagcattccgctggataaatttttgtcgcagacatgggctaactatggcatgaacgccagcgggaataacgggacgacgcataacgtcggcctgaacggggtagcgctcgagaaccgtgccctgaactggaacgtacagcagggatacggaacagagggtgtgggctataccggcaatgttaacgcggactacaaaggcacctatggcgaagtcacggcaggttatggttatgacaaaaacagtgaacgcctgaattacgggctgcaaggcggcattctcgcccatgctgatggcatcacgctttcccagccgctgggggagaccagcgtcttaatcaaagcccctggcgcccacgacgtggatatccgcaatcagcccggtgtacggacagattttcgcggatatacggtcgtgagcaacctttctgtctaccggaaaaacgatctcaccctcgacccggaaacgatgccggacgatgtcgagctggagatcaacactcgcacggtgacgccgacgcggggagcggtggtgagagccgattatctgccgaagtcaggtcgccgggtgctgatgaccttgaccgacaacgaccgcgccgttccgtttggggcggtggtcacccttgtgggtgatgacagcggcagttttattgtcggcgatcgcggtcaggtctatttaaccgggatgcgcgagcagggaacgttagtcgctacatggggaagtcaatccagtcagcaatgccgcgctgatttcacgctgccgaatcactcaacgtacggtgggatcgctgatatgcgcgccacctgccgtcaggaacgctaa

SEQ ID NO: 146928 - DNA, 513 bp, Enterobacter cloacae
atgaaaataagatgcaggacactgctgttacttgccttactcagcgggaaggtatgctccgctgatagcgtcaacatcggtgtgacgggaaatatcgttgcgtcgccgtgcatatttaatggcggcagcaacagccttgatgtcaacctgggcaatattcaggcaaccaatatggcgacgccgggctcaacatcggatccggtgcctttcagtctgctgtttacccagtgcccaaccggaacgcagagtgtgaccgtcgctttcaccggcagccccgatcccgaggcgggtgcggactattttatgaacagcggttcggccacgcatgtggcgatagccatgcgcgatgcccaaaccggcgcgcttaaaggaacaggcaccagtatgacccagaccattgccgcggacagaaccgcgacaatggctatgctggcctcggtaaaatctatgccgggaggcgccacgccggggagcatcagtgcggttgtggtgatgacgatgcagtacaactaa

SEQ ID NO: 146929 - DNA, 543 bp, Enterobacter cloacae
atgaagctattggcagtattcccggccattttcctgtttggtcagatgactggcgctctggcggccggtgataccgctgcgattaccctggccggcagggtgctggcaaacacctgcacgatagacagcggctctgcaacccaggtcatcaccctaccgactatcagcgatcgtgataccaaagtaacaggtgccgttgaccacgtactaacagaagttccgattattttgagaaactgtggcgcggcagccacttctgtggtggtaaataccagcggaaaagcaaatggagagaattataacatgtttgataataccatcgatgcaggttctgagggccgcgcgacaggtatagggatatatttttatcaaacaaatggttcaaatttgttatttcctgacggaaggcgtgcagaaacaatacaactgacaccctctgtcgataatacactgactttttatgcaacctatggaataacaacagccagtgtcacacccggaaatattagtgccgtcgttaacatgacttttgattatcagtga

SEQ ID NO: 146930 - DNA, 534 bp, Enterobacter cloacae
atgaaactactggcagtattcccggtcattttcctgtttggtcagatgactgacgcactggcggccggtgatactgctgcgattaccctggccggcagggtgctggcgagcacctgtaccctggacagcagcgtagcaagacagacggtcgtgcttccggatatcagtgttcgtgatattgaacgcaaaggaaagacggaaataccttttgtactgaaggattgtggggcggacgtcacggccgttaaggtaaccgcgtcaggtacagcagataaatcaaacccaggtgcttttgctaacgaaatccctgacggaactgagggagggacaacaggagtggcccttagcctgaccatgagaaatgggacttatcctttctcgccggccggtgatcaaagcgaagtgataaatttaacaccgttatcggacaacaggttttcattttacgcccagttaatccacgtgggcacagatttgcaggtaactcccggaaaagtaagctcggtggttaattttacgtttgattatcagtga

SEQ ID NO: 146931 - DNA, 828 bp, Enterobacter cloacae
atgaagagtttgaaagcgattctgtttgcgctgatatttgtgttgagcaacgcctatgccgaaattacttggatacaagataccataacccggtcagaatttcctataaatagtgttgtgggttggatcggcggtgacaatgggactgccttaaggacgtgggtagggaatgctgatgctaatattaatagttatgatattcgatgtgaaacaacacctgaaaaggctatgtcaaaagcaagtagaataggaacaggatttattgatagtgctgacattgtaggaaatgcgggaactctaaccagcaataaccgttggttttcactgacctataatatccaagttttgttaaagaagcctgaaagcaataaatcatttagaatatattgcctggctgcacctactggttatacgtacaacacatctcctgaagaggttcgtaacgctgaaaatatcggcattatatatgatgtgttgcttagtacagtaactgttcctgtgttatcgaccacgggttcactggatcttggtgatgtgcgtcgtgatgaaaccgtgaccagaccagtgcctgtgagtatggcctacgctggcggaacggatagcggtaaaaccttatcaggtaatgtgacctgggttatcacgccggcaacggataatccgtccccgttgatgcccgtgataaaaaaaggcggagtacccgtagaatcatttaccgttagtctgacaaatgcccagattcagagcgatgattttaccgtgagcctgaccggaaatgagtatcccggtgcatattcatggacaatgaatatcaccacgacaatagagtga

SEQ ID NO: 146932 - DNA, 801 bp, Enterobacter cloacae
atgccatttgcactgttttttgtgttgagcaacgcatatgccgggataacctggcagcaggattttattaatattagtgaaatacttgcccatagtggaacaccgtggattgcgggtctaaataagctatccccaaaaacatgggtaggttccgataaccagacatatagagttacatgctctgacacaattaatgatgttttgaataaaacagctaactcaggactatatactgtaaatgattatatttcatatgttgggaatgctgtaaccaccaataagaatacaatgtcaacaattgaattaccaatgcagctatgggcgaggggaatatcgagcaatcagagtgcaatgttattttgtttacttgtcccagacgggtattcgtataatacatcaccagaggaagtacgcaatgcagagaatatcggcgtaatatacaatattacactcagtactatagcctacccggtattatcaaccacgggtttgcttgcgcttggtgatgtgcacagagacgaaacagtcaccagaccagttccgttgagtatgtcatacgcagggggaactgacgaaagtaaaacattaacaggcactgtgtcctgggttatcacgccggcaacagataatccgtccccgctgatgcccgtgataaaaaaaggcggagtacccgtagagtcatttaccgtcagtctgacaaatgcccagattcagagcgatgattttaccgtgagcctgaccggaaatgagtatcctggtgcatattcatggacaatgaatatcaccacgacaatagagtga

SEQ ID NO: 146933 - DNA, 540 bp, Enterobacter cloacae
atggaatcaatgatggttaaaccggtatttctgatattgctgggttgtgtactgcaggcacaggccgccagcgacagcacatttattacattcaacggcacagtattagccaacacctgtactctcagcaccggctcaagagaccagattatggtgcttggcagcattgccgatcgggacattaaaggtaagggaaccactggcggtgagaaggaagtcaatatggttctcagggactgtggggcgtcagccactgctgtggttgtcagcgtacagggggaggcagataacgatgacgcgctggcattcagaaatgcccttccggagagcgaagggggagcagccggcgttgggctctatttttatcagaccgacgggaaaactcaattcagtcctgacggttcggtcacacaaatcagcgcactgacgccctccgcagataatactttaatctacaaggccgcgtatgccggaacgaaagattctgtggttgcagggaaattcagtactgttgtcaatgtgaactttgaatatcagtaa

SEQ ID NO: 146934 - DNA, 747 bp, Enterobacter cloacae
atgcagaacagactatttagcagagtcgcagccatctttatattcactgggctgtattgtggcaaaggtattagtgcagaaattgaagcgtacagtgtaccggtgacgcaatcgttcgacgtaaattatggttatcatatttattccgggcagacaggaatcaaatgttccactgcggctcaatctaataaactatctctgatagcccactatacacatcgtgattacagcgttccatgtgatggctcaacaacatggagtggggacggtacaccctcggatggcgcctggtcattacgggtaaccctgataaatgaagggatcaacaacgagtcagtatatatcgaatatggaaaacatggtacgaatgctcagtgggcaagttttcaccgcagtatacccggacgaagcacatgtgggttaacttatgagcccacagtcaaaatcggtgatatgactccggggtacgccccttctcccgtcagggttttgggtgctggcgccggcaatggacagatgtcgcttaggccgattagtacagattcttatggctcctttatctccaatagcgacggaaaaaaaatatacatggcagtgaagtctacagaaggtgaaaactggaataacgtaaaccaggtctgggaaggaacaaataaacaggactattatttacacctccatgcacctgcacgcgactctgaaggcgtgtatgaaggcataatgcaggtgtcactgacctgtctgtaa

SEQ ID NO: 146935 - DNA, 444 bp, Enterobacter cloacae
atgatgaaaaaactaatgttactgctgtcactggtatcagtgagcgcctttgcttctactgaggtctgtgttaaggccaccgatgcccagattgaggggctttttgagcgctggaatgagaccctgaaatccggtgacgcaaaaaaagtgtcggcgaactatttaagtgacgcggttcttcttccgacggtgtcgaataaagtaagactgacagatgccgagcgagtggattactttgagcacttccttgagaaaaaacccacaggaaaaattgacagccggacaatacgtaccggctgtaacaaggctatcgacagtggagtgtataccttcactttcgcagataaatccactgtaacggcacgctataccttcacgtatgcctgggacgggaaagactggaaaatttcttctcatcactcttcagccatgccggaaggctga

SEQ ID NO: 146936 - DNA, 330 bp, Enterobacter cloacae
atggtctattttatcctgtcattatctattgtgtgtgaggttattgccacgacctcattaaaagagtccgatgggttctccaggctcatcccgtcggttctcactgtgttattttacgcagcggcgttttatctgctcacgatacccatgaaacagatcccgacaggtattatttatgctgtctggtcaggtgcggggatagtgctgattagcttaatcgggtggatttatcacgggcagaaaatcgatctgccggggatcacggggataggttttattgtggcgggcgtattaatcataaatatcttctccagatcagtcacgcattag

SEQ ID NO: 146937 - DNA, 261 bp, Enterobacter cloacae
atggctgtcatttccgggtatcacacggaaattctcagttatatagaagcacagaattcatgtactgaaactcacacaaaaaacatgattgaacgctggaatgcctatccgtcacacatcagaaaaagattctccctgctgtactttctgattaacagctcatacctttcaaaaagcacgttgtgccggatcatgaaaaaacttaaagaggcgggttccctgcaactggaaagaggtaagcttgaaatgtatgagtcctag

SEQ ID NO: 146938 - DNA, 873 bp, Enterobacter cloacae
atgaaagaaatgaaaagcaagagcccaagaattgatcctgctgaagagaacgcctttttcccgtctgactattccctgagtgaatttaccaatccggtgaccgatttaagtaactatgaatattctaacccctaccagggaaacaagaaggtactagtgatcgcagcagatgaacgctatctgcccatggacaacggatccctcttttccacaggaaatcatcctgtggaaacactggttccaatgtatcacatgcgtgccgccgggtttgattttgaaatagtcacactttccggaaatatggcaaagtttgaattctgggcgatgccctctcaggataagttaattatgccgttctatgaacgctatcgtgatgcgttcaggcatccacgcaagctgtcggatatacgtttgggtctggaggctcaaagcgactatgcagccatcttcataccaggtggccacggtgcgctaattgctctgtctgaaagccaggcagtagcagagacgcttcgttgggcgatgagtaatggcacatttgtcatatcgttgtgtcacggacctgccgctttcctctcgctcaggcacggcataaatccccttcacgggtattcgatatgtgcatttccggacagtgcggataggcaaacccccgatattggatatatgccgggacatctaacatggtatttcggagaaaaactgtgtgaaatgggtattaacattgttaataatgacatcacaggttcagttcacaaggatcgtaacgtgctgactggagacagcccatttgccgccaatgctctggggcggctcgctgcaacagagttactctccgcttatgccgctcaaaatgaaagtccattgctctaa

SEQ ID NO: 146939 - DNA, 360 bp, Enterobacter cloacae
  misc_feature (289)..(298): n is a, c, g, or t
atgaccctcctgggcttgcttagtcttttgtggacagagtctggtctgaatgtctggtacccgaaaatggcagggaaacgtaacgattcactggtacggtatcgtctgcttgaaaccgctaaacaaattcgtaccggcagagcctgcataggtgaccatttattcattggtgtacctgacccgaaacaacctgtcgctcagtcgcaaattcagcgtctttcatcacaggcgatgagtgataaacgtctcatgctcctgtcagttttacctcgctacgatgctgaaaagnnnnnnnnnntgaaaagcatgagaagccacttaaatttttacccctgcggaattttggggggctaccgctga

SEQ ID NO: 146940 - DNA, 585 bp, Enterobacter cloacae; identical to SEQ ID NO: 116875

SEQ ID NO: 146941 - DNA, 3882 bp, Enterobacter cloacae
gtgggggctaatgcagaaatatatgagcacccttggagcggtgtgaataacacacaaattcaattgtttgacagcgctcgtatagtcgatttgctacaaacttggcagacatcaattatcgactttcaacatagctatcaagaatatgtagataagtgggcgttagaaggcgaaagccttaatacgcttcaatatattgagcaattggtagaagatcagtcgaatcttccagtgttgtgtggttcagagcatttcccagcacttagtgagctagattcactcgatgccattgcacgggtgcgtcactatttagataggttcgagttgctacaaggtcattatgtggccttgagccaggttatcgagcctcaaaagctacgacttttagaacaaggacaatcgtgtgactttcctcgtgaagagctggaaaaatatggtgcagcagaggatttcactttacgtgatttggtcaggtggcttgaatccatccaatcaattcatgatgagttatcatctatttatgcgcaattaaacgatttcaaaaatgctttgccagatggtattgcttcgtatatcgatgattcgcaagctggattgctattctgctctgagttgttgtcgattctgggtgctttaccgactgagcttattagagttcgagatcctctttttgatgatgatgatatcgatgcagtattgcgcgacttaatgtgtcaaatcgaaacattgcgtcctttaagagatggtctatctactttgtatcaattggaccagttgccttcccaagagatgctcgcgcatgccgttgctgttatccagcaagggggattatttgcatggtttaagagtgattggcgtagtgccaaggcactgctcatggcgcaatctcgtaagcctgacactaagtttgctgagttaaaacgctgctcagctgatttgctcaagtattcggagctgttacaacggtttgaacaaagtgactttggtaatcaacttggtaatgcattccgagggttggacaccgactgtgaacaactcatgttattgcgtgattggtacaagaaggtccgagcttgttacgggataggttttggaaagcgagttgcgataggctctggattatttaacctagatggtgagattatcaaaggtgtgcatttaatcgagaaatcgcagattagctcaagattaatgactttggttaaacgggtcgagcacgaggctaagttattaccgcgtatttctagcttgttggaagaacatgcatcttggttaggtgagcaaggtgtattgatgcaatcttaccgacaggtgcggaatactctcattgccttgcagggatggtttatcaatccagatatatcattagagcagatgactcattcctccgagattttgcaaaacataaacgatcttcagatatcccttgaaaatgactcgttacagttaggggcgtttttacaattaaccccattggcttgcggtgcgtataaaaataatcaactgacgttagacactattaacgacacgctgaattttgccgagcaactggttgataagataaattgcgtatccttggctacccagatcagacatttggctagtggtagtgattacgatttactatgtcgtgatggtggggaaatagtttcgaaatggaatgaacagattaaaaatgctgagttatatgcgctagaaacaaagttagagcggagtcagtggctcaagtcgactgatggttctcttaatacattaatcgagcgcaacgaaagatcaatacagcaaccccgttggttgaacgggtgggttaactttattcgttgttacgagcagatgcatgaaaatggattgcagcgaatctggagtgctgtacttgcgggctcgctcccgattgaaaaagttgaattgggtttagcattagcaattcatgaccagctggcgcgggaggttattcacatccaccctgaattgatgagagtttccggctcacagcgcaatgctttgcagaagtcatttaaagattacgacaaaaaactgattgaattacaacgtcagcggattgcagcaaaaattgcttgccgaaatataccagaagggaattctggtggtaagaaaagtgaatatacagaactagctttgatcaaaaatgagttgggtaaaaaaaccagacatattccaattaggcaattggttaaccgtgcatgtaatgcgctggttgcaattaaaccttgtttcatgatggggccaatgtcagcagctcattacctagaacctggacgaatggaatttgatctggtggtgatggacgaagcgtctcaggtgaagccagaggatgcattgggtgtcatcgcgaggggcaagcaactagtggtcgttggtgacccgaaacagctaccaccaaccagtttctttgatcgaagtgccgacggagaagatgacgatgatgccgcggctttaagtgatactgacagcattttggatgctgctttgccactgtttcctatgagacgtttgcgttggcactatcgttcacgacatgaaaagttgattgcatactctaaccgccatttttataacagtgatttggtgatattcccttccccaaatgctgagtctccagagtatgggattaaatttacctatgtgtcaaaaggtcggttctccaatcaacacaatattgaagaagcccaagcagttgctgaggccgtacttcatcatgcgcaacaccggccgggtgagtcactcggggtagtggccatgagttccaagcaacgcgatcaaattgagcgcgctatcgatgaattgcgccgaaatcgccctgaatttaacgatgcaatcgatggcttatatgccatggaagagccactttttgtgaaaaaccttgagaacgttcaaggggatgagcgtgatgtaatctttatttcctttacctatggaccttctgagcatggtggaaaggtttatcaacgctttggacctatcaattccgatgttggctggcgtcgcttgaatgtgcttttcactcgatcaaaaaaacggatgcatgtgtttagttcaatgcgttctgaagatgtattgacgagtgaaaccagtaaacttggtgttatttcgttgaaaggttttttacagtttgccgaaagtggcaaactagattccctcacaacgcataccggcagggctccagatagtgactttgaggttgctgtaatggaagcactcaatcacgctgggtttgagtgtgaacctcaggtaggggttgcaggattctttattgatctagctgtgaaagatccaggttgtcctggccgttacttaatgggcatagagtgtgatggtgcggcttatcactcagctaaatctgctcgtgatcgtgaccgtttgcgtcaagaggttctggagcgtttgggttggagaattagccgcatttggtccactgattggttcagtaatcctgatgaggttctatctccgattatccgtaaactccatgagcttaaaacattggctccagacgttgttgtaccttcctatgaatatgtagaaacgattgagtcaagcgctgaagtggcgtctgactcaattgattctcttatgcccaatttggggcttaaggagcaacttaagtattttgccacacatgtcattgaggttgagcttcctaatgttgatgctgatcgtcgtttgttgcggcccgcaatgcttgaggctttgctggaacatcagcctttatcacgttccgagtttgttgaacgaatacctcattatctgcggcaagcaacagatgtatacgaagcgcaacgctttcttgaccgagtcttggcattaattgatggcgcagaggctgaagcgaatgatgcagcgtttgagtctgaattggcataa

SEQ ID NO: 146942 - DNA, 411 bp, Enterobacter cloacae
atgaaaaaaaccaaatacagatttgagagtgatgacgatccctttgtatctaaagatgttttgactctgatcgacaacggacttgtgtttctggataaggcgcgtgaagaattgcaggactccatgcccaaattttcgattgtcagtttctggacagcggtcgagatcctgctgaaggtacctttgttacatgagcactggagtctggtgtgctccggcaggaaaatagagcgagcaaggtaccttgcaggtgatttccagtcggtgacatacgatgaaacatgtcagcgattagctgatgttctggaacaccctcttcctaaagaaaccatcgacgtattcaaaaaagtcaaagaccatcgcaaccgggtggttcatttttatcattccgattggcactgttgcaaatag

SEQ ID NO: 146943 - DNA, 405 bp, Enterobacter cloacae
atggtttacaatccaagcatgaataaaaaagatcctaaccagagcctaatttccaggctgactgaattgaacggtaaaggtttctctaaaacagagatggccaaggtggctaatgtcagtaagcaggctgtaaccgggtggtttagaacaggtaaaatcagcaaagaatcagccttggctgttgctgacgcagctggcgtatctgtgccatggttgctcggtgaggacgttggagagaaagacggactcaaatctgacgaacagcgcctgctagagctatatcgccaactccctgaagaggaacagcaaaacatgctccgcatatttgcgcttcgccttaaggagctggatgagttatatgaaagatacatgagccggcgaatcaagggcgacgcagataagtaa

SEQ ID NO: 146944 - DNA, 219 bp, Enterobacter cloacae
atgactggtattgaaaatgcaattcttcgatcaggttccgccagcgcgcttggcgcttcgataggtgtttcaaaaatggctgtttcgttgtggcgccgcaaagggattcccgctgaaagagtgctgccagtatttgaggctacaggcgtaacgccccatgagttacgccccgatctttacccaaacccaacagacggtttacctaaacaggagccttaa

SEQ ID NO: 146945 - DNA, 2886 bp, Enterobacter cloacae; identical to SEQ ID NO: 25667

SEQ ID NO: 146946 - DNA, 1032 bp, Enterobacter cloacae
atgtcgaaccgggtaatgacaacgcttgaggaaatgagtcctcgcgtcgaaatttacagcatcgatgaagctttttgcgacctgacaggagttcgcaactgccgtgatctgacggagttcggcaaagagatccgcgctaccgttctgaagcggacgcatctgaccgtcggggttggcattgcgcagacaaaaactctcgcaaagctggcgaatcacgctgccaagaaatggcagcgccagactggaggggtggttgatttgtccaatattgaccgacagcgtcggttgctggctatcgtaccggtagaggatgtgtggggcgtcggcaggcgcatcaccaagaagctcaatgctatgggcatcaaaacagctctggacctctcagaacaaagcacatggattatccgcaaacactttaacgtggtactcgagcgaaccgtcagagagcttcgcggtgagccatgtctggatctggaggagtttgcgccagcaaagcaggaaattgtttgcagcaggtcgtttggtgaacgcgttacagagtacgaacaaatgcgtcaggctatttgctcatatgctgcacgcggtgctgaaaagcttcgcggtgaacaccagtattgccgttttatctccgcgttcgtgaaaacctctccctttgcgcttaacgaaccgtattatggcaacagcgcatcaatgaagcttctcacacccactcaggattcccgcgatatcatcaacgccgcggtcaagtgcttggacaaaatctggaaggatggtcaccgataccagaaagccggcattatgctcggggacttcttcagccagggcgtggcccagctcaacctgttcgacgagaacgcgccgcgggcaggtagcgaaaggttgatggaagtgctcgatcacctgaactcgaaagacggaaaaggaacgctctactttgcagggcagggcatacagcaacagtggcatatgaagcgagaaatgttgtcgcctcgatatacgacgagatattcagatctgcttagagtccgataa

SEQ ID NO: 146947 - DNA, 453 bp, Enterobacter cloacae
atgaacgttgagttaaacaaaagtacctgtgagcgaatctttcatgccgttcttttcgaactgctcgccaatatcattattgccctgtttctcgcttacgttttacaggtatccctgctccagtccggcatgctgtcgctgatttcagccctgacggcaacggtctggaacttcatcttcaataaaattttcgacgggctgcaacgacgctacgcgtttgaacgcagtttattatttcgggtgttgcatgccgttgcctttgagattgggctgattgtcactctgacgccggtggctatgcttctgctcaacctgccgcttatcgatgccttctttgttgaaatcgggctggtgctatttttcctgccctacacactggcctataactggctctatgattggcttcgctggacattttatggccagaagaggatggaagagactgtggagtaa

SEQ ID NO: 146948 - DNA, 402 bp, Enterobacter cloacae
atgccgctgaacatcacaaaacgggacgataaattgtttaaagaatggaaatggacgatcgccatcgggctggggttactgaccggatgtgccgatatgggcagagtgggcttctccccgaagctcaaagaaactttagtatcggcgagcgttgaaagaacctggcagtgtctggatacgcaggcgacagttaagcagctgcggctggaagaggacgatccgctgcccggtggtagcaggcggtttaatctgctgaatcaggatggcgaggttgtggcctggctcgatatcagcgcttttaacaagcagagcgacatcgatatgttctacggcaaagacgataagcagaccgaatcgctgctaatggcaatggttaagcagtgccagcaggagctgaattaa

SEQ ID NO: 146949 - DNA, 1044 bp, Enterobacter cloacae
atgacgccagcagcttattacaacgaaatcgacccattcgctgctcagtggctgcgtaacctgatcgccagcgggcatatcgcccctggcgaagttgatgaaaggagtattgaagatgtcacacctgacgacctgcgaggcttcacgcaatgccacttcttcgccggaattggcgtctggtctcattccctgcgcctcgcaggatggcctgacgataaaccagtctggaccggttcctgtccgtgccagcctttcagcgcggcaggcaaaggagatgggtttgctgacgagcggcacctttggccccacttcttccacctcatcagcgagcgcagacctgagcatgtctttggcgaacaggttgcaagcggtaacgcaaacacatggttcgaccttgtacaagctgacctggaaggagtgggatacgccttcgggcttgtgccgtttacgtcagcgggcatcggtgcgccgcacattagagagcgagcttactgggtggcccacgccagtagcgaatacgaacccgcagccagaaacgaagcggggcttgcaacatgtctccggagcggcgcggctgtcgggctggccaactccgcaggtgagcaatatcaccaacgcgacgaccgtgcaaatgagcggggatggtcgagcaactccgaacaaaatcgggtgggcagcggcgttggcgggatgggttacgccaacaactcgcgactggaaggactcggcggggatgacagcgcagcgggatggaaaggacagactggatcagctaccccgccaggcgtacacatgcgggcccttgaggttaacggtttttggcgagatgcggactggctcttttgtcgagatggcaaatggcgtccagttgaacccggcacattcccgctggttgatggggctgccgcgcgcctgggacgagtcgagtccgggatggcaagagtggcaagcagcaaccgcacaggccgactcaaaggctacggtaacgccataaacgcacaggctgcggctgaattcgtccgggcctacatggaggggttatga

SEQ ID NO: 146950 - DNA, 492 bp, Enterobacter cloacae
atgaccgattacaccggcagcaacacgccagcggatcagcgtatttggaagccaattcatggctatgagggtctttacgaagcttgctcatccggggaaattcgttcagttgacaggcttgatagatttggccgggtacgcaccggtaagcaattgaagctgtacgaccattcgcatgggtatagctcgataggcctatgcaaaaatggtgtcaaaacttattacctcgttcatcgaattgtcgcttcaacttttatcggcgagccacctgatggatttgtagccaaccatatcaacggcaacaaaaaagataacagagttgaaaaccttgagtggtgctccatggcggacaacaacaaacacgcccaccgcatgggattgaattacatctcagaaaagaacagaagccgcacctctgagcgaatgaaaaagaggcatgccgagagcagaaaaagaaagtcgaaacttctcgcccgccgggaggccgcatga

SEQ ID NO: 146951 - DNA, 1530 bp, Enterobacter cloacae; identical to SEQ ID NO: 49035

SEQ ID NO: 146952 - DNA, 318 bp, Enterobacter cloacae; identical to SEQ ID NO: 52346

SEQ ID NO: 146953 - DNA, 879 bp, Enterobacter cloacae; identical to SEQ ID NO: 52347

SEQ ID NO: 146954 - DNA, 615 bp, Enterobacter cloacae
atgctgatcggatatgctcgcgtctccaaagccgatggctcgcagtctctcgacctgcagcacgacgccttgcgcgccgcaggtgtcgaacgggacaatatctatgatgatcttgcttccggcggtcgtgatgatcgccctggcttgactgcctgcctcaagtcattgcgtgacggcgatgtgctggtggtctggaagctcgatcgcctcggacgatcgcttgcccatctggtcaacacggtgaaggagctgtcagaccgcaagatcggcctgcgggttctgactggaaagggcgctcagatcgacaccacgactgcgtccggtcgcatggtgttcggaatcttcgccaccttggccgagttcgagcgggatctgatccgagagcgcaccatggcgggtctcgcctccgcgagagcgcgcggtcgcaagggcggacgaaaattcgcgctcaccaaagctcaggtgcgtctcgcgcaagccgccatggcccagcgcgatacttcagtttccgatctctgcaaggaactcggcatcgagcgcgtcactctctaccgatatgtcggtcccaaaggcgagctcagagaccatggaaagcatgttctcggacttacgtag

SEQ ID NO: 146955 - DNA, 1242 bp, Enterobacter cloacae; identical to SEQ ID NO: 105539

SEQ ID NO: 146956 - DNA, 876 bp, Enterobacter cloacae; identical to SEQ ID NO: 39017

SEQ ID NO: 146957 - DNA, 858 bp, Enterobacter cloacae
gtgagatttcagtttattacggattaccgtggctctctctcacgttcacgcatatgtcgtttgatgggcgtaacagatcgtggtttacgtgcatggaaacgccgtcctccatcactgcgccagcgtcgtgatcttatacttctagcgcatatacgtgagcagcatcggttgtgtttggggagctatggtaggccgcgtatgacagaagagttgaaagcgctgggcctgcaggttgggcagcgtcgggttggacgtttgatgcgccagaataacattacagttgttcgaacgcgtaaattcaaacggacaacggatagtcatcataccttcaacattgcaccgaacctattaaaacaagactttagcgcaagcgcacccaaccagaaatgggcaggcgatatcacttatgtttggaccagagaaggatgggtctatcttgctgttatccttgacctgtattcccgtcgcgtgattggctgggcaacaggtgatcgattaaagcaggatcttgcattaagggcactgaatatggcgttggctttacgcaaaccaccaccgggttgtattcaacacacagaccgtgggagccaatattgcgctcatgaatatcaaaagctactgctcaaacatcaattgctgccgtccatgagcgggaaaggcaattgttttgataactccgcagtagaaagcttctttaaatcattaaaggctgagttgatttggcgcagacactggcaaacaaggcgagatattgagattgcaatcttcgaatatataaatggcttttataatccacgccgaagacattcaacactcggctggaaatcgccggtggcatttgagaaaaaagccgcttaa

SEQ ID NO: 146958 - DNA, 798 bp, Enterobacter cloacae
atgaccagtctggcttcctccatgaccgtacacagcctggatcagcgtcttaatcccgatttggctccgccggaaatttctgagaccatgcaggagttcaataacatgttcgatcgcctggaggggtcattccggaaactgtcagatttctcgtctgacatcgcgcatgagctgcgcacagcggtcagtaatctgatgatgcagacgcagtttgcactggctaaggaaagggatgtttcgcattaccgcgaaatcttattcgcttacctggaagaactgaaaaggttgtcacgaatgaccagtgatatgctttttctggcacgttcagagcatggtctgctgcagctggataaacatgatgtggatctggccgccgaactgaatgaattacgtgagctgttcgagcctctggcagacgaaacaggaaagacaatcaccgttgaaggagagggcgttgttgccggagacagcgatatgctgcgacgtgctttcagtaacctgctttccaatgcaatcaagtattctcccgataacacctgtacagcgatacaccttgagcgtgacagtgactgtgtgaacgtgatgattacgaatacgatgtccggccaggttcccgctaatctggaacgtttgtttgatcggttctatcgagctgattcatcaagggtccacaacacggaaggcgcggggctgggattatcaattacaaggtcgatcattcatgctcatggcggcgagctgtcagcagaacagcaggggcgggaaattgtgttcagtgtgcgcctgttaatggattaa

SEQ ID NO: 146959 - DNA, 1128 bp, Enterobacter cloacae
atgattactaccggagtttgcgagccgtctaaataccgctggcagaaattaagggtggattttaaagagtctggcatttcaccactgagcgagctccgcgttatatgcgcattcttccgtggcgaacaggtgaaggcgatccataacaccaaatcattggttgaggcgttggtcgaacatgaggggttcagaaaatggatctgcatcgatggcaatagtattcgtttcagggtttacaaaaatggatcaatgcatattgacgtccaccctgacatcgccgagcggcttaacaatattttatcagctatcgtaccgctagcattacctgccgaccgcatggctcatagcaagaaatctttggaggcattccctgtacttaagcagtgcatcgactttgatacacggatgcagctttctgaactgatgtttaagaatgacggggacaataaatggagttgctggacatctttagggtctctcgccgaacgcaaatcttcgagtgttgccgctgacacccttcggttcttaggggcaacagtaacaaaatacgatgtgacattttcctatgatccgtgtgaggttattcgttacatcggccagataggggagatgcccgatattgtatcacatcagttttacccttcatcttgccgaatcagcgaatatgtatattccctgctcggtgcaggggaaggggataccctcctggagcctaatattggccatgcggatttgcttaaatcattccctgccggtgtgatcgttactggcatcgagcttgatactttgaattgcattatctcccgggctaagggatacgatacgacagaagctgacttcctcacatggtctaagtctaatcaacagaagaagtttgattatgtcgtgatgaacccaccttttgccgataaccgggccaggctgcatctccaggcagctgcatctcatctcgcagccgggggatctctagcagccgttcttccattatctcttcaggggctcgataaccttctgggggaagaattccggacggaatggatggacgtttttgagaacgagtttgaaaacacgaccgtttcggttcgcatcctgtacgccgaacgtattcaacaagaggaagtcctatga

SEQ ID NO: 146960 - DNA, 378 bp, Enterobacter cloacae; identical to SEQ ID NO: 16790

SEQ ID NO: 146961 - DNA, 420 bp, Enterobacter cloacae
atggaatttatcaggcctactgaactgcgagaaattatcgcgatcccactatacagcgatttggtgcaatgtggttttcccagccccgcagctgattatgtagagcagcgtattgatcttaatgagttgcttgtttcccatcccagctcaacgtatttcgttaaagccgcaggggattcgatgatagaagcggggatcagtgacggtgatctgctggtggttgatagctcacggactgctgaacacggagatattgtcattgcggctgtggatggggaatttactgttaaacgccttcaactgcgtccaactgttcagctcaatccgatgaacggtgcttacagtccgattttggtaggcagcgaagatacgctggacattttcggcgtagttactttcattgttaaatcggccagctga

SEQ ID NO: 146962 - DNA, 456 bp, Enterobacter cloacae
atgagcgggacggtagcgaaccggccagcgcttaaaaagcttctgcgaacgctgaatgagggcgatacgctggtagtgtggaagctggatcgcctcgggcgaagcatgcggaatctggtactgctggtggacgaactccggcagcgcggcatccacttcaaaagccttacggacagcatagacacctcaagcccaatggggcgtttcatattccacatcatgtcagccctggccgagatggagagggagttaatcgtggaacgtaccagggcgggattagcggcagcgcgtgagaaggggcgcataggaggcagacgaccaaagctaacaccggagcaatgggcgcaggctggcaggttgatttcaaacggcctggacagaaagcaggtggcaattatctatgatgttgctgtctgtacgctttataaaaaattccctgcatccaaaccggcttaa

SEQ ID NO: 146963 - DNA, 1068 bp, Enterobacter cloacae
atggttgcgtcctgtactggacaaggtaaacacatcaaccgcagtacccggcgcggaggctcagactccggcagcgatttcttcaccaccaaattctctccttcacctcaagaacctttttctaccgacgtgcataacggtgcgcgtagccgttgtatatcgtcatccggtaatgcaagcaatggcttacaaggaagccaaccctctgatgttcgtgcgcataatcgtgccgatgctggcgcgtgtgatgaataccaacaactcaaggtgctatccatgggaagacagaaagcagtgatcaaagctcgtcgtgaagcaaaacgtgtgctgagacgggattcacgtagccataagcagcgtgaagaagaatcggtcacctcgcttgtgcagatgagcggcgtagaatccattggcatggcgcgggacagccgcgatgcatcgccaattgtggcgcggaatgaagctcaggcgcactacctgaatgctatcgagagtaaacagctcatctttgcaaccggggaagccggatgcgggaaaacctggatcagcgccgccaaagcggcggaggcgctgattcataaggacgtggaaaggatcatcgttacccgtccggtactgcaagcggatgaagatctgggcttcctgcccggcgatatttccgagaagtttgccccgtacttcaggcccgtctatgacgtgctggtgaagcggttgggcgcttcctttatgcagtactgcctgcgaccagagattggcaaggtggaaatcgcgccgttcgcctatatgcgcggacgtacatttgaaaatgcggtcgttattcttgacgaggctcagaatgtgaccgctgcgcaaatgaagatgtttttaacgcgcctcggggagaacgtgacggttatcgtcaacggcgatattacccagtgtgacctgccgtcgggcgtgaagtccggcctgagcgatgccatgtcacgttttgaggaagatgagatgataggggtggtccgcttcacaaaagaggactgcgtccgctcagcgctgtgccaacgaacgctggaagtgtactccgactaa

SEQ ID NO: 146964 - DNA, 447 bp, Enterobacter cloacae
atgcttaagctaattgtgacaactttatccctgttaactgcaaccgctgcctatgcgcaaactgagatgacagtaagcagtctggcgacggatagtgaaaccagtaaagcatttcatgaaatgtcgaaagatcataacctgccgggctgggttatgaaaggcggaaccagtacaccagcgacgaaggtaaccttggacaataaaacataccaggttgtttctgcctgcaaaccccatgattgtgcagcagaacaaattgcgatcttgtacgcaccagatagcaagagcatgtcaggggtgttttctaaacaatctggagaagaaaataagcagaaattggtgtggctgaattcaggaagtgatatctcgatagatggtaggacggtcctttttgctgctctcagtggcagccttcaaaaccatccagatgcctttaacttcaagtaa

SEQ ID NO: 146965 - DNA, 930 bp, Enterobacter cloacae; identical to SEQ ID NO: 117956

SEQ ID NO: 146966 - DNA, 867 bp, Enterobacter cloacae
  misc_feature (846)..(855): n is a, c, g, or t
atgtaccacacttactctaagaattcagttaagggaaccggaataccagacagcaacctggatgaagactttactgcaaaagttgttatcttcgataacgcaggtaatagccgaacgctgccaactcaaaaatttcgctacgacaacacgctgggtgagatgacactgtgggccgttcatgatccaaatacgtcttccagcgtcgtacccggggtttctaattatccggcttacaaagccggtatggtcgttaacgaaaaccctattcgattagtctaccggatcccaaaatctaactaccgtgcttattcagaaggtgggcttcagttcatcaatcaatattccgcccccaaagagatagctgtagacagcacttatgcttatgttgaaatgactcttccctatggctcaattaatggggatatggctcgtatggggaactttggccagtggggagggtattatccgtcatacagcctcgttctaaacccatctgcaaaccaaacgcctgcatttgcgggtacctgggtagatttcctcgatgataaggggaactgggttaagtggaaggattttgagagtgtggcttcatcacgactgccaattaaaatttcccgacttcgttttaacgttgaagcccggccctttgcacaagagatcggcggtaaggcgacctgcaccattccggcaggaaaaacctcgtgtgaagcgcctgagacgtttgatatggccttgggtacccaaggctacaatagaatcctttacttcgttcgcagcatcagcaatcccattttgcggtctgagcaatggattatgacacgttggaacaataaacaactgccggtnnnnnnnnnnggcgtcacttga

SEQ ID NO: 146967 - DNA, 813 bp, Enterobacter cloacae; identical to SEQ ID NO: 116874

SEQ ID NO: 146968 - DNA, 921 bp, Enterobacter cloacae
atgtggaacaacgtcacgagctccttaacgagcatatatgaaaacgtcgctggtaatctgagcagggcagttgggtcttccgcaacttctggaggggcaggaggtgctggccagttggcacaggaaacaatgtccagcttcggtataggtcagcttaagcagatggcaatgaagaaagcctacgaattgctaccagatacagttcgtgactttgtctttaagaacgttgctactaccggaggagaggttgtcttctcggctgcggttcaaaactttatgcttgcattaaacgtgatcggttggatttatacagcctatcaggtcactaaaatgcttttagaaatgttggtagcatgcgaccagaaagagatggaagcttctattcataagaatcaaaaatcctgttttacattagatacggaacgatgcgtcaaatatctgaatgttggtttcacaaagaaatgcgttaaaaaagcaacagacatgtgctgttataattccatgttgtcacgcgttattatgcaacaagcttatccgcaattaggaatagaccctgtcgcctctaattgcgtggggctatcaataaagcaaatacagcaactggatttcgataaaattgatctgacggagtggattaatgatgcagttcaggtgggagaagttcctgatcaatattcaaaattctccgaagaatcaattgtggataatttaccattccagaatgagaactatcaacttccatcagaacgtaccaaggaagcaatgggcggtgaagaaaatatgataaaggccagacaagaaaatgctcaggctataaaagaggaaaatgtagattgtagctatttacctcgaccggccatatgtgaggtaggttcaactacgctggatccggttacgggcaagcagttgccgaaatattga

SEQ ID NO: 146969 - DNA, 864 bp, Enterobacter cloacae
atgggaagtggatggcatgaatggccgctaatgatcttcacggtctttgggcagtgcgtggcgggcgggtttatcgtccttgcgctggcgctgttaaaagggaacctcaatgctgaacagcagcagcgtttggtgttaagcatgtttggcctgtgggtgttgatgggcattgggtttatcgcctctacgctgcacctgggctcaccgatgcgcgcgttcaactccctgaaccgcgtaggtgcctcttcgctgagtaacgagattgccagcggggcaatcttctttgccgttggcgggctggggtggttactggcagcggtgaaaaagctgccgtcagggttacgcgcgttgtggctcatcgtcaccatggtactgggcgttgtcttcgtctggatgatggtccgggtgtacaacaccatcgataccgttccgacctggtacagcgtctggacgccgatgagcttcttcctgaccatgtttattggcgggccgctgctgggttatctgctgctgcgtgtggctggcattaatggttgggcgatgcgcctgctgcccgcggtctcgctgctggcgctggtaatcagtaccgttgtcgcgctcatgcagggagcggagctggcgaccattcacagctctatccagcaggcttcggcgttggtgccggattacggttcgctgatggcctggcgtgtggtgctgctgacggcggcgctggtgtgctggattgcccctcagcttaaaggttactcgcctgcgctgccgttactgtccctggcctttgtgctggtgctggcaggggagttaattggtcgcggcgtattttacggtctgcatatgacggtcggtatggctatcgccagctaa

SEQ ID NO: 146970 - DNA, 522 bp, Enterobacter cloacae
atgcaggataatagtcggcatcttacatcaagacaaatagaacgttttctgaatgggatattttctcatgagagaattatagagcaatttggaaaggttaatgttacaatattgactgagccagatagtgtagaacgtatgctttctttaaaaggtattacgtgtataaatatggtcactcgacgtcctaatccggatgatctcgcttctgcagaaagtgttatgcaaaagcgcttcaagcgtattggtgttattgaagaggataaaacatataaatcagagcgaggtcaggaaattaaacctgatggtgagttaaaacaggatgctcttattgcttcgagaaatggtgaagttagtatacgcaggattaatgaggcgggattagtagaggttcatgcctcaagtgacataccacttcaaagggttgaaccatatgattctgacgtaacatcggtttctgagctattgttattaagagcaaaatcattagcagatgaatttaagaggcttctgagaaagtaa

SEQ ID NO: 146971 - DNA, 573 bp, Enterobacter cloacae; identical to SEQ ID NO: 49122

SEQ ID NO: 146972 - DNA, 207 bp, Enterobacter cloacae; identical to SEQ ID NO: 102721

SEQ ID NO: 146973 - DNA, 624 bp, Enterobacter cloacae
atgagaaaacacttcagtatcataaaaaatgatgaacagtatgaagagtatatggctgactttttgaagctgatggaggagcctctttctgaaggttcgccagaaatggatgatttcgaattactttctcttctcattgaaaattatgagtctaagcactatgccattagcaaaccagatccgattgaagcgataaaatttagaatggatcagtacggtttgtcacgaaaagacatgactaaatacatgggttctttatcaaaagtttctgaggttttaaattataaaaagccattaagcttaacgatgataaaaagccttcactttgatcttgggattccagctgaaatattgttgcaagattcaagtaatattgaatggtctccagtatcgataaacactgaatcatttgcaattggcattggtgatttgtgtaaaaaaatcgcctcttattctggtttaactacagcatttgagtctgaggaggtaagtttatcttcccctcagataatcaagtttgctactgaaaacaaggctcgtgacaacaaaaaagtaaacatttcatcgttagatttcaacgatatatcttttaatatgcaagacaacgactttatgtgtgcttaa

SEQ ID NO: 146974 - DNA, 588 bp, Enterobacter cloacae
atggtgatagcagcgcctggatcaggcaaatcgttcaccatgatagaagcggttatatcgattctcaaaaagtatccatatgcaagaatcgggatggtgacctttactcgcgctgcaacaaacgcacttgcagcaaagttacaaaagcgattgagcaagaaggatcttgaccgggtgctggtggatacttttcacggactcgttaagaagcaactggacatgattcgctggccgggaaagatgttgatagggccagcacagagatctgtcattcaccgggctttgaaagaatccggtgtaacgatgaagtttgctgaagctgaattcgttattgatgctatcggcagagaaatggatacggatgtgatttcagttcggcataacagacaacagatccatttgtttaatacctatcaggcgttatgccagaaagaccatgtggcggacctcaatgctctttcaaaatttgttgtcggtcaaatgcattcgggaaaaatgcgcacgttagatttgacacatttgatagtagacgaaggccatctactccttcagatcctcaggaggagtcaaaatatttcaacagtttga

SEQ ID NO: 146975 - DNA, 531 bp, Enterobacter cloacae
  misc_feature (387)..(396): n is a, c, g, or t
atgacaatgctcaaattactgattattggcgagtgcactgctgaaccctatatagatgccagcctgacctatataagcgaagtggaccctatgtgggaaagtgatctgcttacactcgtcctgaatccagaggcagtagtttttgcaaacccaattgcctcaatggtgtgcgctgctgactgtgtagcagtaacagcaggaaaggataatctcgctgcatacttttgtgccggatgcgatggcaacctttatccattaaccggccacatttacgcaaatgatgacgctgtaaggacgagttcactgataacccagcgtcttctgactaaactacatcgccagggaatgctgatgcgaacgatgggagcagacgcaatgtgtgagaannnnnnnnnnactttacacctcgttcccagtatcggctttcaatgcttttcccaactcctgaggcgaaagggccggattgctgtcatcgtcttggtgattcggtacatgactggtcaacccttaaaggtgggcgcaaaaaaatag

SEQ ID NO: 146976 - DNA, 276 bp, Enterobacter cloacae
atggccggacgatggttacctgagctgaaaagcttcggcgcttattttccctcaagcactcgtaaagctgaggcagccaaaaaatatcaaactgaagatttcttcaaccaggttgagtcaaaagagtatgtagaggatgcactgctgttttatctggagaaggctaaggcagcctttcctgaaaaagattgttcatcccctgaaaaggtcattgaactcctgcatggtcagttggcagcaaaatccgagcaactgataagaggctttgttgaataa

SEQ ID NO: 146977 - DNA, 276 bp, Enterobacter cloacae; identical to SEQ ID NO: 5786

SEQ ID NO: 146978 - DNA, 378 bp, Enterobacter cloacae
atggacgaacagtggggatacgtcggggctaaatcgcgccagcgctggctgttttacgcgtatgacaggctccggaagacggttgttgcgcacgtattcggtgaacgcactatggcgacgctggggcgtcttatgagcctgctgtcaccctttgacgtggtgatatggatgacggatggctggccgctgtatgaatcccgcctgaagggaaagctgcacgtaatcagcaagcgatatacgcagcgaattgagcggcataacctgaatctgaggcagcacctggcacggctgggacggaagtcgctgtcgttctcaaaatcggtggagctgcatgacaaagtcatcgggcattatctgaacataaaacactatcaataa

SEQ ID NO: 146979 - DNA, 318 bp, Enterobacter cloacae
atgctcggaaagatactaaaaaaaatgtctaacaaaaacggtatctcacaaacggaagaatctgaattcgcatttcttttaacaaactatattaaacagactttgacttttagagaatggcaacgcaatgctgacggaaatcaacgactgcactttcttattaatatctacggtgcaaaagaagacggtggcgaagtggttttaagaccatttattgtaaatcctgatgaattaatgcttactccagcggatgtcgttgaatttaattcgcaggttatcaacgttgatcggcagcgtcatcctgagtggttccgttaa

SEQ ID NO: 146980 - DNA, 399 bp, Enterobacter cloacae
atgcgtaatttgaagtctctaattagcctatcagttatctatctcctgtgtttctttatgatagccatatcgcataaaactaatgctagttcgttttatgtgaagaactacagtctgccaagctataccgagtttcatggcaaaattaaaagtggtgaatttgatgaataccatgtgtttctgcagaagtctcagcacctcagattggagatatcagataaacgctttgaactgagagtgactggcccggatcacagaggaagtaagatgaacacccgactggataatagtaatgtcttcatcgccccagtatccggtatgtataagattattgttaaaagcacgcatcgggatcaacagtgtaattgctatgttctggcaattaactttacggattga

SEQ ID NO: 146981 - DNA, 246 bp, Enterobacter cloacae
atgggaatgggtgacgattactataagctccctgaggttgaagaacacatctacaacatcaagaatgcctacattcgaggtgactatgtagaccctatccgagtacgtgttattgatggggtaccttttgttcgccaggggcactgccgtttaaaagccgcaatgatggcatgtcatgaaggccatgacataacaatcctttgcgttgagattaaagaagatgaaattggctgtgatctcttttga

SEQ ID NO: 146982 - DNA, 369 bp, Enterobacter cloacae
atggaaaataatgcactgactttggttttaaaaaacgattgggtagcatcgtcttctggtaatacctataccggaaaatacacagttggacggtttcacctgacagatgcgttcatcgttgtgtatatgaagctgatacatggaattgaaatacccgatttatgggtcagtagcagcttcactaacataccagataccgatacccgaagggttatgtatatggaaggctgtgatatgttatcgaaagatacaatgaacgaaatccgtaatgcagtgaagtccccgcctgaaaagctgaaaatatatcgtaatggagagcgtattgttaagatagaagttatggagaaacaaaatgacctcaaaatttaa

SEQ ID NO: 146983 - DNA, 570 bp, Enterobacter cloacae
atgacaaagcaatcatcatcaatcgttccgctggtagatatcactgctacaactgataacggcagattcacgatgcacgggttacgccctaatgtcagtgattctaaagaagtcgcttgttccttcgggtccgaagctggtgatttcttgactgccatttcgaagtcaacaaccgttaacgtgaagctggacttcaatggcgagatccgcaattacagtttcgacactacagagttcggaaaggtattgactgcaaatgggcaagccgtgggggaaaaagcagctaaagactacgctcagggagtacgtgcacccgttttctatagcagcggtagcgaagctcccaaaaacaatgcagtaacctcaaacgtcgatacacagagttataaagcaagcgatgagaaacttaattcggtctggaaaagccttagccctgaaacccgaaaacgattgcttccttctcaaagagaatggataaagcacaaatccggctgcaataatgaacagaaatgtcttaccgacatgacgaacaatcgcattcgtgaactggagtctgaatatggaaaataa

SEQ ID NO: 146984 - DNA, 636 bp, Enterobacter cloacae
gtgaattttcaggatatccatacctattatcagcaactcaatattgggcaattctttccgcacatgctttgtaaaggcgaggccttaaccgttgccgcaaataaaaaattcaccgtcgagcctggctatatctatttttgcactgaagggtcgctgacaatattaatgcctgatgatggcctaaatattggcaatactatcgagtatatgccgatagggttaatggaaaggtattgtccactggcgaagtatgaatatcgcagcagtgcgaaggtgaagctggtgagaatagcctgggccgacttcgaccagctatttttcgagggcgggtctgagcgcatgcaggcgctggccaccatactgacctacatgtccattttcaccatcgacctgcacaatgaacgcaggcaggtcaccagctaccagaccatcaaaccgatgctgtaccgctatctctatcggcaggagacccacacgggagagaatgagggcctggcgctgtttatcattaagcgcactaacctgtcacgcacgcatgtctttcgcgtgctggcagatctcaaagccgggggctatatcaccatgaagcgcggaaagctggtgtcgattgaccggcccctgccggaagcgtattaa

SEQ ID NO: 146985 - DNA, 1998 bp, Enterobacter cloacae
atgaaattaaccctaattgctaaacatctggcgcttgccggtgtgttgacgtcgctgtcgctttccgcgtttgcggaagtgcagccgcaggatgccactgccacaacccggcaggcaaataacgccctgtataacaaattaccgtttgccgataaaaccgactttgagaacgcccataaaggttttatcgccccgctgccacaaaacatgattaaaggcgagcaggggaacgttatctggaacccggcgaaatatgatttcgtgaaagagggtgaaaaagccccggatacggtaaacccgagcctgtggcgtcagtcacagctgatcaacattggcgggctgtttaaggtcaccgacggcgtgtatcagatccgcaatctcgatctctccaacatgaccatcattgaaggcgagaagggcatcaccgttatcgacccgctgttaagcgctgaaccggcgaaagaagcgctggatctctactatgcaaaccgcgggaagaaaccggtcgtcgctgtggtgatcacccacagtcacgtcgaccactacggcggcctgcgcggtgtggttgacgaagccgacgtgaagtccggcaaagtgaagatctacgccccggaaggctttatgaaagaagcggtttccgaaaacattatggccgggaatgcgatgagccgccgtgcgagctatatgtacggcaacctgctgaagccggatgcaaaaggccaggtgggggcgggtcttggcaccaccacctctgcgggtacggtgaccctgatcccgccgaccaactacattacccataccggccagcaggaagtgattgacgggctgacctacgactttatgatggcgccgggctcagaagccccgtccgaaatgctgtggtatgtcaaagagaagaaaatgatcgaagccgcagaggacgtgacccataccctgcacaacacctactccctgcgcggcgcgaaaatccgcgatccgctggcctggtctaagtacatcaacgccgccattgagcgctggggcgcggacgcggaagtgattattgcgcagcaccactggccgacctggggcaacgagaatatcgtcaagctgatgaaaggccagcgcgatatgtatcgctacatcaacgaccagaccctgcgtatggcaaacaaggggctgacccgcgacgagatcgccgctgaatttacactgccggaatcgctggaaaaacagtgggcgagccgcggctattacggttccgtcagccacgacgtcaaagccacctacgtgttttatctcggctggttcgacggcaacccggctaccctcgacgaattgccgcctgaacaggctgcgaagaagtttgtggaatacatgggaggggccgatgccatcatgcagaaagccaaagctgactatcagcagggcaactaccgctgggtggcgcaggtgaccagcaaaattgtcttcgccgatccgcagaacgctgcggcacgtaatctggaagccgacgcgctggagcagttaggttaccaggcggaagcgggcacctggcgtaacttctacctgaccggcgcgcaggaactgcgtaatggcgtgaagaagctgccgacgccgaacaccgccagcccggatactgtgcgggcgatgaccccggaaatgttcttcgactacctgggcgtgcacatcaacggggtgcgggccggtaacgcgaaagcggtctttaacatcgatctcggtaaggatggcggcaaatataagctggagctggaaaacggcgtgctgaaccataccgccaacgcgcaggcgaaggatgctgacgcaaccatcaccctggaccgcaccacgctgaacgacatcatccttaagaaagagacgctcaagcaggcgatggacaagggtgacgtcaaggtgagcggagacagagcgaagctggaagagatgctgagctacctgacacatttgacttctggttcaatattgtcacgccataagtttagcgttaatcctggttaa

SEQ ID NO: 146986 - DNA, 459 bp, Enterobacter cloacae
atggcagttacaacccttaacagcgtagcggattacctgctttgctttgctcaagagcatggggatgttatgacgccgctgaaattacaaaaaatggtgttttatgctgatgcctggtacatggctctcaatgatgacaaagaattgatcgctgaccagtttgaagcatgggtacatggccccgttgcacgagatctatacattcgatttgctgactacaaatggcaaccgatcaccagcgaaataaaatgcccggaacttccggacgatgtttcagagcacctgagcgaaatctataacgtattcggcaggttttcggcctatgagcttgagcagatgacccatcaggaaaagccctggctaattgctcgtggtgatactccatctgatgccccgtgtcgtaacggcatagacaaaggtgtcactgctgaattttaccgcagcatgatggatgcttaa

SEQ ID NO: 146987 - DNA, 438 bp, Enterobacter cloacae
atggctaaagggaagattaaagcggggaaacttccggtagcagataacaaaattgttgccggaacgcccaatccgacgacaacaacccttagcttttctttccagtacattgatccagcacatgcgaaatttggtttctccggtcagacagcggcttacttttgtaaagtacttgaacggcttaaagatatatcgagcctgacatcacttgagtttactacaaaccggaatgcggcgctcaaatcccactgtattgagtggaaaacgacctctgagcctgacggttttacccaccttaacgagcaattccagagctttacaccttatcagtttgcgatatcacgtaatgagtacggccgtatacatggttttttcataggcagcgtgttccatgttgtatggcttgatcctgaccatcagctttatcccggtcagtag

SEQ ID NO: 146988 - DNA, 222 bp, Enterobacter cloacae
atgaccgcagagattattgaccaagcgaatgaactggctcagcaacgtatcgatatggcgatcgccgctcaccgactcaaccgcaatgccgtatcagcagagcgttgtgaagaatgcgacgaaccaattcccgagccgcggcgcgctgctgttcccggctgccagacgtgcgcggagtgccagggtgttatcgaactaaagaataagcagaggggattgtga

SEQ ID NO: 146989 - DNA, 480 bp, Enterobacter cloacae
atgagcttcgaatacatcaattcccaatatggagttaacgcctgtgtcggccgccgggtgatggcttatggcgagccaggaacaattgtgcgtgattttggccactacattggcgttgtgctggataccgcgccttaccactcacccgaacggtaccatcccactgacggcatagagtacggcgaggtagttgaatattcacctccaaaacttaccgcccgtaagtacaaggcaaaaagcaattaccaggattttctggatgctgatagcggccatgaattccatgagtggcttggtatcaacaagccgctgttggactacgaccgcaacggaaactgccggatgtatcgcttgggtaactaccgggatatgagcgtttacggggagtggcggcccaacaagaaagaagccaaagccagttataaggcgaaattgaataatttactgaaggagtccagaaatgaccgcagagattattga

SEQ ID NO: 146990 - DNA, 210 bp, Enterobacter cloacae
atgatcaaccattacggcactaccccactcattcgccaatgcgtcacgcccggcatgatggcaatgcatgaaggccggacctatcgcgtctcagcggtcattcaggagcgcaaatgggtgtacctgcacactgacgcagaaatcatccgcctcagtgactgcgtgattgacgtccttctggacggttacggcaaccctatccagcactaa

SEQ ID NO: 146991 - DNA, 159 bp, Enterobacter cloacae
atgacagtcacccacaacggcaagcagtacaccgccaaaaagcttaacgataacgagtggcagctgacgtcggtatcggcaccgcgcgacaagctgacgcttaaccgctggcagatgcatatcgctggactcctggaacaggttgaggtgaaggcatga

SEQ ID NO: 146992 - DNA, 285 bp, Enterobacter cloacae
gtgacgaccgccgtggcggctggggtcatggaaaaggcagaggccacggtcacggccatcaccattaacaacaaaaaggagccttccggctcctttttcttttacaggcctgcggctgtgcctatcagcaaccacaagtttaacgccaccaccacgaccacaatggcccacccggcgcgcttcacccacgtcgaattcaccagttcgcccatcagcgatttattactggtaaagatcagcagtggcaccagcgccagcgcaatcccgaaactcagcaatacctga

SEQ ID NO: 146993 - DNA, 192 bp, Enterobacter cloacae
atgaatttgaagattcaacagcacgtatacgccggacttttagaagaagcgaagcgccggggaacaactgttccaaaccttgcacgcgaagtgctagaaatcgccgcccatctttttgataacggtgaacctttacccgccttggggaatattaatggagataataatgaacaaaagagcgtcgcaaaataa

SEQ ID NO: 146994 - DNA, 801 bp, Enterobacter cloacae
atgaacaaaagagcgtcgcaaaataaaccagaactatggattgaagaagatcgccgccttttctatgcagatgcaatcacaattaagtccactggtgaatgtttcaaagtcgaggacaaacttgcaaagatccatacctatatggtggatcaatacaacagctaccaggctgatggtaagagtttctacgaagatcagcgagatatcgcgactaaatgtaaatgcacaccaaaaactcttggcaagtggctgaaagttcttcaagcacttggtctacttatcattgatgagagccagaagagccactcttacacggtgcggtcagtagttagccaggaacacaacttgattttcagctatccaaaattgttgaacggcaagccgtcatacgaccatgaagaggcgcttaaacgcctttatgcatctcagggacgtaggaacgtaaaaaatcatcagccaaaaaacgaagagagcggtaagagtgagcagaaacgtgatgtggaatctttcgtggtgggatctgccgcgcctgctgctggaaaaccagacggcatacctgctgtggatattcctgtcgatgttgatttatccggtagtgatgatccatcactgagtgattcaaatgggagaaatgtcgttgagttcccgcgaaattgtagacccaaacccagttttaaatttgtagccccagatgatgacgaccacgaggaaatccatcaggagcaggaaacctttattgagccagatgtttgccacgaaccaacgccggaagaaattgacgctgcggtagctcttatgtga

SEQ ID NO: 146995 - DNA, 2160 bp, Enterobacter cloacae
atgtctggcacaaataagattgttaccagcaccgttaatgaaatctcgtggatcacagacgatgcctcatatcaaaaagccaaaaagaagattatttcgcttaaggctgctcatgagaaaccagctaaagcgcttgagaaggcccagaagcggaccgtccagagcgaaggcaaagcagcactagccgcagcgaaagcccagacagcgaagctacgccaggctgaacaattgtcaaaacagcagcagaaacaagctcagattcaggccaaaatggagcgggatgcagtcgcccacgccaataaaatgacctcattacaggctcgccagttatctcagcaggagcaggcaactcgtcaatctgccagactagcggccatttctgcaaaagtgcaggccgcagccagatcacgagtgatgacctacaatcccaacatgcctggagttcactccgatccatctctggtggcacgtcagactgaagcaatgaaccgtggtcacggcgctgttgctgctgacatcgcagccaccaaaaaggcgatggccctggaagagaagagccagcgtgagaaagaggcggcttttaaacgacaaatcaccgctcacgatacactccgcagggcaagcttgacgatcagccatatcgaagctgcatccctggctgacaaaatgaaagcggtgcaggccattaaagaggccactaaggggtacgccgagcagcgttataccatcgcagaaatgcgccatgaacttgctaaagcgactctggaaaccagacgccaggcgcgtattaaccgccagattgttaaagataaagcgaaagccgagcgagcagggcgcatcaatgctcaacgtctgacccgtgaacgtagcgaacgtggttatggtggccttgcagccgctggtgttatcggtggtgcgtcgttagtgggtagtatgggcgtttctcgtgtcggtcagaccctccagggaagccttgagcgttctcgcgatgtgaaaaaactccagcagtacgggatcagcaaccttgagttcgctgcacttcaggatctctcgatgagccgtgttggttactcactgagtgctgacaagctggctgacctcaacaaggacacaaccgaaaaggccggggaattgttgaacaccggctctttcaaacgtaacaagaaaactggacaggtgaatttcagcggcggtggcgagttcgcagatatcatcaacaatgtgctgacctccaccaacggcaaccagaaggtagcacagaaggtgatcggagaactgcaaaagctggattttccgaccttcatcacttacctgaaacagttgcagaaaactttcaaatggacggacaaccagacccggcacctggctgaggctgtgaatgatggttcggtcttcctcgaagtgttcaatgatgaggggcagggacttatccagcgtatgcatcaactcgcttctgaagggtggacgctatctgatgcacagcaggccaaccttgataagctggcagctttgggtgctgagtacaaccgagtacaaaccagccttgcggatcacttctcagcctcgtttgttgaaggcctagggcagtacgctgtcaatactgacactctacgtcagaagatgactggactgatcccaatttccgatgccctcggcgttgcccttggtgagctaaccaccaacattctctccttcgctggtcgagttggtgaagaactcaagaaaggcgcgacactgccggatgcagtctacaacaccgttgtggatgattccgcaaacggtgctgccgattggattaaggaaaagaccggctttgatccacgtagcatcggtcagacgcttaagcaggtttacccgtggctggatagttcagcaccgagcaatattggctcaggcacggcgtataacgatccagcgctagcgttgaatgttcctggttttaactcaatacaaccccagcaaccaacgttcacggttccgacaattgatagtatgacgcagcgacagccgatccctgtcagtgtgaccggacaggctgagattaaactctcaccgcttgatgttaacgttaatgatggtgcgattaatggtctgattgatacaaagctgaggagctatgagcaggcacagaacaacatgatccttggtgttgctcaatga

SEQ ID NO: 146996 - DNA, 714 bp, Enterobacter cloacae
atgatgacatacaaattacaatggataatcatcattgcgtccctgttaatgacgaaagttgcctctgccaccgagtttaatataaacgccatcgataaagatcagcgcggcagcgtcgatttatcactgtttaaagatcaaatatcggttacgccgggaagctatttcgttacggttgccgtcaatgatattccgctggcaaatggctggcagcttcgctggcgagaaataaataacgccgttcaggtctgtattccccccgagctggtcgatacctttgcgttgcaggatgacgttcgccacgctttgcctgagaaagagggatgcgttgatttctccgccagacccgacatccgatttacttttgagcaaggcagccagaccctgaaagtgaccatcccccaggcgtggctgcaataccgtgcggttgactggatgccgccatccacctgggacatcggcgtgccgggcgtactgctggattacaatctttttgccagccattatcagcccaatagcggcagcaacaatgacaacgccaatacctatggcaccgccggtgcgaacatgggcgcgtggcggctacgcagcgattaccagtacacgcaaagccatactgacgcaggctcggagcataatggacgtttttcacgcgtgtatatgttccgccctctgccctctgccctcgatcggtgcgaaactgacgttgggtga

SEQ ID NO: 146997 - DNA, 2106 bp, Enterobacter cloacae
atggctgaaactaagattatcaccaggacgacaaatattgtcgattttgaggtctccaaggaatcattcgggcgggccaagaaaaagattcaggatgtgggcaaggcctgggagaaggttgatcagaaagtcaaatcagccagccgtaaccagcttgagaacaacaaggcaatcatccaggccaacaatctggaggctaaacggttacagtcacaaaaccgcctgaacgccgccaaggaaaaggagcgggcgatctccgctaagaccgccacgcagcgcaaaaaggaaacggcggaccagctacgtgctgaaagcaagctacaacgtgaactaggtaaacgcttcgccgggcaacgtgggccacgtgtccgccagccgttaccaacagcggcggaaatggttccaaccgtccagggcctgatcaatgcccactctccagagtctaaggcatccgcagcgaaagccgcagcgcaggcaatgcgacaagccaaacgtgaagaggcaaggctcgcccgtgaagcaggcaaggctgagaagcgccgccttgattatgcccgtagacgttatctgactatccgatctgaggcgtacaagatccagaatattgagggcctgaccaacgcagaacggacggaagcaattctgaagatgcgccgtgttgcggatcagcaggccaaggagaccttaaacgcacaggaaacacgattcgagctacgcaagatcacccaggaactccagaagcaagcgcggttgcgtcgccgtatggctaatgtacggacccacggcggaaactttgggggcggtggtcgccaccccgggcgcggttccaatggtgtgacggcgggtgtgggggttggcctcgcaggtgcagcgggagcagcggcggcgggcctcctgacggtagcgggcgcgtcaatggcggtagcctctacactccgggaatcatttgaacgccagaagcaatacagcggcctgaaagagcagggagtaagcgccacagacgcagacgcgatcctgttagcagcaaaccagaaaggggcgggaatctctcttgataagctacaagatcagtttgttgattaccgggacaaggtaggtgatttgtcactggggcaatggaaaactgacaagaagggtaaccgtacatactccggcggtggtgagctggcagatgtcgcaaatcttgtagaatccaagcaagctggagccggggcaggcgttatcaagcgtctacagtctacagacttcaagggctatttggggtatctccgcgaactccagaagcagtacaagctaactgatgcggagatgaccctattcggtgaatttattgatgatggttccaagactttacgggcctttgatcaaaacggacagatcgccagtgatgccctgaaaactgttaagaactcttctctgtacctcacagacgcgcagcgtgagcaggtgggcaacctccagagcagtatgatggtattgggccaggcgtccagcgggttggctgataactttacgcttgggtttgctgaggcgtttaattcttcggatgaattgaccaaagcaatggaaagcctagccccagttatggagggcctgggacgtgcatccgcagacgtcctaaattctttcgtgcgcctctttggttggctcgcccatgtcctcccgagtgtaggcggtgacggtacagcagcaggcattaaggagagttacacggggtcacgtgatatgactcccaagtcagaacagccggagaaaggattctgggaaaatctgtttgattttgactctaaggctttcctcccgcaggagtatggcggcaaggccccaaatctgccaaaacctctacaggtcccggataacctcccggcgttggccccgtttaaggagctgaaagtaaccccggcccccgtgccaaccttcagcccttccagcctgacacaatcagccgtgaacgctaaggcatcacaacagactgttgttgtgaagcaggagcctctacaggtgaatgtgaacgtgaatgacggcaaggttaaggatctggtgaatgcaactatggatgaccgagagcgcgatcacctcaatatgatgacagccgggcagatgtaa

SEQ ID NO: 146998 - DNA, 414 bp, Enterobacter cloacae
atgggtcatagtgctaaagcaatcacccatgcgtttggtgtatcgcttgcgtatgccctgaagatgaaacgggaatacaaccctgtgaagtatcaaaaggccgtgctgacccttcccgagaaagccgtgatgattcagcagatgaaagcggacaatctcacgccggagatgatgggcgaactactggggatcaatatcaagactgtggagacgctttcaagagtcaacccggcccgctatttggtcgatcagatgcttccatacgatcaggtgctggctaatctcagagcgcctcgctatgtggctaacccggtttacaagttgggaaccagcatgacccgagtacgcaagattatccgcgccgggcgtcagcagttgcggaccgtgatcacatcctccaagcgggcagcatag

SEQ ID NO: 146999 - DNA, 618 bp, Enterobacter cloacae
atgaccgcagcagcaactaagccatataccgccgtttgtcacgaactggcagacattgagagaatcaacggcaaggtattcaccatgaatatggtttatacctacagcctgatcgagggttaccagaccaatgggcaaaccgcctatttctcacaagacatgctaaagcgtcgcctgggggttacccgccaaacggttgtaaaactcctagcggatatggtggctatggggctgatcaacaagacggcgcagatcggcggcaagacgtgccattacactgtaaaccggatcacccctgagatgttgggcacagtggaaaaggaacagccagcaggagcgccacagcggcccactaaggccccggaagaggtggaggagtcaaaccctacagcgtcgcctgtagaagcgcctacagaagcgcccatagcgccggagattgtgccagcaacgccaggacctaccacaccgatcacgttgatgacggtctacagtgagaaggtggaaacggtggagcaagctgatccccaaccgggggaggtggtgccagcggcgacgccatacccaaggggagagatcaaggagccatctagggattgggatttggacccggctttttga

SEQ ID NO: 147000 - DNA, 261 bp, Enterobacter cloacae
atgattcacagctacaaagacttgtcagaaagccgccttgttaacgcttacgcttcccagatcattaacgcgatccgggatgatgaatctatgccggggctttacgatgacatctacagcatgttgttggaggtagggccggggcgcatgattacaatcggtaacccggcgatcacggcgtccgcctcgtggtggggcgcatttttcgggctgagcctttcagccgatgacctcgacgaactcaaggagattgacctgtga

SEQ ID NO: 147001 - DNA, 444 bp, Enterobacter cloacae
atgagcaagattgattacagtgacgttgacgcccttacatggcgcgtcgatcagcgcctgacttcccgaaaatccctgattgagttacggagccgttttaagaagctgaacaagaccgcagaggtcgaggctatcaccgaagccctgaaccgtaccgaacagccagcatttggaatcatgcgacagaatgagcgcctgatcgataagctcgaagtcatggacgcctcgcaggctttagagttaaaagccgccgtgaacatgtacaccgaaaagaaccgaaccactcacgctaacttacaggtctccgtggtcctcgcctaccaggggatgtttgaagctcgcggtgtgccaatgaactatgacgaaacaatgagtttcatcctcctgaatgccgccgaacagttcgagcgcttaacgggtgatctcccgatcttgatcgactaa

SEQ ID NO: 147002 - DNA, 225 bp, Enterobacter cloacae
atggaccccatcaccagccccgatcccacacctctgtggagagaaggaaattatccttttgtgtggatactcagccaacaggccacgggagcgaacccgccggagaatacccacaaaaaagacccgggaaggttaccgggcggactcaagagaggagattttattgttttggttttcctgtggcgactcatcgacaagacaccagaggaaaacggcgtgaactga

SEQ ID NO: 147003 - DNA, 360 bp, Enterobacter cloacae
atgcgtacttctgaagcgtttcctaaacgcatgtccgacgtgctggtcaatagtgcctcggatctcttttctcgcacggaaattaaaggcgtaagtctcctggcggatctgttcgtcggcgatgtctttaatgctgagaattacgagttattcgatcaggctgtagagggtcaacctctgatctgtctggtgaacgtctccgcaggcgataacaagacaatcgttgtggtggacagattggcatatgtgaatacgttcaacctccgcgccaaagatgccgactccctgaaggaagcgatcaagcgtttaaccgcagatggttctattcgtatcggcaacaacaacggcatggaggcttaa

SEQ ID NO: 147004 - DNA, 1026 bp, Enterobacter cloacae
atgagcgttaaagatattcgtaaagagtttgaaggtctggatctggttggaaaactggaggatatcaaagagggcaactatctgatccaggatctgggtctgttctcccgtggtacatcaagtgtccctaatgctcgtgtggctgacattaccgcagcagaagagagcaagctagagagcgtatccaggtacggtacggacacaaatcacatgaaagcctcctccgctgttttccgtgatgcagagatccccgtgttccatgagaccggaatggtccgcccggctgactggcaaggtctgatcagtcctcaaaccaatcagagcatggcgatcactgaggttatccttcaacgcgctacccaattcgagcgtgattatcgccgcacggtggaaacctcccttgcggaagcgctgtttgaacgcaaggttaccgcgcctcataccgatgacggtgatatctcctttgatgccgcgtttggggtgtctccgggttcctttaccctggatgcttccgccgattccctgtatcagcaactagccaaactgcgccgccaggtggcccaagcgctgggcggtgcccgcaactatagcgaccgtctctatgtgatgtgtgacagtggcctgtatgacgttatcgccaccaacaaagagattcaagcgtttatcctgcacagcgtacagcaggcgcagatctccggtgctgtcattcctaacgcattaagtggttttaataccatgtcgctgggtcctgtaacctttatcgatctggctggtgaccctacctacccagttgaagaaaacagcggtttggttgtcccacgtatgactaaccctgacgtttcgtttttgcgccgaatttcaggaccatgtagccgcaatcagagcctggctgtgaaaggtggcgttaaggatcgctacggttggaccagtgttgacgatgacgggatgattaagatgcaaagtgaattttctctgttgcctctcctgttgcgtcctcagtggctgactaccatcacgctgaagtaa

SEQ ID NO: 147005 - DNA, 201 bp, Enterobacter cloacae
atgaaattagcgatcaacattccggggatgggtgaggtgtacaccgccaccaatgccgatattatcaaccgttcggcgctggctcgtaagttggggatcgatcaggtggcttttagccgttacgaaaagcaacatgggtttgagcgagcattaaaaataatgttggaaaagaaaaaactccggcagtgcatgaaaaactga

SEQ ID NO: 147006 - DNA, 870 bp, Enterobacter cloacae
gtgttggttctgctaagaagggtccactcaatgtcatatacagaatttcagcctgttacattccaagaattagtgggtgaagaggttgtagatctaattttcaataaagcccctacaaaagtcttatctcgtgtcgtaaatgcaatcatgcacgtagagagggcaaaaaaacttaaagatattgacgctgaaatggcctcaatcaggcttattgcagcagaagaggaactagttgttgcaatatttgaatggttgaaaatcaataaagagaaaatgcctcagcatactgaactagtcaaaagttataagaatcatcaagtgaaactgatgtttgttccagtgcttctcctgatgaagaatattctttggcattgtgtgccaccaattcctaacctaaatgaaagaaatctaaaaatttatcctaagcatgatgacgggaaaattgttatcatgttacaactaccattctcagatgtacaattccctttgaatccactatctgtttttatcacaatgggcgaggatgtggatgaaaatcaagtggttgattcattgtattcagagctggaagatactgtaaaaataaaatatggcatgacattaaaacaattcataaaacaacgtgccgaatttagaaatactcttctttatgctggggatgccatacctgttaactatgtagttgattatgacgagatgacatctatctgttatagtgcgtatgaagcccttttgtggtctttggctgcgctcctaacgaacgacccattatcaccacaccttggggctgtgagtcaattcattgctatttataaaaaggttttattagattctaaagttataaagttgaaagaaacgtcgggccaataa

SEQ ID NO: 147007 - DNA, 327 bp, Enterobacter cloacae
atgatgaacgatgtattttttggcctgatgatgctcggcggcttttttgttctcggtattggtatgtgggcgcttggccaatggctccgacgcaaaggctttggcccgcagctcgatgcactggataagcagtacacggcactacagcatcgggtgaaccgattggctctgcctgccgctgcgcatttctacggcggcatgggtatgcttaatcgcatgccacttttcggcagcaagaatcaggtggtattggtagagcgtgtgagaatggccatccttcagatggaagaggaagaacggcagcgacgcagggtcatcaatcgctga

SEQ ID NO: 147008 - DNA, 1644 bp, Enterobacter cloacae
atgcgacgttcaaccgtttacgcacttgtcggcgcggtgctcttgctatccgcaactagtgcgatggctgccggggtcgatttggcgcagagcaacacgtctatgaacagccttctgcggctgattcagaacgcttcaaaccaatgggcaccgcgcctgcatgattacgccttgtggctcttgggatgccttgccgtcatccagttagtttggacttttgctcctttggtcatgcgcggggctgaactgggcgacatcctccatgaactggtgaaattcatcctcgtgatagggttcttctatgcgatgctcgatcacgcgaccgagtggggcggggccatcgtcaacagcttccggcaggccggggcgcacgcggcagggttgggtagtgcggagctgatgccgggggatatgttctcaactgctgtggacttttcacggcaggtgctgacggccggtgtttcgatgttcagcccaatcacatcggttgtggtggccgtatctgcattgatcgtcctgatgtgttttacgtttatagcggctctggtgttcgtgacgctggtagaggcctacgtcatcatcaatgccgccgtcctgtttatgggtttcggtggctctcaatggacacgcgaatatgcactggctcccattcgctatgccgttgcggtaggtgccaagctgtttgtcctgactctgattgtgggtctgatcatgcaggtttccgcagaatggtcggcagcctacaccaacgacgaagcgtcgttgatgaccttggtcggcctgtctttggtgtgcgcctacctgaccaaaaccatccctgaactgatcggcggcatgattagcggcacgtcgatgggcggcggctctgcaattgggggcatggccgcagccggtgcagccggtgcggcggccgcagtcgctactgttgcaacagcaggggcagcagccccggccgcaggagcactaggggccgcaggaactggcggaggcgctgccagtgccgcgggtggtggactggcctccgcactgaacgccagcatggcaggcggcagtaccgcagggggcatcggtggtgcgacgggcgtcagcagcgctggaattggcgcaagcacaggagggggcagcggtgcggccgcaaaggccgcaggttctcgcgtcgggggtggtgccgcgtcaggatcggcgaatccagtgtcggcggccgcttcgccagctagccaagaggcaggcagcggcttgaaacaagccgccaaacaggccggaagagcggccaagggcggtgacgacgatacggatcagcaggccgtcgctcagcaacggcagatgacaccaaaagaagggaccggcggcaacggcaaggttgttgcgcagggcgccgaggtggccacacgggcgcttggcgtgctgggcgctatcagcgtacccggtatggaaagctcccacgggctttcgctcgggggcaccgggtctccccctcccgtccccggcggcgacagtccaacgcctgacgacagcgcagagccgactacacaagcggaatccaacattattcgtccgacatcggacacagctaggaccggaaatgtcggcgcgctcaatgtgcccggcatggattctggcgttaactctcaatcggaggcgtaa

SEQ ID NO: 147009 - DNA, 183 bp, Enterobacter cloacae
atgatgatttctaaggcgctgattgccgccctctgtctcgtctcggcccttggtgggtcggcactgacggccgtggtcgtcacgaacgccgccgcgccggaatgcgcagcggtcggcaatgtccatcaggatgaccaattccgcagccgcccaaacactcgcggcccgtctgaggggttctga

SEQ ID NO: 147010 - DNA, 375 bp, Enterobacter cloacae
atgagcgaagtgatggcaccaaaagatacggcggcgcggcggcgtggtaagcccatagaggtctgggtaacggatgaggaaaaagctgccattacagagctagctgaccaaactggcttgtctcgttccgcttacttgcgcgccgttggtctgaacagaccggtcggagcacgggccgatcttgaggcagtgcgcgagttggtgaagctgaatggcgatcttggccgggtagctggcctattgaaactctggctcgcggaaaagcgcggtcaaggtgcaaaacccatagacgtcgagcggatgatgatcgatttccgcgaattgcaggtagggattcgagagcagatgagtgctatcgtctttactcggaaatga

SEQ ID NO: 147011 - DNA, 312 bp, Enterobacter cloacae
atggaagtcaaattcagctgctatgacacagcggactatctgaagaccgaggctgatattacggcctatctggatgctgtgatggaggacggcgccccatcactgatcgcggcggcgcttggagacttgacccgcgcccgcaaccttagccagcttgcccgcgaggtgggaatgagtcgccaaggactggacaaggctctttcaggcgatggcgaccctagcttcgcaaccgtggtgaaagtcacccaagcgattggtctgcggttcacgttcaagccgactcacggcgggcccgcaccggccgggcactga

SEQ ID NO: 147012 - DNA, 240 bp, Enterobacter cloacae
atgaaagacagatcgcacgacacggtgatggctgagtgcttccgcgctgatccgcactatgcagcagagctgctggccgaggtccgccgcgagggcaatccggccgagctagccattctgttgcggcagatgaccacggcttcggtagatgttgcgggactggatgacaccgaaacggaccgggcgactagcgcagattttgaggaagctatgagggccctacgtcaagcatgtggctga

SEQ ID NO: 147013 - DNA, 570 bp, Enterobacter cloacae
atgaatcaacgtatagggtacgttcgcgtatcaaccgacgaccagcacctggacctacagcgcgacgcgcttcagcaggccggatgcggcgttatctacgaagaagcggctagcggcaagaacacggctcgaccagagtttgaacagtgtcgcaaggcgcttcgggcaggggacaccctggtggtttggcggctggatcgtctcgggcgcagcctgcccgacctagtgcggatagtggctgaacttgagaagtgcggcgttggactcgagagcttgacggagaagattgagacaggcagtgcagcgggcaagctggtttttcatgttttcgcagcgctagccgagttcgagcgcggcttgatccgagagcggacgcaagctggtctgatcgcagctcgtgctcgtggccgggccggtggtcgtaagcctaagctggatgatcaacaggtgcgggagatcaaggctcttttgcgcgatccggacatgcgggttgccgaggtggctcgacgttatgatgtttctcgcaccaccctttacaagtacgtcggtattgttacgccgcgccaatga

SEQ ID NO: 147014 - DNA, 2157 bp, Enterobacter cloacae
atgactgaaagattgaatatcacgcgtggtgtaaacaagaagccggttgctaccgacgccttggagcaaagtctcgatatattgcgggacttacagggtgacgtctttacaggctatccgttgatcgctacgccagatggaaaatattcgattgatgctactttggtgagcccatcgaagggcattgttttattcgatttgatcgaagggccagacgttggtgagtatgcagaacgtcaagacgatttggcaaacaagattgaagcgcgattgaagttgcaccgtgagctggtcaaggggcgtcagttgctggtgccactgtcagtgatttcatttgctccaggaataaataatatagaggctgtagccgtagagaactatcccctcgtgaatgagcacggccttgctgctgctcttaacgaactgaattgggtcaatgggaataatgatctatacaggatgacgctctcggctatcgagagcctcagcagtattaggaaaagtcgctctaagcgtgaggttcatcgcttagattcgcgaggagctaagctcaagcgtctagaagattccattgcgacgctcgatcatcggcagaataaagctgttattgagacagtggatggcgttcagcgtattcgaggattggctggatctggaaaaaccattgtgctggcgctcaaggctgcctatttgcatacgcagtacccagattggcgcattgctgtaactttccatacccgctctctgaaagggcagtttcgccgtttaattaataacttctgcatagaacagagtggtgaagagccagactggacgaagattcgtattatcaatgcctggggggctccaggtggggatgctagggatggtatttactatgaatattgccgagcaacgggaacagagtttttagatttcagtaacgcatctggcagatttggaggaaatgagcgagcttttgatggagcttgccaggctgcactggcaaatgcttctgatgctgcgcatctttacgacgtgattcttgcggatgaagcgcaagattttgcccccagtttcttgaagctttgttattcaatgctgaagccgccaaagcgattagtttacgcctacgatgagcttcagaacctctctggaacttctcttcctccgccagaagaaatttttggcaatgatgcggctggacggcctctagttacgtttggtgatgaccgtaggcgagatgtgattctgcagaaatgctaccgaaactctcgtcctgtgttggtgtcggcccacggtcttggcttcggcatttacagagaagctccgcaaggagctccgaccggattggtccagatgttcgactatccggcgctatgggaagagatcggatacaaggttaagagtgggcaattggcgaagggtcagcatatcgttcttgaacgtacaacggaaactagcccgagatttttggaagagcattcagatattaacgatctcgtccaattcatcaagtttgatgatgaggcgcaacagaacgcatggttagttcagcagatccagagcaatttgacagtggacgaacttcgccacgacgacatcattgttattcactcagatcctcgaactgctcgtagcagtactggcccaatccgtaggaagctcttcgaagcgggagttcagacccatttggccggtgtagatacggatgcggacgtattcttccgaacagatactccgtcagtaactttcactggaatttaccgtgctaaagggaatgaggctggcatggtttatgtcatcaatgctcaggattgtaatggttccggtccaggtctttctagtttgcgaaatcgccttttcacggcgatcactcggagtaaggcatgggtacgtgtgataggttatgggccgcgtatgcaggagctgattgaggagtttaatgctttgaaacagagtggctttgtcttggattttacatatccagatgaggccctgttgagcaagttgcgcattgttcatcgtgatttgtcaccacaagagcggcaacgtcttgagaaaagaaagagtcaacttgctgatctgctgggtgatttggagagtggtgagctgcatccggaagaccttgatgacataactcgcgagaagctaaaaaaactcctcgggggggcatga

SEQ ID NO: 147015 - DNA, 669 bp, Enterobacter cloacae
atggtgctgaccccgaatgctatcaaaaaagatattgatggattaatttctgatttgatagaaaaaggcgtttgtgatgattcaaatttttctgcgattcgaccgcatggccgtatggttgatgttaccttcagcggttcagagcatgtctccattgcattgggcgatatcgaatacgccgagatttatcgcgagctagcagataagcgttcattcaacatgaagctggtcgatggcgcattgcttcagataatgtaccgagtggaaggtgctgttcttctacagcacaggcttgccttttacccttccccaagtctgttgccatttcaagatgatccggatgcgtacatgcgcgacgaactgttcattgagattgttcaacgcagaattgttccatttccgttacgttttgattttgatgcgcgagaaggtgttcatgtcgatgctgttcatcccaaaagccatcttacgctgggcgatgtaaaaggttgccgtattcccgtatcagcgccagtgacaccacgttggtttgttgaatttattttgcgcaatttctaccaaacggagaggcatgatttcattagcggcctgccaaggcaccagataaaatttccagcgtctatcactccgaatgagatgggacttatgcacatgttcattccatactaa

SEQ ID NO: 147016 - DNA, 228 bp, Enterobacter cloacae
atgagaggattgaaactagagagttacgcagagccgttcttcatcactcaggaaattgagacggagctgatcgcgacgggctatgagtttgagccgccgcccgttgcctgcactgggcgtctgcgcgacgtgctggagcgtatgagcgatgctgagctggcattgcagccgaggattgccgaccaggagcgcaagcatcgacagaacaagccattttcagtcggctaa

SEQ ID NO: 147017 - DNA, 666 bp, Enterobacter cloacae
atgcccacccatctggtttggtttcgcgcggatttacgcattcacgacaacttcgctctcgcggcggcctgccgcgctaaagacgcgaatgtgctggccctgtttatcgccacgcctgaacagtggcggcagcatgacatggcgccccggcaagcggcactactcagcgcgtatctgaatgacctgcaacattcactggctgaaaaaggcattccgctgatctataaagaggcccatgattttgccgcgcagcgccagacggtgcaggcaatctgccagcagcacgcagtaacgcatctttattacaactatcagtatgaattcaacgagcaacagcgggatcgtcagctggagaaaacccttgcgggcgtggtctgtgaaggctttgatgacagcgtgatgctcgcgccgggcagcgtaatgaccggtagccacgagatgtataaagttttcacgccgtttaaaaatgcctttatcaaacgcctgaaagagggactacctgagtgcgttaccgccccgaccgtgagaggggaaacgataacggatatgccggcgatcaggctgaattatccccagcagtcgttcgatgaaacggtattccccgccagtgagaaagcagctattgaccggttgcgtcagttctgcacgcagggggcggcagagtaa

SEQ ID NO: 147018 - DNA, 2496 bp, Enterobacter cloacae
atgctttcaattgaatttttctgcccactgcccaacggcctgcatgcgcgtccggcctgggcgttaaaagagcagtgcagcgcatggcgcagcgacatccgttttatcaacagacggcttaacactcacgcggatgccaaaagctcgctggcgctgatcagtaccggtacgctgtttaatgacagctgcgtgctggaaattaacggcagcgacgaggagcaggcccgacgcgtgctggaggcgtatctcaccggcgcgtttatcgacagcgacagtattccctccggcgacgcgccgcacgttgcgcatcccctgccccgttcgcttgtaaggcttgctccccaccttcagcacggcattacgctcgccagtggcatcggggctggcactctgcgaggctggcagagcgataacctcaaacgttattgtcagatccccgcctcgccggaagatattacccgcctggaacacagcctggcgacgctggctgaacagctcaaccaccgtctgcgcgggctggacggcgagagtaaaaccattctcagcgcgcatctttcgctgatccaggatgaggagtttggcggcaccatacgccgactgatcgccgaggagcggctaagccttgcggaggcgatcattcgtaatatggagctgatctgcgacaagctgtcgctctccgccagcgactacctgcgtgaacgcgtcagcgatattcgagacatcagcgagcagcttcttaacattacctggccggagttgcagcaaacctccgcattcaccctcagcgcccccactattctggtggcggaagatctgacgcccagccagtttctcagcctcgacacgcagtacctgaaaggcatggtgcttgaaaaaacaggccggacgtcgcatacgctgatcctggcacgcgcggcctccgtgcctgtgctgagtggtttaacggtcgcctcgctggcgccgttgatgggaaaagaggtcattctggacggcatctgtagcgtgctggtcgttgaacccaacgacgcggtgaatgattactatagcgtggcgcagcgccttgccgaccgacgccaccagcagcagatcaaagatgcgggtcttccagcactcacccgcgacaacgtaccggtagagattgccgccaacatcggcagcgcgctggaagcgcccggggcgtttacctgcggcgcgcagggtatcgggctgtttcgcactgaaatgctgtatatggacagagactccgcgccggacgagcaggagcaattcgaagcctatcagcaggtgctgctctccgcgcagggcaagccggtcatctttcgcacaatggacatcggcggcgataagcagatcccttacctgaacattccccaggaagaaaacccgttcctcggctatcgcgccgttcgcatttatcccgaatttgccgatctcttccgcacccaactgcgcgcgatcttacgcgcaggcgcgagcggcaatgcgctgttgatgatcccgatggtgcacagtctcgatcagattttatggatcaaacaggagctgcaaaacgttcgtgacgccctggcctcacaggggttacgtcacaccgcgcacctgccgctggggatcatggttgaagtgccttcagtctgctttatcatcgatcacttctgcgaagaggtggatttcttcagtatcggctcgaacgatatgactcagtatctctacgctgtcgatcgcaacaacccgcgcgtttcggcgctgtataaccccatcacaccatcttttttacgcatggttcgccagatagtcaccgcagcgcatcgtcacgggaaatgggtcggcatttgcggggaacttggcggagagcagcgctacctccctcttctgcttggtctgggcttagatgagttcagcatgagcgggccgcgcatccctgcggtaaaaacccagctgcgtcagctggacatggcggcctgccgggcgctggcagataaggcctgcgacagccgcagcgcagaggaaattgaagccctgctggcggatttcacaccggaagcgccgccgcgtcccttgctggcgctggagactatcgtggtcaatgagccgctgacctcaaaagagcaggtgcttcagttcttatgcggaaatcttgcgattcatggcaggaccgaaaacccgctcgaacttgaagaagatctctggcagcgcgaagagattgtcaccaccgccgtcgggtttggcgtggcgatccctcacaccaaatcgcaatggatacgccactccagcatcagcattgcacgcctggacagggcgattgactgggagtcggatttgggcgacgtcgagctggtgatcatgctgacgctcggcgctcaggaagggattaatcacgtgaaggtcttttcccagctggcgcggaagctggtcaataaaacgtttcgcgagtcgctgtttgcagcaacgacgccgcaaagtatcctggatctgctgaacgctgaaatcacgttctga

SEQ ID NO: 147019 - DNA, 123 bp, Enterobacter cloacae
atggcaggttcactggcgaacccgatgaacttcagctggcgcgttattttcatcttgatgaagcggataaagaatttatcgggaaaagccggggtgatcacaatggcactgttgcaaagttag

SEQ ID NO: 147020 - DNA, 249 bp, Enterobacter cloacae; identical to SEQ ID NO: 27996

SEQ ID NO: 147021 - DNA, 3051 bp, Enterobacter cloacae
atgatttctttctttgaggatgtgatcgaaggtatctcacgcaatctgacatcaaatgactcgttaaaatactgtgatttgacaacggttgtagggcttacgtcgcaggatcgcattgagcatcctgaaatcagggctccgtacattctgaccactaagaacaacgattttcttaccgttattgaggttcagggcgctaaatcatcgtttgacgagaagtcgtttaatgacttcatcatgcacctttcaaactccttgtcgaattcctttattaacagcggccataagttgtctgtggtgttcgaacgcgactttaccaagaaccaggaagagctgaataatgtttataaaccgcaggtagcagcaatagagcgtctgcagatagacattaaagacctgatcgccgatgacgcaaaaaaaatcgccgctcattacagccgtgaacgcgcttacatcgtgctgtatacctcgaaggggatgattgcgaaggatgaacttaaaaacgaacaggcaaaagctgccggcgtactgaaggatatcccgcagacgcgcttcagtcagaacccaatcgaatttcagcttgaaggtttgaagatcacgcatgacgcgatgctgtggcgcctgattggtatgcttcagggggatgatgaatcgggaatggggcttctggttgatgtccttgatgtcaaacacgctggcgcaatgatgcgtcagatgctgttccggaattcaacatcagaaaactggtaccctcgcacgccgtttgaccaaaatctgcgaatttatggcgccccacggaaagacaatatcgactccgtgctgccgccgcggctgaatatccagatcatggaaggggaactggaagaagatggtggcttgatttactgtgatggtaagtattacggctctgttgcccttgagttaccaccacttcaccctgtcaaatttaagcagttattcaacgcgattaaccggaaaatcccgtaccggataaaatatgactttataggcgggggcaaaaaagcactgttctggccatcagtaatcatatctttccttcgtttcattccctcactcggtaatatcgcgcgtgatatggattatgtccgggcccagagcgaaaccgatccaacggctatcatggccatcaactttgccacctggggcgacactaaggatgaagccaaacgcaacctggcggctttaactaaggcgattgaaggctggggtgtatcaggtgtgtccaagacatatggcaatccaggtagcgcactgattgcatccgttccggggctgaccacggccacacctggctcattgcattatccgccgttgagtgaaggcttgcggatgttaccttttgaacgtccggccagtccctggcatggtaaaggcaatatcaacttcatcactctcgatggcaagctgttcccctatcaaatcgccagtcccctgcaggagaaatttaccgatgtcatcaccggtgttccaggttccggtaaaagcgtgctggccaaccgccttaacctgagttcgatttaccgggctgataaaaaactgccttatctgaccatcattgataagggctacagtgcaaaaggtatcgccgatctgattagcgctgagctgccggcagagaaacgtcaccagattgccagtatcaccctgaacaatgacgaatcgcactgtattaacatctgcgatacgcagttaggttcaaggtatctgacgcagtttgaggaagtattcttaaagcagatgcttaacgcattctgtattgatccggcaattggccagccgccagatgcaatgagcgttgggcaaatcgtcagtaaggttgtatcaaacgtatacaaagcaaaagcgcattcaagtgctaacttgtttaagtataacgacccggtgattaatgaagctctgaaagaatcaggtctggataaagagcttggtgaagactggtttgaaagagctacatggtgggaagtcgttgataagctgtttgccaaaaaatatcttcatgctgcgacggttgctcagcgttatgctgtgccaaccattcacgattttattgctgaactacaaactgaatcatttaaaaaccaatacgctgacgtaaaagttaatgggagtgagcctgtagtaggcttcgttgcacgttgtttccaggctgctgcagctgagtatgccattttctcagggatcacggtttacgatttcagcccggagactcgcattgcgatcctggatatgcaaaacgtcctcggtgacagaacgacacctgcaggtaagctcaagtccggcattatgtatctttttgcgcgccagatggctgtgcgtaactactaccttcctcagtccgcagaaaccttcattcctgctttaccggagcagtacagggcatatcaccaggcgcgcatcagggagctttcagaagaggttaaacataccttttatgatgagtgtcataactttgccggcatcgactttattcaaaatgcgctgaacaccgctgaccttgaagatcgtaaattcaacgtccgtactgccttctcgtctcagtatctgagccatatgccttcgagtgtgcttaaaaccatgaacagcctgtttatgatgcgcctgacggaaggggatgaagagtatctgaagcaattagagatcaacatcccggccgatatcctgcgtcgtttcagacagcttccgcaaggggtttatccggacggaagtggtactgcattcctcggtatttttaaaacaaaacgtggtcttatttgccacattctgaaaaacacattaggaccaaaactgctttgggctttgaactcatctgcaaaagacagagcgctcagagatgtgctttatgaagagctgggaacgaaaaaagcaagggaagaattagcaaatagattccctatgggaagtgcatcaagtatcattgatgaaatggtggtcaatcagggtggtgagcgtgattctgaagaagaatcacaaactatggcgatgaagctcgctaaagaaatcatttctgatgtgagaaggggattcagatga

SEQ ID NO: 147022 - DNA, 597 bp, Enterobacter cloacae; identical to SEQ ID NO: 28002

SEQ ID NO: 147023 - DNA, 2196 bp, Enterobacter cloacae; identical to SEQ ID NO: 28001

SEQ ID NO: 147024 - DNA, 654 bp, Enterobacter cloacae
atgaaaggatattcgtatactgttgtcgataacaacatggctaaatcaaaaggtgttggctactatctgtcacgcctgtctgtagccataagtatagttattttaacaataagtcttccgttgactgtatattctggctttcttactttaggtggaagcctggcattggcgtggtttgttgctctacttgttttcgatgccatgctgatcacatatgttgtacgccaggtaaaaagtaagggagtcaaaaaggtcgttgcaggcatgagagtttatggatgctttaatccatcggctaaagaggaacaatacatgccggctcagaaaacatattttggtatagacatggactctggtgttgttgggattgctgccctttatgttgtacaggcctctattaagcaaaagagaattttgtttgaggctgagacaattgagtcttgggagtatactgatagtaaacttgtcgtgaatcttcggaaccgacatgtacctactgttgaaataatcttgctcaatgccggcctagcatatcgccagctggaaatgttaaccaggatgcatgagcaacataaaaaatacaggggtgaaaaatatctccagtggcgaaagactatgcttgatgaaggttggatgctaccacgaacgtattga

SEQ ID NO: 147025 - DNA, 249 bp, Enterobacter cloacae
atgctgtgggaggaagtagtgaacagagttactgagcgccaggaacagaagagtaacccggagttccagagagagtaccggaaccgtatccgggaaacacacgaccagttaaacctttatctccccaaagatgcaaaaagaatgttgatagagatcacaaaagttaaaaaactcactcaggctgaagttattgaatttcttgtaaaaagttattatgacggcttaaaatttgacgattctgaagagtga

SEQ ID NO: 147026 - DNA, 156 bp, Enterobacter cloacae
atgcaagcgagaatgatgaacatctgcttctggcacataagcgacagtcctgactttctgctcagcagtaagcgcagcagggatattaacgccgccattaccattacttactggatgcttaacagtggcgagggagtaagttggctgaaggagtga

SEQ ID NO: 147027 - DNA, 1257 bp, Enterobacter cloacae
gtgaagtttgtttctaataagtataatatcagcatcttcatgacgtgcccccccttcttgcagtttgctattaacagatgtttatgctcaagttttgtgaagagaaaatatataatggttactttaagaaaatgcgctttttgcgaaaaggctctatcaggaaaaaatagaactaaagaacacattatcccgaatgcattaggtggcagaaagaaaactactgagtttatctgtaacacctgcaataacaagcttggtgaaaagtgggatgcagaactggctagacaactaaactggttttcattggctgtgggtatcagtagagagcgaggtgaaccccctaagcagatagtacaaacagttaaaggtgataaatattggcttctgaatgatgggtcatttaccgcagagaaatctacgtaccacgaggaaaaagaaggagatgctgtaaaaattagcctaacagcaaaaactattgatgaagctaaacagcgactaaaaggcatctcacgaaaatatccgcaatttgatgttgaaagggctttaaaagagctagatatcacgactgactatctagattcacctcttcatttcagtttgtcccttggcggccctgatgctggccgctctttggttaaaacggcattttcatttgcgtcagtatgtggtgttgaaaacaaccaatgtgataaggctctacaatacctgcttgatgaagatctcgaaactattccttttggggtcgcctacctatcagatttaattcagggcagacctaaggacaaagttttccattgtgtatccctacatggcgatccaaaaactaaattgctttggtcctacattgagtattttggcttcttccgcgtagtggttttgttgagtgaaagctacagtggggagatcataaatgagatttactctattaaccccatagatggcagtcaagttggtgtaaaagtaaattcaggagtcagcccacaagaattgttattgattttgacagggaacggttttaatcatgagattcataaggcagcaatggattatgcactagctatcataatggaaagagatagaaaccgttctttggaaaaagcagttaaaaagggatttgaacatgcagccaaacaactcggaataaatgaaggtgagattatacccaaagaagtagccgctgaatttacagcattgataatgcaaaaaatctctccttatattgagcacttggtgagaagcggtagaagaaatcagtag

SEQ ID NO: 147028 - DNA, 702 bp, Enterobacter cloacae
atgtatatggttcttcagatggatcagatatttcaacaagagatctttgaccatgaatttgatgtgaaccctatttctggctttcttgtgatgaattcctatacgatgctgctgagtgcggtacgacaggcactatctggacacatggtggcagtctttccgatcgttcgtaccgcgcttgaatccgcctgttatgcctaccagatagcccataacgaagcaatgggaaaggtgtggttaaacaggcacacctctgagaacgcacttgagaaatgccgcaaaatgttctccgtgaagaaggcttcaaatgaattgaagtccatttcccctgaaatggctgaatatgtgatggctaactatgaagctgctatcgattttggagcgcatccaaatcaaaaagctgtctttaatcacttgacggacatgggggaggtagatgaaaggtttcatggcttcgaacttaccggtgtttatggacgaaatagctggcatgtgaactacgcactacttgtttgcacggaggtaggccaggcaattgcattcctgcttgctgcatgtgccgagaaacaccctctaattcatgagcgcttagaagtgttcactaactgggttaatgaaaagaatcggattgctgatgaactcaatggtgaaccaataaactacactgggacgatgtattgttcagttataccgccaacgtag

SEQ ID NO: 147029 - DNA, 1875 bp, Enterobacter cloacae
atgtctgaagttactaataaaaaagtgaaagttgtttctgataacgctgttgataagcaagaggagacgtccgttaatttccgttgccctgaagacgtcattccatacttcagtaaattaaaactggatcctgaattagcattatctgataaccagcctgatggctattacctggctacagaaggtttgtatggtgtagaccgtgcgggagaacccagattgattatggcaggatatattatccccgtcggtctggcagctgaaaaaggggagggctctggattatctgtcgtgttttattgccagagtaccaatggaatggtcagtcaggaaatcgttcctgtagctgaagtattgtccaaaaatgaattagtttgccgccattttgccgggaaaggcctgatccctgttattagcgtatcagtgatgaatgcttattttcgcaatgccgctggtttgcctctgaaacgttatcgtctggtgaacaggcatggctggcaacccgggggattgtgctttatgcatggcaggcacgccatccagtccgggcaatgcacggaaattcatgggatgatccctgcggcttcgtacaatccctcttcgggcattgatgcccgggggagcctggatgaatggaaagagaaggttctgaagcatgcaaccggtgatatgcaaaagctggcagtgtggattggattgagttcgtgcctgcttcccctgctgaatgagcagggcattatctaccatttctatgggcaatcaagcgtcggaaagaccgccctgttgcagctggcagcgtctgtaaatggcaatggcggtgagccggggagtggtgaaagtcttatcgagtcctggaacactacgccgaacgcgcttgagatgacccttgaacaacgcaatcacatcactgctccgatcgatgaacttggtgtgtataaggggcccaaaatgggcgatgcaatttatgcgctggcgaatggcaaaggtaagaatcgtatgtccggggagacgctgaaaaatgtcgagcctgcttcatggttgctcaacatcatcagttccggtgagatttctgtgcaggaacggctcagggatggaggtgaaacggttcaagggggtatgcttcatcgcagtattgacctgcttgtcactcccgagcatgtacgatcttatgcagatgaatccagtgaggactgcggtcgccgtatagaaataattaaggccaactcagcacaatattacgggaccgcagggcgggcatttatcggatgcctggccaatttgaagaatgacgagtctgaaacgcgtaatcatgtcaatgagttgcatgagtgggtgcgtaaagagttgcttaaatgctgtgaagagcgtggctatcagttaaataccgtccaggaacggctgttaaagcgcttcgcagtacctggcaccgctgcatttctggcgtatgactctggaattctggagtggggtgacgacgagattattgatacgctgataaccgcttttgatatctggttggcgaacgttcagcctgaaactaacccgaagctggaggcgctgatgtgcctgcaaactaccctgagcacggagcatcagaaatttggcgacttatcgcgaaaccatctcctgtctcgttatgagccagtttatggaattttgttaccggagcaacagatgctggtgctaccagaagcaattgatggctgggtgaaacactatggcgtcactgtcaaacaacttgccaaagaacttgatgcccgtgggtttctggtaagaacggagaaagaccgcctgatttcccgcaaagccctcgggaaaaaaacgttcaacggcttcatcattcacgacagtttcctcggtgccacactgagctag

SEQ ID NO: 147030 - DNA, 858 bp, Enterobacter cloacae
atgacgctggctgaactctgccatatataccttgaaagttattccagggtgtataaaaaatccagccgaagtgatagctccaagatctcaaattacattgtaccactattaggtgatacagagatttcagacatcacacggctacagattcaaagctatttgaatggtctgacgcaccttaagaactcaaccaaaaataggcacttaaatttgattaaagctatatgctcttttgcggttgaatattgctatatggataagtctcctgtagcaggaatgcgggcttataaagagccagcatccttaagaagagctcttgagccagaggagtttacctctttaatcagagttcttaaagaagaaatattagcagaaccacgtgacacgctaagccttattatgcttctggcatttacggggatgcgtctcggggaagcacgggccggatttattgaggatgtaaattttaacaataatactctttttttaaaggacagtaaatctggcgactccagactggtaccactttgtagtgaagcgagggaggttatattaatacagcaggaaaaatatggctcgacaggattaatattccgttcgaatagtggaggaatggtaagtgagcctcgccggttaatggaaaaactatgtaaaaaagctggtgtccgtaaatgccttttacatgagttacgatatagtgcagggagtgcaatgctggctgctacccgggatatatatgctacaaagcgatttctcggacataaaacgattaaaacgactgagcgatactgtatgtattttggcacgcaacagcatgaagatgtggaaaaggctatggccttaatgcttaagccataa

SEQ ID NO: 147031 - DNA, 1155 bp, Enterobacter cloacae
atgctgaatactgagcttgaatgttatcttgatgagcttgaaaaagatcctgatataaaatatatgaagggtgttacccctgctacactattccggttcataaacggcagtgttcatcttgataatattagaaagacagtggataactcagtgctgactgagtttgaaagtttaaagaattgtgagctgttattgcctttttttgctgacatacgttatcgtggaattggattgaaaactgatgctttcaaaaaaagcctgttgggtaattatcttaaactatattatccaaagcatcttaaagtgaatatgtatcatgatgaattcattgctaaacagattgtggcggttgaaaaatgcattttactttgctgttcatcaccctcagtcaatgacatgcctgtagcagatcactgtgagcaagaatctggcagctattccttctttccaacggtcaaaggatttttttctgataatgagcaacagtgccaaaaaatcatgtcagacctcaagaaaaaaggaatggattctctttacggggttaatcatgaaatgattgatgcactcatgcattgcattcggacaggtataaatcatgtcttgagtcttagtgatgcccgatcccagccgaaacgtgtactggagtatgcattgacgttatataaagagtgccagaacgatgccaaaacgtttgctgataattttgacttcggcatttataacgaaaccagaaaagtgcttgagaagaaaattgcttttgatacggtgtttttatatctgctgttatctgaattacgctcaatattgcctgagggccatctgctttgccgtaaaggttggttatcacctgtacgaccgacgattttttatctggagcaccgcttctcaatgcacagcaatattgttcttatgctacaaaagaaaatcgtactgaaatgcattttattttctacgctgaacaggctaaaaaaaggccatgatgaagagtacggatatatggatttgcttagtgacatcggcagtaattttggctggcttgatacaaaagaaagccgtcgcgataaaatggttctaagtatcctgagtcaggatgaagattgtcgctctctgacgtatgtactcttttgtgccaggacacctgttgctaaatgttaa

SEQ ID NO: 147032 - DNA, 375 bp, Enterobacter cloacae
atgcatattatacagtctccggctgatgctttctgcctgcccgtatcaccctcacagcaactgcagctggttaacgaactcactgaatacactgacggcagcctcacagcggcagctgacctgtgggaggaaacccagacccggcttttgtatctgctccccaatgaggagaaaagcctttctgaagagctgtccatttaccttaaccatctgacctgcaatgccgaatacgtcattcaactgaatgatgccctgtttctcgccctgaccattctcagcgactcaggacagggcttttatctgctgttcccggcttcagcgaccttttccggggccgctgaacttatcgttatggctgaaccttcaggatattaa

SEQ ID NO: 147033 - DNA, 438 bp, Enterobacter cloacae
atgaaaaagaccaaaccagcgtcgactactaccactgaaactgaaaacgacctctgcattctcaacggcgaggccgagaaaattaatcctcactcaaccggtctgctgcactgggagatgactgaaaatctggacggggaacggggactgcgcattaccgctaacgacagtggtggcctgttctcccgggaatgggttgccctcagtgctatatacgcggtactgaaaacccatgcaaccggtgatttcacctccacagtgctgcgccctctgtttaccagtgccagccgcaataatgccggtttccttgccgccattcttcgcagtgccgatatctgtctcaccgaagagggttcagccggagccttcagtcatcgctgttacccggactgggaaaagcgactggaaaaactgctgacattaaacccttctgcctga

SEQ ID NO: 147034 - DNA, 435 bp, Enterobacter cloacae
gtgacccacagttcacccactctgcatcagcccacgctcgaccttcccctgagccacgagtttatcgcgctgctaaccgcacacctcacggcgctgcctgacacctgtcagagcgccattcttaactttcgtgacccggcgtacagcgcagaagatggtggctggcacccggttgaaattcgcctcatccgcagtgagcaacatgacgtatggcagctggattaccttactgactttagctggcagggcaatatctggcctgagctggcaaaggaatttgatatcagctggtcacaacgctatgcctggcactgccttgccggggagttacccctgaacggtgaactcactgagttctggacgctctggcaggacaattttgtggcgtactgcgccatggaagtcttcactatcaccgtttcccctgactgctga

SEQ ID NO: 147035 - DNA, 492 bp, Enterobacter cloacae
atgttactcacactgattacccgtctggtgatgttccagcccctgttcagccttgttgaaagctttgccgataatgtgatgcgtgacacggtggacgaaccggcaacggggggcatcgtctggtgtgaactggctggcggctatgccacgcacagcggtatctacattggcaacaaccgcattgtgcacctttccggtgacggtgaagtgttatgcagtgaccgtaaagggtttatggcgaggctggatggcctcaatcctgccatgtcggtgtataccgactgcgaaggaaacctgcctgtgggaaatatcgctgctgccggtcgcgcctcccgggcactgggctcacggcatcactatcacctgctcaccggtaactgccatcgtttcacggcgacctgtctgaccggaagaccggacaacggggttgttctgcatcgccagttaaaacagctgcaacgcggcaacacatggcgcgtgtgggagggctga

SEQ ID NO: 147036 - DNA, 219 bp, Enterobacter cloacae
atggcccgtgctgaaaaactcgctgaacgcctctgccactgcgtgattatgttgtgtcaggggaaaacactttccgtctcccaactcacgcaccgatttggtatttctgcccgcaccgcccgtcgtgaccttgcccgtatggcctgcatcatggagccggtatcacccggtcactggcgtctggcaccggaactgcgtaacgccttcatctgccgttaa

SEQ ID NO: 147037 - DNA, 393 bp, Enterobacter cloacae
atgaaaaaaatcatcatcactgccgttatgctgatggcggcaaccaccgcatcggcggcacaaatatcactggaaaccgctgggcgctgctatgaagccacccgtcagtcaacacagatggcaatgctgctggaccccagtgcaaaggaatataaaaatattggcgataataacaaagagctgtttggcacactgtccggcggcgttggcgaaaaggattcaaagaaaattcgcgatgcctggaaggcggttctggataacgccggaatggaaggtcgcatggcgaagtcggatggctatcgtgcgatgaacatgtatccgcatgaggtcattctgcaggaggccaacaagtgcgtgcggctggcgctgaaaagcgggctggttaaactgtaa

SEQ ID NO: 147038 - DNA, 897 bp, Enterobacter cloacae
atgagtcagcttactaataaagaagataaaggccgggatttagttaaagatgcactgggaattttacccgaaaatatccgggagagtatttaccgtcgcattaatgatgtcatcagctatgagccggtcattggtatcatgggcaaaaccggggccggaaaatccagcttatgcaatgccattttcaagggtgatgtctgcgcggtcagcgatgtggaagcctgtacccgcgaaacgcaggaaatccgcatccagtttggcaaacgttctgtccggctgattgatattccgggcgtgggagaaagtgccgagcgcgacagcgaatatgagcatctctatcgtgacctgctgccgcaactggacctggtgctctgggtgataaaaggtgacgaccgtgccttttctgcggatgagcatttctataaaaacgttctgctcccggcgggcggggaagccaaaacgctgtttgtgctcaatcaggtcgataaaattgagccattccgtgaatgggatgtggcccatgcccggccttctccggcccagatgcagaatattctcgataaagaagcctatatcacccagcggtttggttttactgaccatccggtgatcgccgttgcggccagtgaggggtataacgtcacccatctggttgaagcaatggtccgtgcgctcccaaagcacgcgcaaagcggcgtagccgctcaggtcaaagatgagcacaaaacccgtaccgtgactgaagtggcgacagaagggtttggtgacgccgttgataaggtgattgatgaaatcattgaacactcgctgccaaaaccggtggcgattgttgccaaagcggccaaaaaagccgtggtcagcggaataaaaaaagcatggagctggttgttcgggtaa

SEQ ID NO: 147039 - DNA, 405 bp, Enterobacter cloacae
atgataaatacactgaatgataccgatgatgctgcagaaacctatttcgaaaatatcgccgcagacctgctgagtgggttgctgggcgcccatgacaatgaacagaatgcactgctgaaggactggctggataaaccctttgaactggacaatgcggcgctgttacggcatgcggaatatatctgtggtcgctttaatgccggtgatgacagccatctgctgatgcatggaattgatgaacaactggcagcaatgaccttttcccgtaaggagcgtttcagtccgatgcataaaggagtcgttggctattctgcacctcgcgatttagaaaaagtaaatgcattgctgaaagtgattattacttattacgaatgcgagttaattaaattaaaaaaggacaggtga

SEQ ID NO: 147040 - DNA, 939 bp, Enterobacter cloacae
atggacaaacccgagaaaccagaacacgacaagcttggcggtcggcttggactgatcctgacacgtctgaacaacggtcagtcgctgacggtcagtgggctggcggaagagtttaatgtctgcacgaagaccatccggcgtgacctgactgaacgccttgcctatctggggctcatccgggaaggtaaatattaccgcctgccgaaaggggttctcggccagcgcagcaacactgatttgcgccgttttacccgcatcctcggcattgaaggattattcccccgctgggaagactacctgctgaatctcctgctgggggagactgacaataatcccttcctcatcaaaaaccgccctcatgaaaactgcggggcatttatgtcttccctgaatgccctttcagaggccattcgcgcaggtaagcgagccagctttacctacaagggtaaggcattcagccagagtgagccctaccgcctggtcagtgacaaagggatatggtatctcgcggccctggatggcgacacactgaaaagttttgtcatttcagcgatgactgagattcaggtcagcaataaagccttcctgccggacccggaggttcatcagcgcatcgaggacgcggaaagcatctggtatggcgatgcactcaccgaggtactggtgtctgtctcagccagagtggccccttattttcgccgtcgggcgctgtatcccgggcaggaaatcattcacaccacttcagcaggtgatttgctcattatttcccgcgtggctcaccccggccagattattcccctgatcaaatactggatgcccgaggtagaggtcattcagccggtgtcgatccgcaatcagattattgatgatgtgcgttgtacccttgataaatacacccgtatgcacgaagaggaagccaatgataaatacactgaatga

SEQ ID NO: 147041 - DNA, 1557 bp, Enterobacter cloacae
atgacaagccttcaacaacgtgcagaactacatcgccaaatctggcaaatagctaatgatgtcagaggatctgtagatggatgggattttaaacagtatgttcttggggctcttttctatcgttttatcagcgagaatttttccagctatattgaggctggtgatgacaccattcgttatgccacacttgatgacagcatcatcactgatgatatcaaagacgatgccatcaaaaccaaaggctatttcatttatccgagccagcttttctgcaacgtggcagccaaagccaataccaacgacaggctgaatgctgatttaaacagcatcttcgtcgctattgaaagctctgcctacggttatccgtctgaagccgacatcaaaggcctgtttgctgattttgacaccaccagtaaccggctgggtaacaccgtcaaagataaaaactcccgccttgccgccgtgctgaaaggggttgaaggactcaaactcggtgattttgacgagcaccagattgacctgttcggggatgcgtatgagttcctgatatcaaactatgcagcgaatgccggtaagtcaggcggcgaattcttcacaccacagcacgtttcaaaactgattgctcagctggcaatgcacggtcagacccacgtcaacaaaatctatgaccctgcggcaggctccggctcactgttgctgcaggcgaagaagcattttgacaaccacatcattgaagatggtttttttggtcaggaaataaaccacacgacgttcaacctggcccgtatgaatatgtttcttcacaacatcaactacgacaagtttgatatcaagctgggcaacactctgacagagccacagtttaaagatgaaaagccgtttgatgcgatagtctctaacccaccatactcggtaaaatggattggcagtgacgacccgacgctgattaacgatgagcgttttgcacctgcaggtgtgctggcccctaaatccaaagctgattttgcatttgtgctgcatgcactgaactacctctcagccaaaggtcgcgcggcgattgtctgcttcccgggcattttctatcgtggtggcgctgagcagaaaatccgtcagtatctggtggacaacaactacgtcgaaacagtgatttcactggcaccaaatctgtttttcgggaccaccattgccgttaacatcctagtgttgtcaaaacacaaaacagatacgaaagttcagtttatcgatgccagtggtctgtttaagaaaggaaccaataacaacatcctgacggatgctcatatcaagcaaattatgaaggcgtttgacagcaaggcagataccgaccatctggcgaaatcggtactgtttgaggctgttgccgccaatggctataacctgtcagtcagcagctatgtcgaagcactggatacccgtgaaatcgtcaatatcactgaactgaatgccgaactgaaaactaccgtcagcaaaatcgaccagctacgcaaagatattgatgcaattgtggctgaaatcgaagggagcgaggcacaggtatga

SEQ ID NO: 147042 - DNA, 918 bp, Enterobacter cloacae
atgagcgagttgagctatctggaaaagctgctggatggggctgaggttgaatggaagtcgctcggcgaatctgcctctttgagacgaggcagagttatgtcaaaagggtattttgttgataatgctggagaatatccagtattcagctctcaaacagccaatagtgggaaaattggctctatagataccttcgattttgatggtgaatatattagctggacaacagatggcgcaaatgcagggactgtgttctatcgcacaggcaaattttcgataactaatgtttgtgggctcattaaaattaatgatgaagtatcactgaactacaaataccttttttattggctgaccattgaagctaagaaacatgtgtattcaggaatgggaaacccaaagttaatgagccatcaggttgaaaaaatacctgttccaatcccttgcccaagcaacccagaaaagtccctcgcaatccaatctgaaatcgtccgaattatggataaatttaccgctcttacagctgagcttacagcacgcaaaaaacaatacaattactatcgcgaccagttgctgagttttgatgaagggaatgttgaatggaaaaccttgggagagcttggtgagtttattcgaggaaagcgttttaccaaggctgattatgtcgaaaatggtgtaagtgttattcactacggtgagatatacacacgttatggagttgctgctacctgcgcgctatctcaggtcagaagcgatatggcggaatcgctgcgctacgcagagcatggtgacgtagtgataaccgacgttggcgaaactgtagaggatgtcggcaaagctgtagcatggctcgggagtgaaaaagttgctattcatgatcactgctacgcttttcgacactcaatgaatggctttgttgaataa

SEQ ID NO: 147043 - DNA, 801 bp, Enterobacter cloacae; identical to SEQ ID NO: 96820

SEQ ID NO: 147044 - DNA, 477 bp, Enterobacter cloacae; identical to SEQ ID NO: 96819

SEQ ID NO: 147045 - DNA, 2823 bp, Enterobacter cloacae; identical to SEQ ID NO: 96818

SEQ ID NO: 147046 - DNA, 699 bp, Enterobacter cloacae
atgcacccgcgcgatcctagagatctctcccaatcaagtcaatcattagatgatgttctaagtcattttaatggcctttataattcctcatcactacctttttgtattcgcgatcaatccagaaaagtaatttataaaaatgatgctttttccgacctctttcatccactttcgaaatcattttcaggtataagcttcgattctgacgaggttgaactcgaactatcatctattgaattagaggcatttgttatgggacctgaaacagcactatgtcgtacctttaactttaacggtgagttttatcaattgagagtcgaaatacgtttaattgatggggatctttatgctatatggcttataaattattttccagattaccaggcattattcaaggtaaacactaaggtactgaatgacagctttgatgtggacatttttctttctgaaatgacaacgaaaaaaatgattactttatgtttttctgttctcggattccagcttcatactatgtcgaggtgccttggagtttctgaatctgcgattactaataggcttgctagtgttaaaaaagaaattagaaagcatttccctgattatgatgacttcagattcttttgtctgaagaatggtgtttatataagaatgacgtcagtagtactcaaggtacttaatgttaaatctttgttagcaaaatag

SEQ ID NO: 147047 - DNA, 261 bp, Enterobacter cloacae
atgcatatgtcgaagtggaatatcgcctctttctcaaaagaagatcaggataaggtctcggtcgataaagtcgccgctgccgttgcctggcaggaaaggatgaacaggcccgtggtgccggagctggctgaacgggaacagcctgaacatcttcgccagtatttccgtgaacggcttgacgttcatcggcagaacagtcagcagctgccgcgcgcaaatgcgcccgaatatcataaacccggagatgagcagcagaagtga

SEQ ID NO: 147048 - DNA, 1272 bp, Enterobacter cloacae
atgttcgctttggctgacgtcaacagcttctacgccagctgtgagaaagtatttcgtccggacctgcgtaacaggcccgttgtggtgctcagtaacaatgatggctgcgtcatcgcgcgcagtgccgaagcgaaacggctgggtattaaaatgggcgtcccctggttccagctgaagacggcacaattcccggagccggtcatcacgttctcgtgcaattacgagctctatgcgtctatgtcgaacagagttatgtctcatctcgaagaactggcgccgcgcgtggagcagtacagcatcgacgagatgtttctggatatccgcggtatagacagctgcatcaattatgaggacttcggccggcagctgcgcgagcacgtgcgctccggtacggggctgacaatcggcgtcgggatggggccgaccaaaacgctggctaaaagcgcacaatgggcgtctaaggaatggcggcagtttgggggcgtgcttgctctgacttcaggcaatccaaagcgaacggataaactgctctcacgacagccggtggaagaaatctggggagtaggtcgcaggatctcaaaaacgcttaatacgatgggcatcactacggcactgcagctggcgcgcgcgaaccctgtatttatcaggaagaatttcagcgttgtgctggagagaaccgtccgtgaactcaacggagaaagctgtatttcgcttgaagaagcgccgccgccaaaacagcagattgtctgcagccggtcctttggggagcgtgtcacgacgtatgaagccatgcgccaggcagtttgtcagtatgctgagcgtgcagctgaaaaactgcgcggcgagcgacagttctgcaggcacattgctgtatttgtgaagacgtcaccgttcgcggtgaacgaaccgtattacgggaatgtggccagtgagaagttgatgactcccacgcaggataccagggacatcatagccgcagcggtgaaagcactggatcggatctgggtgaatggccatcgatatgcaaaagcgggttgcatgctcaatgatttcactcctaccggggtttcgcagttgaacctgttcgatgatactcagccccgaagcaacagtaatcagctgatgaaagtcatggacggtattaaccattccggtctggggaaagtatggtttgcgggacgaggtatcgcacctgagtggcaaatgaaacgggagatgctttcaccggcctatacaactcgctggtctgaactgccagtagcgaaattatga

SEQ ID NO: 147049 - DNA, 972 bp, Enterobacter cloacae
atgaaaaaggttttagctcgtgggcgagttctcggtaatagcaattcagagtttgcccgtatgcttgaaggtgacggagatgtcaaaacgtttactcttaaatccggcaagcaggccaaatttgtcaaaacggttgtattaagcggagagattgaatcaaagacgttcgttgatgcatcggtcaatggacgagatcaggctatgcttacgcgtgagtccgttagtgatatttcccggacgataaagctgcagcaattcttcccggctattggacgggaggttaatggacgaattgagatattagatgggacccgacgccgtgccgcctgcatatttaataacgttaaattcgaaatcctagtaactaaagatgatatatcactcgccgatgcacggcagttagcgcaagatatccagacagctagagaacatagccttcgagagttggggaaacgacttgaagtcacctatggaactagcatgacgaaagaagagattgcgttgaaagagaatctctctccggcgaaagtgactcgcgcgtttcaggccgcagcagtgccagatgaaatggttgcagtattcccggtgataaatgatatttctttgtcggattatcagtttttgctaaaactggctgaagaagcaaacaacaagcaaacatccgtaacagaactgatggaaaaagttcaacatcggttgaagaccatgccagattatccggcaattgataaaagcaaaattctggcggctatcagggttgagagcaaatcgttgacaacccgccctaccagaacggttcaaactgagaagctgagagaattttcagatcgcaatcagtttgccagaaagaaaactgattcaaagaagcgactggttgtttatgagttttcccgcatttccgctgaggcacagtcggagattgatgatgcaataaaacgtattctgaaaagacttcctgagtcaagtgagtaa

SEQ ID NO: 147050 - DNA, 951 bp, Enterobacter cloacae; identical to SEQ ID NO: 96774

SEQ ID NO: 147051 - DNA, 612 bp, Enterobacter cloacae; identical to SEQ ID NO: 96773

SEQ ID NO: 147052 - DNA, 396 bp, Enterobacter cloacae; identical to SEQ ID NO: 96772

SEQ ID NO: 147053 - DNA, 762 bp, Enterobacter cloacae
atgaagccagcccccggtgtggaaccggtcagaatgtacaaaagtccttacggcgggaaatacggcgtatggcggctggctgactgcgtcccgatgcgggcgaaacgccctcagacagaaaaacagcggcaggccagcgcacgtctgggcctgcaggcccggatgaagagtgagtgtggcaggttcgccatgctggcacatacctggttagcgctggaccccgtcttcctcgataccgaaacaaccggacttgatgccggcgcgcaggcgctggaaatcggtctggtgaatgcccgaggtgagaggatatttgagacccgccttaaacccactgtcggcatcgatccggcagcagctgcagtacacggtatcagtgacgatgatctggtcagtgcgccatcgtggcccgatattgcgcagcagctgcagcaccatatcggccggcgcccgctggttattttcaatgctgagtttgatacgcgcattctgaagcagacagcggcagcgcataacgaccgtgccagctggctggactctctgacggtgtactgcgccatgcgacttgcagcggggtattacggccccaccaatcgctacggtaccatatcgctttccggcgctgtcagtcaggctgggctgagctgggccggggaggcacactccgccgtcactgacgcagttatgacggctcgggtggtaaacaatattgccggatactggcgtgagatccagtgtgaaatgaatgatggcgcagggagataa

SEQ ID NO: 147054 - DNA, 1116 bp, Enterobacter cloacae
atgcgtccggcgacatacgaaccagaacaaattattgaagcagggctggccctgcaggctgaaggacggaatatcaccgggttcgcactgcgtaaccaggtgggtggcggcaatccgacacgtctccgccagatatgggacgaataccaggcatcacagagcacggtcgtcactgaacccgttgccgagctgcccgtggaagtggctgaagaagtgaaggccgtctccgccgcgctgtccgaacgcatcacccaactggcgaccgaactgaatgacaaggctgtccgggctgcagaacgccgggttgcggaagtcacgcgtgctgccggggaacagactgcacaggctgagcgggagctggccgacgccgcgcagacagtcgacgatctggaagaaaaactggatgaactgcaggacggatatgaccggctgacgctggcgctggaatcagaacgttcactgcgtcagcaacaggatgtggagatggcccagctgaaagagcgtcttgcggccgctgaagataatgcccggctgcgcgaggaacgtcacctggagcagaagacaagcctgcaggatgcactgagtaaggaacaggcacaacacaaagccacacgggaagacctgcagaaacgactggagcaaatttctgccgaagctaatgcgcgtacagaagaactgaagtctgaacgcgataaagtcaattctctccttacccgtcttgaatcgcaggaaaatgcgctggccgcagaacgtcagcagcatcaggccacccgcgagacactgcagcagcgcctcgagcaggccgtcgctgatgcacaggcgcgcgccggggagcttgcgcttgagcgtgacagagtcagcagcctcaccgcaaggctggaatcgcaggaaaaagcctcctcggagcaactggtgcgaatgggcagtgaaatagccagtctgacagatcgctgcacgcagctggaaaaccagcgtgatgatgcccgtctggagacgatgggggagaaagaaacggtcgcggcactgcgcggtgaggctgaagccctgaagcgtcagaaccagtcactgatggcggcgctttcaggcaataaacagaccggtgaccagaatgcgtga

SEQ ID NO: 147055 - DNA, 489 bp, Enterobacter cloacae
atgccgaaggatgattcagttgtcgaacgggccagggaatactttttccggcaccaccggtatacagaggaagacctggaatccgactaccaggcagaactgcgtaactacagggatgacacctgggaagcaccacaacgggccgccagactcagtgcggccgtcaagcgctacaaaacgtatgagatgctgtacttcttcttccagatcgctgatgaggccgggctggactatactccgctggttgtaaagcgcctgtgcgctcatcttttcgacaggcagggcagccagaatattattgttgatatctttggccagaagggacgcatgcaccgcagccatgacagtgatcctgacattattgctgccgttgccgaacgctaccggcagcaggcagacgaccactggcagacagtcatgaagaatatcgggagattgaagcaggactaccggaaaaatcagaacagacagaaaggcgcaggggattaa

SEQ ID NO: 147056 - DNA, 564 bp, Enterobacter cloacae
atggatcatgatctccgggacatcgatgagtttcctgtactgagatgccgtgagctggctgaacctgtgactgaagagcacctgcgaaaaaatatgcgtcactgggaattacggctcgaccggatgctgtttgctgaatatccgtgggcagagcggagactttactggctgaacgacggtggctcacaccattttggcgctgcccgctatcaggcacgccgcctgggcattgcggttccgcttaccggcagactctgtcgctacggtgtaaatgtgccgatgatctccgctatacgtcagcaatggcatctgtttgctattccggcagatgaactcttcggctgctttttcgacgccatgaatgcctttgaatgcccgtttggtaattccggtttgccgcgtcacatgcatgatacggataagtcaggcgttgatctcaaactggtctggcttgaacgttgccatcccagagccagtgctgttgctgatgtactttcagccgcaggctttcctgatttcgggaagcagctccagcaactggccaaagaaccttcgccacgttga

SEQ ID NO: 147057 - DNA, 189 bp, Enterobacter cloacae
atggagtggattaagtgtagtgaaaggcagccgctgaaaaatcgactgctactgctttttgttgatggtgattatgagtttggaaagttgcaggaagatgatttttggatctacacaaacggcgcattcaagaagcgctatgcaccgcaagaagtaacgcattgggcaatgctcaatcacccagaatga

SEQ ID NO: 147058 - DNA, 210 bp, Enterobacter cloacae
atggaactggatgatgagagaattaatatgatggctcacgctgctggtcgtgcggtgatggagttatgcctggcagatatacctgtgactcagcaagctataatcgacaagcttgagcagtaccgaaaggaaaccggcaacgtgatcggtaaagggattaacagagatgcagcggaaatcgtgcgtaaaggaaggaaagcaattcagtga

SEQ ID NO: 147059 - DNA, 204 bp, Enterobacter cloacae
atggctgaaaaatgtgatcgctgtgccgtcggaattatcggtacaaagtcgatcctcgccggtgactggaaggctgccgaagccgattttgaaaaattaatcgaagactggaatgagaagacaaagcgctttgctattccgcaccctggcttcgctcgtaaattcttttactgcccactgtgcggcagcaaggttgaggactaa

SEQ ID NO: 147060 - DNA, 1092 bp, Enterobacter cloacae
atgaaacgattaatacttgctgcgactgtaataagtgcaagcctgctaccatttacctgttcggcaaatgccgactcactgggtatcaataaagactgcgataaccatcctgtcagccagtacggcatggacaccattaccgcattcagtcagtacaagacggaatcgaaaaaatttaaagatgcactgactgcgttctgcaataaaggcaaaaccatgggcgacatgggatttgacgctgccaatgctcactctcttgctgaagcaaggaaatggactgactccagtcttcccaggggaaatgaagagcagaaaaaattttcagcagccatggggagcctgctttactatgcaatgctgaatggattctctggttttgactatcccagaccgcccgagcaaaaagaaaaaccagtaagctcatttaatccaaatgaaatatgcgatgacatatcatctaaagcagccaaatattcaacctcgaatctcccccctcaagtacagatttcattagctgagtggaatcaaatcaaaggcgagtttcagatggtgtgttttgcgggaatcatggcgggtaacaatcgccagtcggttgactcaaaaatattggctggaatgaatgatattggcaaagaagtgtatttaagtgcttatcgttctggttcggaatacccaaagcttcgcagcaaaaacaacacagaaaaaaatgatgctgcagcaaggaagaaagaggctgcaaaggagaaagcagatgcagccggaaaacaaagtgccaccaacaaaacaaagcaggctgacgattataaatccaggagtgttcgccttgactcccccgattttcaacgctttcagtcttcactcagaaatgaatttatgcggcgaattggtgatgcaaagcgtttttcaggaaaagaatgttcaataaatgtctggatgtcacagaaaggtgaggttctgtcagccaggaaggaatccggagatgaagagctttgctctgtggtattgcaggcatcgaagggaatgaggcttagccctatgagtaatgaagtttacggagtgttccgtaatccatccctcaactttaaattctag

SEQ ID NO: 147061 - DNA, 252 bp, Enterobacter cloacae
atgaagtacgctaagcttatttctacgcttattttcgagagttcagatggggaaaaatataagtacgatatttttcaagatttccctgcggcagatttctacgctgtaattcatgcccaacaggaggtctctactgaaaagtacggcaactgcccgacatggatagtaatcaacggctatttacggttgggtccgcttaacccagttgcatgtgatgaagaatgcaaagctcatttcatgaatcattattga

SEQ ID NO: 147062 - DNA, 258 bp, Enterobacter cloacae; identical to SEQ ID NO: 96832

SEQ ID NO: 147063 - DNA, 147 bp, Enterobacter cloacae; identical to SEQ ID NO: 96834

SEQ ID NO: 147064 - DNA, 849 bp, Enterobacter cloacae
atgtttcgagcaaatgaagaagctgaaaaactcaaagctgaggcaatcaattactttcttattaaagagatcgcaccatggcgaaaggataatatcgacgctatctctgaaactgacaggaaacgagctgaggatgctttaagcgttatttgcacgaaacttgggcctgtagtgtcttcttatcctgaatggcatccagttatagcgcttggccgtgataagtcgataccctgttacagggacacgcagacgacgccatcatttccgcgccttgatcatacgcgttatatggctaacggtattattacatgcccctatggggatactgatgagctaatcgctgctgtaaagcgttcctactgggatttaatgcaatatctgagcagtgatgacatgcgttttagtagcctttccggatggttgcgtatggcatcggactccatcgagttgcgggcttcttatatcactgacgaactcattaccgcgtttaaaaatagtgattttgactacgatgggagcgatgttctttctgatgtatcgggcttgatccctctgtatgcgaatacagcaaaaccagtgctaatctggtggagctggaataatcatgcccttgaatctgatggcacgatacctcctgcggtggcggttcctttaatgttgtccaggacgctggcggatctgtcatatgcccagttgtcagagtcatgggaaaatatgcgttacctgcttctcgggtctcctcatggggcaaggtcgtcgctacttctgaaccagctaacggttaagcagttacgcacaatgtttaatggattaatggattccggggcttttgggccgaaaaaaggatga

SEQ ID NO: 147065 - DNA, 285 bp, Enterobacter cloacae
atggattctttaacgaaatttgctctggatattttacgtgaccgaaacttttcccggctggatgaggaggtcagggaagaagtgctgtccctgtttattgatgatcagcgtaaaccatcaaaagaggggcggagaacgctggcacttaatgctggcctgctggcaaagcaaatgggagagccacgactggaggtgctttcaatggatgtacttatggcctgtgacaaagcggaagtacgtgaggttctggcacaaattacagacattcttcagggacaggcttag

SEQ ID NO: 147066 - DNA, 294 bp, Enterobacter cloacae; identical to SEQ ID NO: 96837

SEQ ID NO: 147067 - DNA, 483 bp, Enterobacter cloacae; identical to SEQ ID NO: 96838

SEQ ID NO: 147068 - DNA, 615 bp, Enterobacter cloacae; identical to SEQ ID NO: 96839

SEQ ID NO: 147069 - DNA, 564 bp, Enterobacter cloacae; identical to SEQ ID NO: 96840

SEQ ID NO: 147070 - DNA, 333 bp, Enterobacter cloacae
atgagtctgaccgtgcatcgcaagctgagcaatcagcttagagacatgctgtggagtgaagaactccccgcccgatttacctgcattcgccgcatagttagaaataaggaattcataggcatcaccaaacaggtcaatctgatgctcgttaaaattccccagcttcagcccttcaacgcctttcagaacggcggcaagacggctgtttttgtctttaactgtgttacccagacgattgctggttgtatcgaaatcggcaaagaggcctttgatgtcagcctcggatggataaccgtaggccgagctttcaatagcgacgaagatactatttaa

SEQ ID NO: 147071 - DNA, 369 bp, Enterobacter cloacae
atgtttcctgaattagacgagtactatgagggttttcctcacgccatcagcagcgaaaatgaagaaaacacgtcattcaatgattacactctgtttaacacactggcggagtgcctgtatcacggcatttcacgtgaaatcttcgatggcagcgagcctgcgctccgggctgtaattaccaacggtgagattaaattcctggctcgttatacgcgtgaaggggcacgctattatgaatccattggcacgtttccaggtgtgtccgttgaattcgcgcgtaagcaagcacgtgagctctataacatatatgatgataaccgggtgccggatgaagattatggacctgcttatgataatatcccgttctga

SEQ ID NO: 147072 - DNA, 810 bp, Enterobacter cloacae
atgatggttatcaactgctccgccagcgcggcccagcatctttataaaaactacaaaaaaaatcagaacgagggattttttgagtctgctgccacggtaacggataccgttatgcagcgacagtcacatatcgatggccggggtggtatacagtgggttgtacaggccgtgaagctggggcgttcaactaatctgattgccatggaagtgagtactcgctgggtacatgtgatccacaaggttccaaagggggatgtggagggatttgtcacccgactgaatcagcgactggttaatggtgttgagtggctgggacaggatttatccctgtttacgacaaaacaaatggaaaagtccattgagtgctactttacgctcaacaaagacctcctgttttatcagcaaacggataccagtgtgatggcgcacatctctcaggtggctgcattttacagcgatgtttaccatgatattggggattatcctgatgatgaagagacggcgctggaatttgatttacggctgaatgaacaatggcgctgtaagaaaggagaaaaattcaatctccgggctgacgaaaaaatgctgaccttttggtgtgagcgttacatgaaaaaagatacccggtggatatctgcaatgctggagaaaatcagagcccacacgaaactgttacttaaagagaaactcggggttttgtctgagttacgtcatgaggttttttctgagtcagcatcgaaaaatgatacgctgagccagcagcataaagtgatttcgctggatagcttcagaaaaaaggcaaaaaaatga

SEQ ID NO: 147073 - DNA, 489 bp, Enterobacter cloacae
gtgtttgagattgacctgctgaagtcgcaggagattaaccttgattacattcttggtctgattttcgaacataacaggcataagaaaggtaaagaggcactgactgaagaggtcagacggttaatccgctcaagtctgggcaacagggccaaagaaggtctgattattgattttattcatcagactaaccttgatgacatgccggacaaggccagcatcattgatgcgttctttacctttgctcagcgtgagcagcagcgtgaagcagaaatgttaattaaagaagaaaacctcaatgaagaggctgcaaagcgctatatccgcacgtccctgaaacgggaatatgccaccgaaaatggtaccgagttgaacgagacgttaccaaaactcagtccgttaaacccacagtataaaacgaaaaaacagaccgttttccagaaaattggcgcattcattgagaaatttaaaggggttggtgaccagatttag

SEQ ID NO: 147074 - DNA, 2097 bp, Enterobacter cloacae; identical to SEQ ID NO: 146408

SEQ ID NO: 147075 - DNA, 507 bp, Enterobacter cloacae
  misc_feature (428)..(436): n is a, c, g, or t
atggcagatttgaagaaaaaagaggtaagccgtagtcgaatggcggagtttcctgccggaacgccgcttcgttcaggggatgagtttccgactgaggatatcatctgtgaggcactagaaaacaaaagctttgaacgtctgaataactgcctggttatcgccagctcagatgaacatgatatgcgttttatcaatgaggagacgctgaatatttatttcagggatgatgtctggaccaatcgctatgtcagaacccatattggtgaaacgttaagaaccgttaatttttcaggcatacgggatcctgaactgcgtcttgaagccaaaatcatctcagccagcctgctctggattgtcggcaggaccgcgaagacgcagtcactgatccggaaatgtgcaaacattgtggcgggagcccgtattattgnnnnnnnnngtcgtcggcagcgtcagatgtgtataagagacagcgtaattactttatggacctggcggatatctcgctga

SEQ ID NO: 147076 - DNA, 222 bp, Enterobacter cloacae
atgactgctgaggagttaattgggctttatgaaaatagtatcgctgaacataaatctgtttataacaactctaaatttataaaaactaatttactgatagtaaatgagatttttaacatcataatgatgaataaaagctttcaaaatttacttgaacaagagaatctatcagaactgccatctcaaatcctcaatccaataaacaaagaggcatcaaaatga

SEQ ID NO: 147077 - DNA, 372 bp, Enterobacter cloacae
atgattcagatacgttttggcgacaattttatttatttagaaactaacaagttaattccctctaaggaattgttagaaaatgtaaagttaagtcataaatatcatcaaatagttacctctattgaaagcttaggtattattgaaccaataatagtgttctatgacaaagataaagatgccattaagatactcgatggccatttgagggttgaggctttaaaagacttaggcatagaaaaagctccatgtttactttcgagcatagatgatgcgttcactcctaacaaacaagtcaatcatataaatgtagttgaagaacatagaatgataatcaagtccttggcaaaagttttgacctgcccccacgattag

SEQ ID NO: 147078 - DNA, 363 bp, Enterobacter cloacae
atgattaattttgataattatagtaaaaaatttgcaatgagcatcttggatgctacaccggcatcaatgatagtaaataaagggaaaaacactccctataaaaaggacataaaaaaaaccatacttcgtctggaacaggaaatggcaacaacttcggaagaaacaaaaaaacttcaaaccgagtatggttcagatatgttgaaattcgtgataatccagtcatatattaataaattactgggtaactctaaagttcttcattggttcttggaaaacgaggttgattatcttaatgagttaaaaagaatttcgaaaattaattctttagatgagaagactcttgctgaaaacagccagtcatag

SEQ ID NO: 147079 - DNA, 645 bp, Enterobacter cloacae
  misc_feature (147)..(156): n is a, c, g, or t
atgaaaaaatttaatttcgctgctctgcttccgggatttttagcactcaataattctgtatgggcaagtgattcctccactggtgcaagtgagttgcccggtatgactcttaatgagcatgatttagttatagctccacttaacacnnnnnnnnnngaagtacctttctacattgcagggcatcgtagtcatagctcccatcgaagccatagttctcatagatcttcgtctggtggtgggtactatggtggaagcactccttattatcctaaaacatacagttcaccaagctcatcaggctcatccacttcaggtacaaattcgccatcgtcttcttcatctgttcgttcgcttcgctctaatgacaccgatgcctctacgaccacaaactctgctggaatgaatggaactactcgtgcaagtagtgggctggcttctgatactgaaaagcgtaagcgtttgatcatgcgagtgcagttcgcattactggataaagggttttataacggcaatatagacggaagtatggggcctgcgacacgaactgctatcaaaaattacagagttgcatatgggcttcctactccagtaagagaaacattagatgctcagttattgaactctttgaatatactggctcgttaa

SEQ ID NO: 147080 - DNA, 651 bp, Enterobacter cloacae
atgagtgattcagcaaagtataaaaatagcacacgactcattcagttggccctgataagcgggacgcttattgcctcctcggcgtggggattcgagacgaattacgatcgtgggcgggttgattttgccggacgggtgaccgacatctcctgtagcgtggcgcttaacggcggcaataatgcagggagtggaagcgtctggctggcgccggtcagcctggcagaagtacacgatcgcggggcgggggcatttatgaaaccacagcctttcacgctggaactctcaaactgccagcttcgtcatgatggcggcgcggcggataaagatgaagttcggatggtgaatgtgcgctggattgatgggtttatggttaattccgtcagcaatgaaaacgctggttatctggcgaatacgcgcgcggatggggccagccatattttcctggcgctgtcgactaacgacaataatactctggacaagagcaataaaattgtcccggctgacccgcagcaaaaccgggtgcctctggtcgaaaaggcggtggatggcgggatatttacttattacattggctacgttacgccagcgccggaaaaagcgaccagcggtccgttgaccagctgggcgacctgggagttagtttataattga

SEQ ID NO: 147081 - DNA, 783 bp, Enterobacter cloacae
atgaaactggaagcatcactcaaacattttagccctcaggggatgcacatcagcgacgacgtgaagggaacctctcctgatcgtctcaccggcaccgatgttatggcggcgattggcaccaccagcagccgtgcgcgcttcggcctggcggcgttcttcggtaaagcgggaatcagcaaaacggatgaacagctcgcagttcaggcactggcgcgatatgcgatggatgtcgcaccgaagaatgttcgcaaagcagctggtggccagttcggatggtgtatgcagatgttggcacaatttgcctttgctgattactcacgttcagcggctaccagcgtgacgtgtcacagctgttgtggtaccggatttatctccgggcatgaagatgtaattaaacaccctggtatcttcgacgctgacggtgccgaagtggtggccccgaagattaaaaatgagctggtgaaaagggtttgcgaaacctgtggagggaaaaaggtaatccttgcgcggtgcagatgcggcggtaaaggtgaagtgctggatcgcaaagcgaccaaagaacgtggcgcaccggttttcaaaacgtgtgaacgttgctctggtaatggcttctctgctatctcctcggcgacggtacaccgtgccattctgaagcgtctcccggacctccatcagtcctcatggtcacgcaactggaaacccttttatgaaatgctggtggacacgctgcgccagggggaacgtcacgcggcagtagaatttgagaaggcaacaacttattaa

SEQ ID NO: 147082 - DNA, 1380 bp, Enterobacter cloacae
atgactcctgtctggaaaaatgaagatctggaaggtgcggtgatcggcgcaatttttctgcgtggagccgaccctgaggtactggatattctttccagggtgccagccaccgcgttctcggtaccgcagtatcgggaaatctatactgggatctgccgtcaggcgcgtggagctggcgttattgaccctgtactgctctgcgaaaacatgccaaagcacagcgcaatcattatggactcgagccgtatcgcatgggccaagtcggcgcttgtgtcctacgttgccacgctggagcgtaatgcagctgttcgtgatgccgaagctgtgattgaaagggcgctggctgatctccggagtgctcacaatggtgatgcggctttatcggcattcagggctgcacagaacagcattgccgcaatttctctcgaagaaaagaccgttcagccagttcatatcgacgacattcttcctgctgtagtggatcgggtagatgcacgcaaccgcggcctcgaagaagccagaagcctcatgacgggtattgaagagcttgatgcaaagactggaggaatcgaaccaacagacctggtgtttatcgctgcgcggccgtcgatgggtaaaaccgaattggcgctggatatcatcgacaaagtttctgagcagggccgcggtgtgctgttcttcagcatggaaatgccaaatatccagatcggtgagcgaatggtatctgctgccggcggcatgtctgtttcacgcctgaaaaaggctgctgattttgaggatgaggactgggccaggctgacaaacggtgtagaacggctgactggtcgtagcatctggatggttgattctaccgatctgacagtagatcagattcaacagatagctacccgcctgcagctggctcatccagaaatagcgctggtggtggtggattatctggcactcataaaaatcgaaagcactgcacgatatgaccttgccgtcggcgaggtgtcaaaaggacttaagcgcctggctaaatctaataaaacgccggtccttgccctgagccagctttctcgtggcgttgagtcgcgccccaataaacggccgatgaactcagacctcaaaaactcgggtgagattgaggcagacgcagacctgatcatgatgctttaccgcgacgaagtttataaccctgagtcgacagcgaaggggatagcggaaattaacgtgaccaaacagcgcaacggtgaactaggcacgatttaccgtcgattctataacgggcacttcctgccaattgaccaggagttagcaaagcagcgttctgcgccacagcagaaagcccaggccagacgttattcaaaagaaaggcattccagcaatgcagactattaa

SEQ ID NO: 147083 - DNA, 711 bp, Enterobacter cloacae
atgcgcgacaaaacagttagcgccattctggcgcatgccgccgcatccttccccgaggagtgctgtggcgtggttattcagaaggggcgggtggagaaatacatcccctgcaaaaataatgctgagtcgccgactgagcaatttgaacttaatcctgaggattatgcggccgccgaagagcagggcactgtggtggcgatcgtccacagccatcccggcgacggggcaacaactcagccgagcgagctcgacatgctgatgtgtgatgccacggaactgccctggattattgcatcgtggccggagggcgacattcgcaccgtcatgcctcgcggagaccgtcccctcacagggcgtcagtttgtactcgggtatgcagactgctggtctctcatcatggactatttccgcatcgagcacggcattgaactgcccaactacagcgtagatcgccactggtgggagcagggtgaaaacctctatatggataactggcaggaatgcggtttccgtgagtacgacggtcccgctcagccaggtgacatggttatcatgcaggttcagtccaccgtcccgaaccatgccgggattttgcttgatggcaacatgctactgcatcacatgtatggccagctaagccagcgtattccctacggtggctattaccgtgaccgtaccatcaaaattctgcgttataaggatttgatgtaa

SEQ ID NO: 147084 - DNA, 1143 bp, Enterobacter cloacae
atgccctgggatgcgagagataccatgtcattacgtaccgagtttgttttgttcgcctcgcaggacggggcgaacatccgttccctctgccgtcactacggcatttcccctgccaccggctacaagtggcttcagcgctgggttcaggaaggcgccgccggccttcaggaccgcccgcgcataccgcaccattccccgaaccgctcgtcagacgacatcactgccctgctgcgcatggcacatgcccgtcatgaacgctggggagcccgcaagattaagcgctggctcgaagaccagggacacaccatgcctgccttcagcaccgtccataacctgatggcccgccatggcctgctgccgggaacggcgcccggtattccggctacgggccgcttcgaacacgatgcgccgaacaggctctggcagatggattttaagggccactttccctttggcggtggccgctgccatccgctcaccctgctggatgaccactcccgtttttccctgtgcctggcgcactgtaccgatgaacggcgcgagaccgtgcagcagcaactggtcagcgtgtttgagcgttacggcctgccggaccggatgacgatggacaacggctcgccgtggggtgacaccaccggcacctggacggcgctggagctgtggctgatgcgccacggtatccgggtgggccattcccggccttaccatccgcagacgcagggcaagctggagcgttttcaccgcagcctgaaggcggaagtgctacaggagagatggttcgcggacagcggtgagttgcagcgcgctttcgaccactggcggacggtgtacaaccttgaacggccacatgaagcgctggacatggcagtaccggcctcgagataccagccgtctgcgcggcagtaccgcgccggcacacccccaccggagtacgatgaaggcgtggtggtcaggaaggtggatatcagcgggaagctgagcatacagggtatcagtctgaacgcagggaaggccttcaggggagagcgtgtggggctgagggagacacaggaggacggctgctatgaagtatggtggtacagcacgaaagtggggatgatcgacctgaagaaaaagtcgatcatcatgggtaaaggatgttaa

SEQ ID NO: 147085 - DNA, 1026 bp, Enterobacter cloacae
atgaaaatctttatcactgaccaacaaaaagctgaacttgagcgtcttcatgactccagtcgtgataagcgcgtttgcgatcgcattaaagccattcttctggcctccgagggctggagttcggccatgatcgctcaggctttacgcctgcatcagactactgttgaccaccatatcagcgagtttctgaacaaaggcaagctgaagcccgaaaatggcggctcagacagcaaactcagcgctgaacaaacggcttttttaatcagccacttatccgacaatttattttaccatacccgtgatattgtcgcgtttgtcgcgcggacatggaacatcgttttcagcattccgggaatgaataagtggctgcaccggaacggcttcacctataaaaaaccgtcaggcgtcccgcataaattcagtgaagagaaacaaaagcaattcattgaatattatgaggaactcaaagccaccgcaggtgatgaaccggttctttttattgatgctgtccatccgactcaggccaccaaaataggttatggctggatacgtaaaggccagagaaaagcggtaaaaacaacaggtagtcgtacacggctgaatatcatgggggcgctgaatctgaaggccccggaacatccgctaatctgcgaatataaaacggttaatgaatacaacgtatctcgttttttcaatgagatacgtaaaatttatccagattatcagcagaaagttcatgttattctggatggtgctggttatcaccgttcacagttagtgaaagactgggcggaggtggtaaatataaaacttcattacctcccgccgtacagcccgaacctgaatccgatagaacgaatgtggaagttaatgaacgaacatgcccggaataaccgctacttcagcaacagcagggagttcagggatgcaatatctgaatttttcagccatacgttaccggggatagcgggttttctgacgtcccgaattaacgatcattttcaggtgctcaaacctgcatcttga

SEQ ID NO: 147086 - DNA, 522 bp, Enterobacter cloacae
gtgattaccaactgttctaacaactatggcccctaccattttccagagaagttaattccgctcattattcttaatgctttgtcgggaaaaccgctcccggtctatgggaacggcgagcagatccgcgattggctgtatgttgatgatcacgcccgcgcactgtacaaagtggctacagagggcaagatcggtgatacatattgcattggtggtcataatgaacgtaaaaatattgatgttgtaaaaactatttgcgcaattcttgataaaatcatcgataaaaaaccaaacggtattgtcaattttgcagagcttataacttttgttgccgatcgtcctggacatgatcttcgttatgccattgatgcaactaaaatgaaaaatgatctcggctgggagcctctagaaacctttgaaagcgggatcgaaaaaactattcaatggtatcttaataatgaaggttggtggcagcgtgttcttgatggctcttacgctggtgaacgtcttggcctgaacaaataa

SEQ ID NO: 147087 - DNA, 291 bp, Enterobacter cloacae
atgccggacaaggccagtatcattgatgcattctttacctatgctcagcgtgaacagcagcgggaagcggaagcgttgattaaggaagaaaacctcaatgaagaggctgcaaggcgctatatccgcacatcactaaaacgagagtatgctaccgaaaatgggacggaattaaatgagacgctaccaaagctcagtccgctgaatcctcagtacaaaacgaaaaagcagactgtattccagaaaattggggcgtttatcgaaaaatttaaaggggttggaggacacctctag

SEQ ID NO: 147088 - DNA, 273 bp, Enterobacter cloacae
atgtgggaaaagatattacaaaaaaatctttattctgaatgggttatccgaaacaccctatactggatgacttctgtaagcccatggaaacttgaagaaaacatatcctcgtggattatcttctttgagataggtggtcctgaatgtgagtttgaattcgcaaggttgttaaacgattttagcctccgtgagaaacttcaccatcaaactggtcagttgcgtgatgccatcatcagcaaggttctccgaagcatagatgacaggcttgcataa

SEQ ID NO: 147089 - DNA, 204 bp, Enterobacter cloacae; identical to SEQ ID NO: 119841

SEQ ID NO: 147090 - DNA, 135 bp, Enterobacter cloacae; identical to SEQ ID NO: 146841

SEQ ID NO: 147091 - DNA, 306 bp, Enterobacter cloacae
atggcaatgcgcttaattggcacgaagctaattgacgactactatcgtaaacacgcgcaagctaaagggcctttagaggcttgggttgcggaagtgaaaagtgctagttggaaacatttgaatgatcttaaaggacgtttcccaagtgctgattactacgatggatacgtcatattcaatataggcggcaacaatcaccgcttagtggcacaagtagagtttaaaatgggtgtcttagtggtgagatggatcggtacccacgctgagtatgataaaaagaattccaaaggaggcttcaagctatga

SEQ ID NO: 147092 - DNA, 222 bp, Enterobacter cloacae
atgaaaaaagttgtaactctttccctcctcactgccgtcactatatttactgtaggatgcgctaaacattcatacagtattgtcactcaggacggacgaacaattattagtgaagtaaaacctaaagaaaccagcgccggattagtagggtatgtggatgcgaatggtgtcaaacagcagattaaccgcgcagaagtgaaagaaatcacccagatcaggtaa

SEQ ID NO: 147093 - DNA, 636 bp, Enterobacter cloacae
atggaaaaatatatctattttattaacagtaaaaacatcagtattttacttacggatgacttctaccttttttatggtttaaaacagataaccggcttgcctttggttcatatgacatatgatggaatcactcatcctccggctattataagaggaaaaggtaagattcgggtacttattgatggccgaattttcaaggaaggtaactggagggggttcaataaactacgcgagtcgctaaaaaagggcgctgactggatttggcttgatatatccgggcacggacgtttttaccctgaagattgtgagtatcatatttatgtcaatctaaggggaagtatgcatgactcaattatgtccttatatcatgcttatttaagacgccgaatcagtatgatttaccatcattatccgcgactgactgtaaaagagttagatattcttcagagtctacttgataacgacagcattgctgaaattcaaaaaaaattttgtcttgttgaaaagactgctacctgttaccgaagcaggattgtacaaaaatttggttaccgaggatacggtatgtttatgcggtattatgaacgaaacaaagaaataattgacaaaaaatggaggcataaatgtaagcggtaa

SEQ ID NO: 147094 - DNA, 1392 bp, Enterobacter cloacae; identical to SEQ ID NO: 146894

SEQ ID NO: 147095 - DNA, 192 bp, Enterobacter cloacae
atgccagatgagcatccggcattagaaatgaataacttaaatattctgggttatctgaacaactttaccaacaatcctgcaattgccatctatcggtataggtttgaaggcaggattaagcggcatcagatacgcgaaagggctatcccagacgagttttttcactgttgcttcagcagagccatcaagtaa

SEQ ID NO: 147096 - DNA, 606 bp, Enterobacter cloacae
atgagtgaagagaaagaatcaaccagtgcattggctagatactggaaaatctatggtggcgctggggctgtgtttaaaagtcgctatttttggtgtgcttttttaatgacggtgattctttatccatcttggtctcatcaggggtggtggaatgatattctgtcattgatgccgaaccttctgggcttttcattaggcggttttgctatgtggatagctattggtgatgaagcctttaaaaaaataataactggtgatgaaaaaaatgaaagtggagaagtagaatattctccttatatgtcagtaaatgcaacctttgtccattttatattgttgcagctactaactattattacggccttggttaccaaggcctatagcagtattctcataaataatgcttttatgtattatcatttaggtgttttctataagtatgcattattaacattaagtttttttgcttactttatatttatttactccgtattctctgcgttagctgccgttcttgctatatttcgtgtttctagttggtataatacatttatgacttttcaaaatgaacaggctattggtaattcgaaagataatgcaggagaataa

SEQ ID NO: 147097 - DNA, 885 bp, Enterobacter cloacae
atggaactactgagcttatctccaacaaaattcgaaaatttaacttttgatatcgtcacagccttgggattaagaaattcagtgtggagaacacctggtagtgatttaggtcgtgatatagaaggtgattattttatatctgatttatctgggcagtatcaaagacaaagatggtatatagagtgcaaacgttacacatcatcagttgattggcctactatttggaataaaatttcttatgctgaaactcatgtcgcagatatactgctatttgtaacaagttcatcactttcaccgcaagccatagatcaagttagactttggaataatgcaaataaaaaaccaattattagattttggggtgcagtagatctttgcgcaaaattaaacctatatccgcaaatagcaaaaaaatatggtttaaaacctgagactagctcgaatattgatgcttttatcccatcaattgatcttcttcttagaataacaaattctttatcccctgaaattggcgaagtgtcacaggcaaaactatggctattacactcctttagtgagctaatttctcgaagaatattagatgtaaatacaggttatggattctgttttaaagaacataccgaaattgattactttgattgggttgatgtaaaaaaagtaaacttactatcttttgataaatactctactagggtgcttctagcatacctattttttgttcttaaagaagccccaacagtcgttcaaaaatcaccatgcttgatccatctgctactacccagagagctaagagaatcagagataaaccacattaagataatttcttatttatccaattacaccttaaacacaacacaagaagaaattatcttagaattaatttaa

SEQ ID NO: 147098 - DNA, 711 bp, Enterobacter cloacae
atggacaataaagaaacgttatttttaattcaaaacattactcatcaagcaataaacccaatgagtggggttattggcgcgcttgataatctaatcgatggtgttgttccagaacataaaagagaacaacgtttacgacgagccagatcacaactagaatatacagtttcactaatacgaaatctttcttattttgcagaatatgcttcaggaaatacagcatcaatatcacactcatctatcaaaactacagttatacctcaagcaattattgagtcggcacaatttttccaagatcaaggacagcatgaacatattaaaattgaattagaaaacagaacagctcaaaactgtgttagtggagacccaaatttattaaagcaagtattcatgaatttaattgataacggtgtaaaatatggaaaaccaggcaccacattagtaataaaaaacaacatccaaaaaaaaacaaatgatcttattatcacttttgaaggctacagtgagcctttctccaatgatgaagatttatttgaaattggatacagggctaaaagtgcaaaacaaagaacatcatctggttcaggcctcgggcttcacatatgtaagttaattgtagaaaatgcatttaaagggtcaatctcagctcatcattcattagcagggatgacaaaattcgaaattagaataccaaatgggtttttaaaatga

SEQ ID NO: 147099 - DNA, 396 bp, Enterobacter cloacae
atgaaacgcattattacatttggtactttcgacgtttttcatattggtcacattaatattctcgaaagagcatcgcagtatggtgattatttgtgcgttggagtgagttctgatgcgcttaatttcagtaaaaaaggcaggtatccgatttactctgaatcggagcgttgtaagataattagtagcttaaaatttgtcgatgaagtcttcattgaagaatctcttgaattaaaaaaagaatatatcagggcgcattctgccgatatcttgattatgggggacgactgggctggacgatttgactgggttaatgatatatgtgatgttatttatcttccaaggacaccatccatctctacaactgaaataatcgaagtagtgaaaaccttaaaatga

SEQ ID NO: 147100 - DNA, 147 bp, Enterobacter cloacae
atgtaccccaatgaatcagcgatctggattatttatccgcaaaaaaacatgtcatataaagtaaggggttttattgattttattgattttattgattttattatcgatgaaatcggaactactccttactggaagcacggaaagtaa

SEQ ID NO: 147101 - DNA, 252 bp, Enterobacter cloacae
atgccgttaaagtgccctaagtgcggtagtcggaatacagtcacagaaactgccggaaatatagcaaaggtgactcgcgatgaccggtttctgacatcgacatccggttatattagcccggagcaattaccagaattgcttaaagaaatcatcagggcgatacagcgtctatttggattccttgaacagcgtgaaaggaataatgcgccagtgcttatctgcaaggattgtggatattatgaaagaatatag

SEQ ID NO: 147102 - DNA, 552 bp, Enterobacter cloacae
atgctttataacactggcaccatcgcagttaacggaaacaccgcaaccggcactggcacgaactggacggcaccggccagccagattcgggttggccagacgttgtttgttctttctaacccggtacagatgtttcagatcaccgccatcaacagtgcgacatcactgacggttacgcctgccgcgtctccggccctcagcggccagaagtacggcattcttgttactgatagtctctcggtcgacggcctggcgcaaagcatgtctcagctcatcaccgagtatgacgagaacatcggcgcgtgggagacgttcgccactacctcagcaaaccagaacatcaccgtcaccatcaacggcgctcgtgtaaccattccggcgatcggcaaactggtccagaaagggagcaatggggcggttggagtttcggacggcgggaccggggcaacgaatgccgctgacgctcgcacaaacctcaagttttgccatgctcttgtatatggccgagtagggctgcggttgaccgccagccgatacaaccccggtaattag

SEQ ID NO: 147103 - DNA, 405 bp, Enterobacter cloacae
atgacatataaagatgaaacaaaaactgaagtaaaaccaagcactaatgccatttttgatgaaagctctaaaaatgaaaagaacagcctcgttgactcccctgaaagtgaattaattagcactgcgctgacgtcatcgaacataggggaaaagaaatttaggtggatatgtttattgctaatagtctcagttttagcaaatattggttttacactctgggtttcacaaaccgaccccttaaaaggcatcgctttttatgcttcaaactgggctgttaccggcgcgattattgatttcgccaatttgcctactggtaaagagaaaaatagtatcacgggcatccttaagcttatccctgcgctgagcagtgctgttctctattctgttttgcactatataggttga

SEQ ID NO: 147104 - DNA, 468 bp, Enterobacter cloacae
atgtacaggagccttatcggtctttcattattgttcttagcggaaggaagttctgctaacgataacataactattaatatgctcgctaacaattcatcgacgcaaaactgttttcatcagatggtgaaagcaaatcagctgccgacttgggtgatccgtaacgcatcgaattatccaactctagaaatgaccattcgtgaagaacactattacgtcatgaaagcctgtaaccctgatgattgtgaacgcgaaaaaatcgtaattgcttactctccactacgaaatattttatctggtgtgttcgcctttaccgaaacccctgagcaacagcaacttaagtggcttgggattagtgatgagctccctgatggaaaggctctgttgtttgccgcattgtcagggagccttgaaaagctacgggagaattttactagtatgaatataatgcctcaaaaggcggaagaatga

SEQ ID NO: 147105 - DNA, 1242 bp, Enterobacter cloacae; identical to SEQ ID NO: 105539

SEQ ID NO: 147106 - DNA, 474 bp, Enterobacter cloacae
atgcgcagtaatgccgttttcaacttcaaaaagttacttttgtctctttctgtttgtgctgcaattttagccccgactgcaaatgcagacaacgcaatgcgtaacattttcaatggcatgatgacgtctaccagcccggccaccttttccacagcaacccgtacaggcatagttggcgggtcaatgtcttaccgaacaacaaacgttaataccaaccttgtttccatgtcgtttccaaaagcttctgtcggttgtaacggtattgacgtttttcttgggtccttcagcatgatcaacggggaccagcttgtgcaggtggcccgtggtattgcccagggtgcggctatctatgcttttaacgttgctgtttcagctatttgtgctgactgtgctgcaacgattaatgacatccaaaacaaactgcaagcgctaaataaatttgcgaaagattcatgcccttcgcggcaagtataa

SEQ ID NO: 147107 - DNA, 3882 bp, Enterobacter cloacae; identical to SEQ ID NO: 146941

SEQ ID NO: 147108 - DNA, 969 bp, Enterobacter cloacae
ttgaaggatcagatcacgcatcttcccgacaacgcagaccgttccgtggcaaagcaaaagttcaaaatcaccaactggcccacctacaataaagccctcatcaaccgtggctccataactttctggctggatgatgaagctattcaggcctggtatgagtcggcagcgccttcttcacgaggcagacctcagcgctattctgaccttgccatcacgactgtgctggtcattaaacgcgtattcaggctgaccctgcgcgctgcgcagggctttattgattccattttttctctgatgaacgttccgctacgctgcccggattacagctgtgtcagcaggcgggcaaagtcggttaatgtcagtttcaaaacgcccacccggggtgaaatcgcacacctggtaattgattccaccgggctgaaggtcttcggtgaaggcgagtggaaagtcaaaaagcatggccaggaacgccgccgtatctggcgtaagctgcatctcgccgttgacagtaaaacacatgaaatcatctgcgctgacctgtcgctgaacaacgttacggactcagaggccttccccgggttaatccggcaaacccaccggaaaatcaggtcagccgccgccgatggcgcttacgatacccggctatgtcacgatgaactgcggcataagaaaatcagcgcgcttatccctccccgaaaaggtgcgggttactggcccggtgaatatgcagaccgtaaccgtgcagtggctaatcagcgaatgaccgggagtaatgcgcggtggaaatggacaacagattacaaccgtcgctcgatagcggaaacggcgatgtaccgggtaaaacagctgttcgggggttcactgacgctgcgtgactacgatggtcaggttgcggaggctatggccctggtacgagcgctgaacaaaatgacgaaagcaggtatgcctgaaagcgtgcgtattgcctga

SEQ ID NO: 147109 - DNA, 141 bp, Enterobacter cloacae; identical to SEQ ID NO: 131154

SEQ ID NO: 147110 - DNA, 264 bp, Enterobacter cloacae
atgaaattccgccttggcggtttcgaagcaatcaagtccgcgtacatggcccaggtgcagtacagcatgtgggtgaccgggaaagaagcctggttctttgccaactacgatccgcgcatgaaacgcgaaggcattcaccacgtcgtcgttgagcgtgatccgcagtacatgtccgacttcaacgaaatggtgcctgagttcatcgagaaaatggacgaggcgctggcggagattggcttcaggttcggggaacagtggaaatga

SEQ ID NO: 147111 - DNA, 429 bp, Enterobacter cloacae
atgaaacgcacacccttctaccgcagacccggtcgaaccggacaattctcaggcctccgtgagcgcgttatctggatgattcagacgcggggccgtccggtaactggcagcgaaatcgcagagaagtttggcgtaacgctcatcgagttcaaccgggtcgccaacggcatcacccgcggttccgggcagatagcgcagatcgttgagtcgaagaaatggctcaacgatgacggcatctgcgaccgcgctttcgacctcgttacgaagccgaaggttgttacgccgcagggtaaatcgcggctgttcacccggcgcgccatagagcagtcacgggaaggccgacggcaggagtgcattgaacgtgccgcccggcgtcgccgcctcattgctcagggcctctacatcgacgaaatggagtccatcctatga

SEQ ID NO: 147112 - DNA, 153 bp, Enterobacter cloacae; identical to SEQ ID NO: 140502

SEQ ID NO: 147113 - DNA, 1803 bp, Enterobacter cloacae
atgagatacggaagcgtgtgcagcggcatcgaagctgccagtaaagcgtgggaacctctcggctggaaacctgcctggttctctgaaatcgaaccattcccttccgcagtcctcgcccatcactggccggaagtgacaaaccttggagacatgaccaaaattgccgaggcggtgcgcgctggtgatgtcgaagcgcctgatgttcttgtcggtggtacgccttgccaggcattcagcatcgccggcttacgtgaaggcctgtctgatgaccgcggccagttaaccctctcttacgtggaattagccaatgcaatcgacgcaaagcgccgcaaacgcggtgagccagaagcaatcatcgtctgggaaaacgtccccggcgtgctcagcagcaaagacaatgccttcgggtgctttctggcagggcttgccggagaaagcagtgagttgcagccatcagggggaaaatggacgcacgcaggttgtgtgtctggaccacaaagggttatcgcctggcgtgtccttgatgctcaatttttcggagtggcccaacgccgccgccgtgtgtttgttgtcgcaagtgctcgaaaaggattcgatcccgcagcggtactttttgagttcgacagcgtgcgccgggatactccgccgagccgaagcgcggggaaggcagttgccgcccttactgcgcgaggcgttggaacgtgtggcgcagacgacaaccaggctcaaacaggacatctgattgcccaatgcgcaaatggtgacgtcagccacaccctgaaagcagaaggctttgacggaagcgaggacggaacggggcgcggaacgccgattatcgctatggctcacgggcagggcggtgccgagattaaaacggacaattccgtgcctacgctcacctgcaaccacgaagcgcctatcgctgcttacggcattcctggcaactggataggccgcgcaccggagaacggaggcaacgcaacagaacctatgcatgatgttgcaccgtgcctcactgtcgccgaccggcatggagtcgcaatgagtatgtcagttcgccgcctaacaccgattgagtgcgagcgccttcagggctttcctgataatcacacactgatcggatggcgcggaaaggatgctgctgaatgcccggacgggccgcgttataaggccatcggcaatagcatggcggtaccggtaatgcgctggatcgcagagcgcattgcagcagctctgccaacagagaagctaaacggtgattacggcggaagtaaaacaccgctcgaccagcgcgatctctggcgcactccgcccgccctcttcgcttcccttgatgctgagttctgtttccagttggatgccgccgcagcgccgcttaacgcactgtgcaggaagttcattaccgccgagcagaacacgctggaaacgccgtgggctgattacatgagcattcccggctacatctggctgaacccgccatacagcgacatcatgccgtttattaaaaaggccgctgccgagagcgccaatcagatcggcacggtcatgctggttccggcagacacatcggttggctggttcaaggaagctatccagaccgccagcgaggttcgcttcatcaccgcagggcggctggcatttattaacccggtcaccggtaagccggtaagcggcaacaacaaagggtcgatgctcatcatctggcgaccgtacccgcgtacacaatgccacttcgcaactgtgggccgggacgagctgatggctttcggggcgaaacttctcgcccgccgggaggccgcatga

SEQ ID NO: 147114 - DNA, 264 bp, Enterobacter cloacae
atgaaattccgccttggcggttttgaggccattaagtccgagtacatggcccaggtgcagtacagcatgtgggtgaccggaaaagacgcttggttctttgccaactatgacccgcgcatgaagcgcgaaggtattcaccacgtcgtcgttgagcgggatccacagtacatgaccgatttcaacgaaatggttccggagttcatcgagaagatggacgaggcgctggcagagatcggcttcacgtttggcgagcaatggaggtaa

SEQ ID NO: 147115 - DNA, 471 bp, Enterobacter cloacae
ttgactgcctgcctcaagtcattgcgtgacggcgatgtgctggtggtctggaagctcgatcgcctcggacgatcgcttgcccatctggtcaacacggtgaaggagctgtcagaccgcaagatcggcctgcgggttctgactggaaagggcgctcagatcgacaccacgactgcgtccggtcgcatggtgttcggaatcttcgccaccttggccgagttcgagcgggatctgatccgagagcgcaccatggcgggtctcgcctccgcgagagcgcgcggtcgcaagggcggacgaaaattcgcgctcaccaaagctcaggtgcgtctcgcgcaagccgccatggcccagcgcgatacttcagtttccgatctctgcaaggaactcggcatcgagcgcgtcactctctaccgatatgtcggtcccaaaggcgagctcagagaccatggaaagcatgttctcggacttacgtag

SEQ ID NO: 147116 - DNA, 219 bp, Enterobacter cloacae
atgaacatcgtaaaatccggcttcagttgctgtcattggctgatttgtgttgcttttaccaatatcaaactgcgatttttgaagcatcgtgccttcaagaaaggggctgcaccaggggctctttacaacttctacaatcttcaccggctgaaagaagctcaattgccaacctatttccggtacgccgttctgatctgtgcagtagcaacccggacgtga

SEQ ID NO: 147117 - DNA, 789 bp, Enterobacter cloacae
atgaaaatgctaagtggcattaacatcccttttttcaaaaaatctaaaaaggatgaaaacggtgatcttgaacagtcatacgtaaagaaagatgaaagtgctaagggacgttttttggacattaaaaaacgatttagcccacaagctgaagcgtcaggtgctggaattacgtacagcgccctgattaatcgtgatacaaaacttatccgcattaatactgtttcaatagccgtcattgggttattggttgcaaagattctttttttcactgacccagtgacgattgttacccctccaaacatgaatgaagagatcacggttgttggtaacaaagcatcggaatcttataaaacacaatgggctctcttttttagtacccttttagggaatattaatccaactaatatttcctttgtgacggcctatgtcctcgatgccctttcacctgaactacaggctaaaacgagtgagtctttacaggagcagataaatatcatgcaggctcgtggtgttgagcagacctttaagcctaatgatatttactttgatccaaaaaatgacatggtctatgtctggggtaccaaaacgactcgacttgtaaatgttccggacaaaactgaatcatcgaaatggacttatgaatgggttctcgggatgaaaaatggtcgcccaagaattgcatatgtaaatcaatattccggaacaccgaatattaaaaaaattacgataaacggcaaagagcaactggcaacgctggataatccgccaccgtctacaggtaacaagtga

SEQ ID NO: 147118 - DNA, 237 bp, Enterobacter cloacae
atggtcaaagtaaagctgcagctgaaaaacaaattgaacggtatgcagctgaaagcggtgcatcatactttatttatcgttacccgaatgtttttggtaaatggtgcaagcctaattacaattcgttcgtggcaaccttctgccataatattgccaacaatatcgatattacgatcaacgattcttccgcgcctgttaatcttgtatatattgatgatgtttgtactgatgctataa

SEQ ID NO: 147119 - DNA, 219 bp, Enterobacter cloacae
atgtttttgagcatacaaaagcaactcaggcctcatttggatacaaccctgaaaaacagcaagcagctctggccacatgtaaaattgatatggcagtcgtcaataaatggagtacctgtgatctgccctctaagcctgatgctgatgttttccctacagattcaatgtacagctttcaggcgattcgccccgcaacaggaaccgaaattcctcagctaa

SEQ ID NO: 147120 - DNA, 834 bp, Enterobacter cloacae
atgtttgttccttttctcattatgttacgtgaaggccttgaagcggccctgattgttagccttatcgccagttatctgaagcgtacccagcgcggacgctggattggcgtcatgtgggttggggttttccttgctgcggcgctctgcctgggcctcggtatcctcatcaacgaaaccaccggggagttcccgcagaaagagcaggagctgtttgaagggatcgtcgccgtgattgcggtggtgatcctcacctggatggtgttctggatgcgcaaggtctcccgtaacgtgaaggtacagcttgagcaggcggtggataacgccctgcaaaaaggcaaccaccacggctgggcgctgatcatgatggtctttttcgccgtggcgcgtgaaggcctggagtctgtgttcttcctgctcgcggcttttcagcaggacgtgggcatctggccgccgctgggcgcggtgctcgggctggccacggcggttgtgcttggcttcctgctctactggggcggcattcgtcttaacctgggcgcgttcttcaagtggaccagcctgtttattctgctggtggccgcagggctggcggcaggggcgatccgcgccttccacgaagcgggtctgtggaaccacttccaggacgtggcgttcgatctcagcaacgtcctgtcgacccattcactgaccggtaccctgctcgaagggatcttcggctaccaggaaacgccgagcgtcagcgaagtggcgatgtactttatctatctggttccggcgctgatcctgttcgctatgccgccgcgtaccggctcgcagacgtcgcgcgtagcgccgtaa

SEQ ID NO: 147121 - DNA, 513 bp, Enterobacter cloacae
atggctgtgatcgttattaccggcggtacggcgggcgtggggaaagccacggcgctgcactttgccaaagcgggctacgatgtgggcatcattgcccgcgacgagcagagcctgcgctccacagaagaggagttgcgccgttttgggatcaacgcccgtgccgttcaggccgacgtggccgacagcaaggcggtgaccgatgctgctaacgagattgaataccggcttggggccatcgatgtctgggtgaataacgctatgggcgggatgctggcgccgtttcgcaccatgtccccggaggagtttcgccgcgtcaccgaggtgacctatctgggctatgttaacggcacccgcgccgcgctggagttaatgacccccacgcgatcgcggaacgattattcaggttggctccgcgctggcctaccgttccattcccttgcagtcagcctactgcggggcgaaagccgcaatccgcggatttaccgatgccgtgcgcaccgaactgatgcatga

SEQ ID NO: 147122 - DNA, 990 bp, Enterobacter cloacae
atgaaaattctttctaacactactacaccaactattgcgaatgtgtattcggatatccttgatgctaaaataattctccagccatcatttcaacgaaaattcgtatggtctatttcacatcaagaggaatttattgataccattttgaatggatatcctttccctgaggtttatgtttgtaacggagaaactaatacttcgacatttaaaagtaatgtcttggttatcgatggtcagcaaaggcttacgacaatcaaaaattacattgagggacaaacaagcaaactttttaagaaaactcctccatatgaagaattatctgaggataataaaaaagaatttctttcctatacagtcgtggttagaaatattggtaatgttgaagaagatgttgtaagagaggtttttcgaaggataaatctaactaaatttagcttagatactatcgaaatacataatgctatatatgatggttgttttattcaaacggcaaaagaaattctagaaaaagtagatatgcactcctatggtgtattaaaatcatcagaattcaatcgtatggcagacttgcattttatcctgttaattatgtcgaccattgaaaatggtgggtattttgctcaggataaagaaatggaagaatatatatctaagtttaatgatgaatatcctaatgcagagtcgattaaaaatagcatgcttggtgcattcgatattattactaaaatgaaattgccacaagattccatgtggtttaggaagtctaatttctttacattgataactgaaactacaaaagcaataatagaaaaacaattgccagccaaaagcgtcttgaaaagaaaattattgaaatttaataaggatttatatcttttaaaggatactaaagaaccatacaaagaatactatgctcatatgtatcaaggaacacataatcgaactgctagggttcgtcgcggtgaaattttcctgcaacactgtctttag

SEQ ID NO: 147123 - DNA, 639 bp, Enterobacter cloacae
atgttaaatatggagtggaaaaacgggataaaaacattttatactgaattgtcttttttgaattctgatgaggattatttagatttttgtcgaaaaaaaatcttacacggcacgccttttgtatttcttaataaagaggatgaatattactcatttagaaagaaaatagcttctgaatttaaagcatcatatcatggtgtaaatattacagggtcgggtaaacttggtttttcatattttaaagttcgagcttttagccttgattcagatattgatgttgcgataatttcgccagattcttttgattatattatggggtttatctatgattttcaaatgaaattgaaagttaatagaataaatgtttcggctgcagaacttaaatcctaccattcatttttggaatatacagcccttggttggattcggcctgatttattaccgaaaatattcaacactaaagagcttcgcaatggatggtttgattttttcaacggattatcatataacaaaagcgaagtggggaattataaagttgcagcaggtatatttcgcagttatgagcaccttgaaaaatatacagttaatagcttacagaatagttttagaaaaaataatgacagagtcagcaaattatag

SEQ ID NO: 147124 - DNA, 270 bp, Enterobacter cloacae
gtggaagatatactttttgtgatgagctggattaaggatcatcatgtgatgtcattaacttttggagtcttatctgcaattttatggattaaatctgccacagcaaaagttgagctaggcaaaaaaattgtcatggtcacatatgaagatcccgaacttaatgtaaacctccatgatttcttcgctactgcgcggcttcaatctaagtacaattcatttgcggcattgtctgcggctgcaacagcgctatcccagattcttggtttgtaa

SEQ ID NO: 147125 - DNA, 174 bp, Enterobacter cloacae
atgacgtggatatccgttagcgtccggttgccgcgctcgttcacccgcgtctgggtgatgaccgacaccgggagggagactaccggctacgtaaaatcggatggtgaatggcatatcaactgcgcgcgcatccgggcgactggcacgaaggtgctgcgctggaaggagggctga

SEQ ID NO: 147126 - DNA, 1353 bp, Enterobacter cloacae
gtgaagctatccagcatccacgttaaatccctcgccatcaacgcctccaacatctcaacgaccaccatcaacggccaggaacactacgtcattcgtggtgcggtcccgatcgttgatgacatcgtcatgaatggggggctctatccggctgaggagattaacaacagctaccagacgatggaaggcaagctgatgcctctcccgcacccgatggtagatggcaagtatgtcagcgctaatgacccgcgtgccattaacacctatcacgtcggggcctgggcgcagaacgtcagcaaatccggcgaccaggtcgttatggacgtttacatcaacaaggctgtcgctgaaacaaagcctgatggcaagcgcctgattaaccgcctcgatgagatgatcgccggtaccaataccgacccgatccacctctctacgggcctgctaaccaacaaagagaaaaagaccggggagtcgaaggggaagaaacactcctggattgcccgaaacatgaaattcgatcacatcgccatcctgctggacgagccgggagccggaacgccggaagagggtgttggcttgttcgtgaacgcagacgggcaggaaggagaggttgaaaccgccagccttatcgacgcggctaacagcctcaaagacggcctgctgaataaggtgaagttcttcctcacccacaactccgaggcctcattcgacgaaatctaccagatgctgcgtgaggctatccgtgcgccctcaggcagtgatgtctatcgctacgtcgtgacagtctggccggacaaattcatctacgaagagggcaacaaactcttccagcagaaatacctcatcgatgacaacgctgtggcgctggtcggtgagccactcgaagtcgtgcgcaaaccaactgagtacgaagtcaaaaccaacggagaagaaaacccgatgaaagagaagatgatcgccgcgctcaatgccgcaggcgtaacaaccgaggggctgaccgacgatcaggtctgggatgcctacaaccagcagatgcagaagaaagacggcggcggccagcctcagattaattctgacgccatcaccgccgctgtgaacgctgccattactcctctgaccgagaaaatcggccacctggaaacgcagcttcaggcgaacgctgaaaaagacctcaaaaccaagcgtgatgcggttaaagctcagttctcgttcatgagtgaagcggcggttaactcgctttctggcgatgcgctgaacgacctttactcgcagtgccagaccagcaccgggcttaaccctgtattccagggtaatagcgcacaaagcgaaattcttaccatggaggcacctgaataa

SEQ ID NO: 147127 - DNA, 177 bp, Enterobacter cloacae
atgcaaacaaaatttaaagatattcgctacgacaggattccgcctcttacgaaagctaagaaccgtgcgcacattgcttttctgactgtaaacggcgataccgaatcagcactgttggctgaattgaaaaagcgacaccccaaagaaggtatagagctggttagctacaaaaaataa

SEQ ID NO: 147128 - DNA, 336 bp, Enterobacter cloacae
atgtccactgagtcactattaagcacattgatcaaatatgatcgttttcatggcgccaatcagatggtgccggggatagctcaactcgccgttgataaaggttatgaaaatctcagcgggaagcaaaagctcgtgcttgaaccgtatttaacgcatgcttgtgatggcgtaacggatccaggggagcatcataataactgtcaaaatattcttgaaggtgatgaacttgagagcgccattcagaatgacatgcattacggcggtttactttgtccttcctgtgtagatgaaaaggaagattaccgacgccgttgggaagacatgcaaagcgagtag

SEQ ID NO: 147129 - DNA, 198 bp, Enterobacter cloacae
atgaaaacaatgataggacctatcaacttcactcttgacatgaaagagcaagtagcacgttcacgcgaggttcttgaagagttgcagcgtagggttagcgagctaagtccgtgcatatcagaagaagaagcgctacgcattctccttctcgacatgacctttgattatctgaaggctaagaaatcagaagtgtgttga

SEQ ID NO: 147130 - DNA, 366 bp, Enterobacter cloacae
atgagcaacatcgacaaacaggcgctgcgtattcctgagcgaaaaaaacataactggtcccaagcggtaatgcgagattgcgacttctgccagcaatgggctctgactgttcggcactccgacggcgggtctacatgcgccagttgctgcgattcagaatatacaactgcactttacagcgctcttgtggtggcgctggatgagctggaagccgcagagaagcgtaacaaacgcgcattggcactcttgaacgataccaacactgaaaacatctgggaaatcattggtcgcctgaaggttgttattagtggcgattatcgcagtgaagatgaaatcgccgcagccggtaaaggggaggaatcatga

SEQ ID NO: 147131 - DNA, 345 bp, Enterobacter cloacae
atgaccataacaattcgtgggcaaattcttgcagccatgcgtaataacccaggcctgaacagtgctcgtattgccagcatgatcggcatgaccaccaaaaagatttccggcccgttaagcacgttgtttgcagacggcctgatcgagttcgaaggtaagcatggccagcggctttatcggctgaccagctacggcatgaaatacgcaccggaaaccatacctgccatgccgaaggggaattcgaagctggtacagcgtacagagacgaacgtgatctgtcaggagtgccgcaacagcgcggctatgaagagagtattgatggtttgggggagggtaggggtatga

SEQ ID NO: 147132 - DNA, 1428 bp, Enterobacter cloacae
atgacctctgatttcctgaccgttcctcacagcctcgaagcagagcagagcgtattgggtggcatcatgctggataccgggagtgaccgctgccagaaagctatggcaatgttgaagccggagtcgttctatctgcgatctcaccaggtaattttcgctgagatgcgcgagctcgttgctaagcagcaaccggttgacctgatcactctgactgaatcactggaagccaaagacctggccgagacagcaggcggttttgcctacatggccgagctttcgaagaacactccgagcgcagcgaatatcgttcactacgccatggtggttcgcgagaaggccatggagcgctatggcatcgacatgaccaccaaggcaaccgaactgctgtatgcgcgcaacgggatgtctaccgctgacaagttcgaagccattcagagcctgttcacggagatcagcgattacgcgcgaaccggcaaaaagacaggtctccgttcattccatgacgcggtagctgactggactgaagaattcgacgaacgctgcaagccgaacggtcgtagtcgtgggctgtcttccgggctgccatcccttgacgatttgctgggcgtgaagcgcatcgtgcgaggaagtcttttcgtcatcggcgcgcgtccaaagatggggaaaaccacgctgtacacgcagatggccgttaactgcgccaccgtggagaacgagcctgcattgatgttttcgctggaaatgccagaagggcagatggtcgagaagatcacagcccagcagagccgcctgacgccaaacctgttctacccggacatgaccaaagaagatttcggttaccgcggcgactgggacgctgatctgcgaaaagcgacaggggtaatgagtgctctgattgataccaataacctgatgatcgacgacacaccaggcattgggctgtctcacatcgttgctgaagctcgccggattaagcgcgaacgcggaaaggttggcatggtgctggtcgactacctgacactgatgaccgccgataaagctgagcgtaacgacctggcctacgggctgataaccaagggcctgaagatgctcgccaaggagctggactgcgttgtcgtgctgctgacccagcttaaccgagatctggagaagcgcaccaacaaacgcccgctgccgagcgattcccgcgataccgggcagatcgaacaggattgcgattactggctggccatctaccgcgaaggtgcctacgacgaaaccgccaaccagagcgaaacagagctgctgctgcgccttaaccgtcatggcgaaaccggtgtcgtgtactgccagcagcgccacggcgcgatttatgactgcgaccaggaagctgccagtcagcgacgtcgcgagaaagaagcaaaacctgcacagcgaggtggattctga

SEQ ID NO: 147133 - DNA, 297 bp, Enterobacter cloacae
atgaaaaaattcttatgggcagtattatttctgacacctctggcggccaatgcggaagagtcggctctcgatcagctaaagcaatcaccagctgcaatctgtaaagaccacgcacagccagatcagtgcaaggtagcagtccaggctacgatgctggcggtttacaacatcacttcgcttgatgctggatgcgagagtagttctgacgaagttaaagcaaaaatgaacaatgagctgaaagcgcagtgcgcggcagccaaggaaatatccgactacctgaaaagtcagaatcgataa

SEQ ID NO: 147134 - DNA, 2493 bp, Enterobacter cloacae
atgagcagcaatcccccgctgagattcagccacagccatcacctgctgtcggtgaagggatgtgacgcagaacccgatgtgctggcgtttgagggtgatgaagccctgagcacacccttcagctaccgtactgaattcaccagcacggaccatgccatcagcaaagagatgatgctgatgaaagcggcttccctgacgcttcaggccccggttgaccagggttacggcatcaaaatacagcagccggtgcgggtgattcagggcgtggtcacgggttttgaacgtctgggtacctcaaaggatgaaacccgttacgcagtgacgcttgagccgcgtctggccctgctcagccgctcgcaccagaacgccgtctaccaggacatgtccgtcccgcagattgtggagaaaatcctgcgcgagcgccacggcatgcgcggccaggacttcctgttctcactctcaaaagagtacccgcgccgcgagcaggtgatgcagtacgctgaggacgacctgcactttatcacccgcctgctgggcgaggtcggtatctggttccgcttcaccaccgacacgcgcctcaacattgacgtggtggagttttacgacagccagcagggatatgagaaaggcgtgacgctgccgtcggtgccgccgtcagggcagcactcgcagggtgtggactcggtgtgggaaagggagagccaccataatgtggtgcagaaggcggtcagcacccgcgactacaactaccgtcaggccacgcaggacatgaacaccctggttgatgcgacccgcggggatgccaccacgtacggagatgcctatcactgggcggataactacctgacggcgggaacgtcccatgaccgcaatccggccgcggagtccggggcgttctatgcccgcatccggcacgaacgttacctgaatggccagacgcagaccgttgccttcaccagttgtccggtgatctctccgggtatgctgctgaaagtcaccggcgggtacgaagtggcagacgtgtttgcgcagggcgtggttgtcacggcgatgcacagccatgcgcagcgtgatgaggactttggcgtcaggtttgacggtatcccggacagcccggatttcagtttccgccctgagcctggttcacgtccggtgatggcaggtaccttaccggcccgcgtcaccagtacaaccgaaaatgacacctacgggcatatcgataaggacggccgctaccgcgtcaatatgctgtttgaccgtgagaactgggagaccgggttcgagagcctgtgggtccgtcagtcccgcccgtatgcgggtgacacctacggcctgcacctgccgctgctggcaggcaccgaggtggcgattggctttgagggcggcaacccggaccggccgtacattgccggtgtgctgcacgactcggcgcacggcgaccacgtcaccatccgcaactacagacgcaacgtgctgcgcacgccggcaaacaacaaaatccgcctcgacgacgagcgcgggaaagagcatatcaaggtcagcacggagtacggcggcaagagccagctgaatctcggccatctggtcgacagcgaaaaacagcagcgcggcgaggggtttgagctcagaaccgacagctggggcgccatccgggcgcagaaagggatttttatcagtgctgacggccaggcgaaggcgcagggccaggtgctggatatggagcctgcactcgcacggctttcagcagcattagtggaaatggaatcccttgctgcctgcgcacagcaggctcaggctctggctgccgatgttggccgtcagcaaaaactcctgaagcagaaaattgaacaactgcatgaagaggtgattctgggcagtgcgccaaaaggcatggcactggtgagcggcgaagatatgcagctatcagccagtgataatatgacactgacagcgggtaaacagctggatgttggtgcgcagaatgattttacgctggcggccggtaagcaactcagcctttacagccgtgaaggggcaaaactgttcagctcgcaaaacgacattgatattcaggcgcagggcggaaacatcaccacgtggtccacgcaggatacgcatgtttcaagcggcaggaaaatggtcattacggcacaggacgagctgacgctgatttgtggtggtggctacatcaaaatcagcggtgggaatgttgagattggtggtccgggtaaactgctgattaagaacacgggcatcaggaaagcgggcacgggcagtatgcagggggtgatgaagtcgtttgaaccttctacgtttgatgagaaatttgtcatcagaaatgcattaacccaagagccgcttccaggaaaagcctataaaataactatgccaaacgggtcagttgtcaatggtataacagacgcgcagggggcaacgacgcttaattcttcggatttgatagatgatatgataataacacttgctggtcgttaa

SEQ ID NO: 147135 - DNA, 1530 bp, Enterobacter cloacae
atgaaaaaattaaattccgtttctgatgcagttattcaacttagactaaatgccgtaaaggcaagtatacaacaagtaaaccctgatgcgtttatcactcactgcctcaattataatcttcagaattttaaagaccaattagaaatgctgcaacatttaccttgggtagtgaatttatgtataaaatggtccgctattgcaattgaaaaaaaacgccactttaagccaattgatggcccgggaacgataagattattacaaagggcatatgaacaattaagcataataccaacagggttagagaacattgataagggtattgatttctttctccgaaacacattgtatcaacagggaatttaccaacgactggatgctttaaatacagttagtcggcaggcttttcttttctcctcactagaagagaataatagaatcaaacgtcgatttaaagagttaaccaaggtggatataaacgactttttaaagttatcttttgttctaatatctatgattaccactcaagcgccagtacgaaaaataggcgtaaacacttttgcaattctcttcccattaatatcgagagaaattatagagaatttcctcaacacaatatcttgttcttataaaaacctttcaaccttttgccgtagtagaagtgacgaaacgccgctaatcgaatatttctctccttcaccattcttagaaaaaccattcataagctccaaaaacgaatattatcagatacacactcaactaacatccactagcctacaaactttcatttatgatttacttagaagagatgacgctgaatcattcatggataacttcggtagtgtttttgaagatgcagtaaatcaacttctagaagaaagtggtattagctatatcgcagaagatgaactaaaaaaattccttcctcaggaaaacaaagttgttgacttcctcataaaacatacagacgcaaacatttttattgatgcaaaaggtgtagaaatacatcaaaaaggaatggttacactgcgaccaggagacatatcaggaaaaattaagagctcagtattaaaaactatagagcaagctcattctgtaaatcgggaattaataaaaaatgaaagccaagatgtaccatttaaaaaagagtcttacattttatgtcttacttataaaaacttattccttgggaatggtaccttccttaataaatcatttgcaagtttggagatgagaaaaattcgtgataggcatagcgaagaataccaaatacctgatgaacatatattttgtatatcgtttgaagaattcgagtatctattgtcatcttgtaaggaatacaataaaccagtacatgaggtgcttcgagaagctgtggttagaaacaaatcaccgtcaagtgcagtatttcttttcgcacatcatatacgtgacacgttcccgaagacacgttcatctgaaatcgtgaaccaggctggcctaaaccaacttgaccagatgattgaaaccttaaagcaaactattccctcctag

SEQ ID NO: 147136 - DNA, 531 bp, Enterobacter cloacae
atggctaatactaactgcattactgtacttactgctcgtggcattactgagattcttagcacaggaggaagtcaagcatggagacttgacgccagccatgctgctaaatacgaatatttagtttgtgtacaaaattcgaaaaaagactggggatcacaagaagcaaaacatcaccatgcattcatggtcggtcgtatctcgggaatcagcagggctcccgaaaatcctcaccgctggatcataaatatcagttcttatgctgaaattgacatcccagagcaatgggatggtaaccgaaaccccgtttcttatcgcaacctcaaagatattggcatcgagacgaataaactggaattcaaagctgttccaaaattcgctccagcgaatttgaatgtcgaacaagcgggtgatgagtacgaagatgaagaagaaaatgttgttaagccgttaacacttaaagaggcaaaagctgggctagccttatattttggagtcaatgaagaaaacatccaaatcaccatacaaggctaa

SEQ ID NO: 147137 - DNA, 1065 bp, Enterobacter cloacae
atggcagagaacggccctattgaagatttggcgaaacgcatatctgaggatctactaagtcgatttaagtggcagcagcatggcccctgcgaccgagatttcctttgtgatgatgaggctaaacataagcctgaaggaaagaagcagaagcacacgcatcctgtagatgttgtatttagttataaagacccatatttaaacaaagtcatttatttaaatactgacttaaaaagttataaagcaggttcaataaatgcgtcaaaaatagaatctgcattggagtcattagcaaaaactattgaatgtgctcgctatagccctgagtggtcagaaaaatataatttttctcaaattgactgtgaagttcgcggtttattgtttgtttttaatcatgataatcagctgcaacatgatttttatgagttttttaatcctcctaaacccgccaaaggaagaagagataaggctgttaatttagaaaagattcctttatccgcaggtcagcaaattcatataatcgatccgtttctgattaattatatgttagcaataacgaatgatatgaatgatttgattgctaagaaagagtttccggatgaagaatatggattctactaccctcaattgacttttcataaggttgctgtgactgaaaaatatcttccagctactatagaagtcttgtcatcacctttcatgattatcaaacatggtgctgtttataaatttaacagagctaaaggtattgaggaggaagtttatccagaagggtttgttgtctattacaacaagaaaggtaatagcgacaatgaattcttttatctgttagatattttgtcaaattatcaaatacttgatggaataaataaaataaggataaggctggcatatcgagaaaaagatgagaggattctctcgcactttcaaaggggagttgaaaaatatgcgcatgaatatggattagatgaagaagctaaaaagaggcttgaagatttagacgttaaagttgtgtctacagtaaaagaattcttttctgcagaagttatttcttgggagccgaaatga

SEQ ID NO: 147138 - DNA, 1065 bp, Enterobacter cloacae
atgaaaaatattcacagcgtaactgataaagctttgtatgatgctttaaaccaaaagcagattaccctaaatgaaattcaagaccttttcttagagagaggaacgatcatatgtaaaaaaactcctcgaaaagaattggcaagaaactattctcgaatgactcatgattattacgagcatcaaaaaattgcaaccctgttaggtggtcaggcaaggaccgaaaaaattacatgtgtaagaattgagactggtatagataagaaaggtattatagacgcggcagaaaaacttaagaaagaaattaccgagcaggatgattattgtaaaataatcgtggatggaccgcgagttctgattaatattaggtatctttcaactaattatggcaaaagtgatttcaaacaagctattaataaagaagcgttaattgaaattgagcctcttgcagatggttacagtctccgccgtccagataatgaaaaccttgaagattatgagggacttttactgggacacatcagcgctattcagaacgagcaagcggatgatagtaaccttgatttaaaattaaacgaaatttctctctctcacaatacatctgctgatgttagaactttattcttcgataaattaatacgtacacttgatggctatgagttactggatgttacagacgcttatgtatatcaccctaagcctgaaactatagaggctgaagatggaaacaccgaaactggagtgcacgtatcgaaagcatcacttaagggggagggggtacttaaatctgatgaattaagcgatctttatgatagagggttctatatctggaaaataaaatggaaggtcaaggagaaattggcagatccagatatatttgagcttgaggcccaatttggtgatcctctcaattgtactaatttctcatatttagttaagggggttaggaaatataaggcaaacggacaatatttcagtaagccgcaaaaactctctggtagagaagctgtgcgattcaataaattaattgaaaatagagcttattctattataatggaaatcagctaa

SEQ ID NO: 147139 - DNA, 1854 bp, Enterobacter cloacae
atggtggagcagtacgggcgcgttcgtcgtttcctgccccatctgctgaataccgttaaattttcatccgcacctgccggggttaccactctgaatgcctgtgactacctcagccgggagttcagctcacggcggcagttttttgacgacgcaccaacggaaatcatcagtcagtcatggaaacggctggtgattaacaaggaaaaacatatcacccgaaggggatacacgctctgctttctcagtaaactgcaggatagtctgagacggagggatgtctacgttaccggcagtaaccggtggggagatcctcgtgcaagattactacagggtgctgactggcaggcaaatcggattaaggtttatcgttctttggggcacccgacagacccgcaggaagcaataaaatctctgggccatcagcttgatagtcgttacagacaggttgctgcacgtcttggcgaaaatgaggctgtcgaactcgatgtttctggcccgaagccccggttgacaatttctcccctcgccagtcttgatgagccggacagtctgaaacgactgagcaaaatgatcagtgatctgctccctccggtggatttaacggagttgctgctcgaaattaacgcccataccggatttgctgatgagtttttccatgccagtgaagccagtgccagagttgatgatctgcccgtcagcatcagcgccgtgctgatggctgaagcctgcaatatcggtctggaaccactgatcagatcaaatgttcctgcactgacccgacaccggctgaactggacaaaagcgaactatctgcgggctgaaactatcaccagcgctaatgccagactggttgattttcaggcaacgctgccactggcacagatatggggtggaggagaagtggcatctgcagatggaatgcgctttgttacgccagtcagaacaatcaatgccggaccgaaccgcaaatactttggtaataacagagggatcacctggtacaactttgtgtccgatcagtattccggctttcatggcatcgttataccggggacgctgagggactctatctttgtgctggaaggccttctggaacaggagaccgggctgaatccaaccgaaattatgaccgatacggcaggtgccagcgatcttgtctttggccttttctggctgctgggataccagttttctccacgcctggctgatgccggtgcttcggttttctggcgaatggaccatgatgccgactatggcgtgctgaatgatattgccagagggcaatcagatccccgaaaaatagtccttcagtgggacgaaatgatccggaccgcaggctccctgaagctgggcaaagtacaggcctcagtgctggtccgttcattgctgaaaagtgaacgtccctccggactgactcaggcaatcattgaagtggggcgcatcaacaaaacgctgtatctgcttaattatattgatgatgaagattaccgccggcgcattctgacccagcttaatcggggagaaagccgtcatgcagttgccagagccatctgtcacggtcaaaaaggtgagataagaaaacgatataccgacggtcaggaagatcagttgggagctctggggctggtcactaacgccgtcgtgttatggaacactatttatatgcaggcagctctggatcatctccgggcgcagggtgaaacactgaatgatgaagatatcgcacgcctctccccgctttgccacggacatatcaatatgctcggccattattccttcacgctggcagaactggtgaccaaaggtcatctgagaccattaaaagaggcgtcagaggcagaaaacgttgcttaa

SEQ ID NO: 147140 - DNA, 690 bp, Enterobacter cloacae
atgagcgaaaaatcgagaattacattcgccagcgttaatcaggcgaagctgccatttaatttagtgctacaggggaacgaaggaacgcctgccggaaccatcaaaatcgacaaggagcttgtgacgttcgaaggtaactttgatgaatcggcgcaggtttttatcgaacatctggcacgccgttggagccagcagtggagagaccttgagaaacgcgccaatgagttcgaccggttcatggacgcaatggacacagcaaaagaggctctgtctgtcggcactccgttagatctggagtcgcttttcaaaggagaaatggcctctgcgatgtttgccaccatgttcgcaggtgagttcgtccgcagcggcgctagaaactacctggagctggggtacaacgttcctgaaatgggcgagtttaccgtcaccatccagcgcaaagagggcaagacgccaggcgaacgtatcgctgaacttgaggccgttgttgatcagcgtaacggcgagtgtgttcgtttgatcaacgaacgtgatgcgctgcgcgaagagcagctaaacaaaggctcgaacacacgcgcggccgcagacatctactttcagttagttgaggaatgccagatcccaccaggcggctctttggttgagtatgtccgcgaattgcaggataaagcagagaggtgcgcggcatga

SEQ ID NO: 147141 - DNA, 747 bp, Enterobacter cloacae
atgtccaatacccatgtaaaaaacatcaaacttggcgcctgcaaagtgtcgtttggtggcgttgatctgggttacaccaaaggcggtgttcaggttgaagttgcgaccgaaactctgaaagtcaccgtagaccagctggggcagaccaccatctccgagctggtgcagggtcgtaatatcacgattaccgcgccgctggccgagtccgtgctgaagaacatggttgatttgatgcctggctctaccctgagcgaagactcaaacactgtgaccatcacttccgcgcagggcgtaaacctgatcgacgtggccaaagagctgatcctgacgccgcaggataccaccgactacgttctgaccatccccaaagcagcgaccgcgggcaacttcaccatgacctaccagtctgatgatgttcgcgttttctccgttcagttcactgcttatccggatgacaacggcacgctggggagaatgagcggcccaaagccggttgagtccgtcaagatcacgccggaatctccggaagtgaaggcgggcgaaaacgttcagctgacggctgaaatcactccagcagatgcaagcgataaatccggtgtctgggaatcggatgcccagggcacagcaaccgtcgaccagactggtctggttcatggtgtagctgaaggtacggcaaacattaccttcaccagcaccagtggtagcaaaaaagcgaccaaatccgtgacggttaatgcagccgaataa

SEQ ID NO: 147142 - DNA, 825 bp, Enterobacter cloacae
atggcgattggatcaggatgggtcggatcttccgcagtgaatgagacggggcaacggtggatgtcagctgccggtagagctgttcaggttagtcctcctttctggataaaaaccttggtaggcaagtccagagagcaggttattaatgtgtcagcgaacaacaactattcttggtctactttggtgagtcagatcaaatcattaggggtgaaggacaacgctttcagggtcaatatcaccggaaccattgtgtccagttcctccggtgcgccatgtctcaattttacaagcgagcttgccggctgcgcttatattttgcttgtgattaactcgggacaaatggtgctggggcgcggcggaaatggcggcggcggcggaaatggtgatgccaacatcggtaagcctggcggtcctgcaatcaccaatgccatcggaactaaacttcgcatacaaaataacggcattattggaggcggtggtggaggcggtggagctgtaggggctggtaataataaaccaacattttccggcggcggcggcgggcgaccatttggtaccggtggtacaaaaacctaccccagtggcggcggtggcaatggcagcaatgcttcgcttacggctccaggtgcagggaacacttccacaagccttggaacatctgttggcgggagagggggggacttgggttcagcaggtgctactgcttcgcattctggaggtgggaaaaatatcactccgtatgcaggtggggctggtggtgctgctgttaatggtaatgccccaacgtgggtgaccgtcggcactatttatggaactcgtgtttaa

SEQ ID NO: 147143 - DNA, 252 bp, Enterobacter cloacae; identical to SEQ ID NO: 86014

SEQ ID NO: 147144 - DNA, 207 bp, Enterobacter cloacae; identical to SEQ ID NO: 86013

SEQ ID NO: 147145 - DNA, 525 bp, Enterobacter cloacae; identical to SEQ ID NO: 86012

SEQ ID NO: 147146 - DNA, 270 bp, Enterobacter cloacae; identical to SEQ ID NO: 86011

SEQ ID NO: 147147 - DNA, 795 bp, Enterobacter cloacae
atgatattgtacaaatacgtcccagaagaaactttaaaactgttttttgatcatgacgcaaccagcttcaaatttactccagttggtcagttcaatgatcctttcgaaacctacggtgtatcgtttgcctctgaagatgaagactcgctagcgcatttgacgtttcgctcaaagatcaattcagacctagccagtctatgcttatcaagatcacctttagaagtgctaatgtggtctcactatgctcaacaccacagaggttatgttgttggcattgataccgaattagcagggtttcacgatgagaatctttgtttaatcactgcgaatgaagggggtattgattatctcgatgaacgagacaaatccagagtcatcatctccgataaaaactttaaaaacaaggatatagttaaaaaggtcttatttagaaaaagccaacattggaaatatgagaaagaagttcgaattgttattgaaagtgacaaattgatacctatcggtgatgatgaagaagataggttttatatatacaaggcgccaggcacaaatattattaaagagatattcataggaatcaacaatgaggattttgaacttacagcactcgaaaatgataatttaagaaatggcattttggataacaatattaaaatccaaaaatgttgtttcaagaggggaacttgggacttagataaaacggattatgatatgagtctgcttactgattggcctagcgctgatttcggtattcttgccggtgtgatatcagcattcgaaaaaaacgaaatttga

SEQ ID NO: 147148 - DNA, 549 bp, Enterobacter cloacae
gtgcctgtcattcagcagattgagcatcgtggggatgaccgtttctgctttgaactccggcacaccgacgaactccttaaccttcatctggtagccggttctgtcagtcctgatggtctcctgcttgccctcgataaactgctcacgccactcgtcgcggcgggaagctggcatgatcagcagaacgtttgtcatatccgtgaccttcttccagtactcggcccagatattctgtttcacccattcaaggtcgaccttgtccagccaggctctgttaaagcgtgtgcgctcgtcatccggccggtggttgagtcgcagcaggcggttaatcatgttgtggcgttcgtcgccataaacgaagtcgtgaacctgatgcatgaatgcgatctctttctcgcactcggccacaatttcgtggatgacgttcatttcctgccggtagtcgatatcagtgtttggggtgatagcgtcaatgatggaaagggctgtattcatgattgcaccattaaacaaattgttttcttgttggtgttattttcccaaagttga

SEQ ID NO: 147149 - DNA, 1101 bp, Enterobacter cloacae
atgcccactcgaaagaaaaaagaaaccaaaaacaatgtgttagacgacagtatagataattttgaagaagaatccctcgaactatacacaggcgatcttgttccaaacagcaacaatactgttcagcctatagcgttgatgaggcttggtttgttcgtgcccacgctaaagggaacaaagaacagcaagcggaacagacctaatgagatcgacgcctcaaaagaactggttcagctggaggttgctcgttcagaagggtattccgacatcaagataacaggtccacgcctggatatggatcacgattttaaaacgtgggtcggcgtcgtgcgctctctggccgagtacggggagccgagtggccgcgtcgagttgagcattaccaagttcgccaaattctgcggctatccgtcgtcgcagatccgcaagacgctgcgtgacaggctcaccaacagcctcctgaagatcatgcgcaccacgctctctttccagcgcacgtatgaagaaaagaacgtcgacggctcgaacaaaatctcgctcctgatggttcacctggtgaacagcgtcgattacaacgagcaaaaagactccatcatctttcacgcagagccgaagctggccgaactctatcgcttcgaccacaaagtgctgctccagctaaaagtcattaacaagctgccgcgcaaagagaccgcccaggcgctgtatacgttcatcgaaagtcttccagccaaaccggcaccagtatcgctggcaaggcttcgagccagactcaatttgagtagtcgtaacgtcagctcgcagaaccagaccatccgcaacggcttaaaaacgctggaggaattgggctatctcgaatacagcgagattaagcgtggccgctcgatttacattcagatccacagccgcaatcccaagctcaaagcctcttcggtcaaagaggaaatgcccgcgcttccggataagccggtcgagaacacgtcttctggtgtcgatgcaaaacaaaacctcgtgaacaaaatcaccgagttatcgcagaacctgacgcccgaaaacatcaagctgatcgagattctctccaacagcctgaaactcctttga

SEQ ID NO: 147150 - DNA, 564 bp, Enterobacter cloacae
atggcgctttataacttcactctgactctctcaggcgtaacctatgagaccgaaggattggaagatgcgctgtacgaaagcggctgtggcgatgcgattgtttgcgcatatggaaactccgtctatgttgagttcgaccgcgaagccgaatcgctggatgcagccattgcatcagcggtcgacaatatcgaatctgccggtatcggcgcgattgtagaatcagtcgactcggccttagttggcctgagcgatgtagctgaaatgacgggcatgtcccgacaagcaattaccatgcttaaagatgggcttcgtggtggtggcgacttcccttgccctatccagagaatccagggacagtccccgctgtgggattgggctgatgtggcgaactggcttgaagccaatggacgccttaaagaaaacgcagagctggcactcaatgctcgcgtattaagtaagtggaatttggcccttcgcaatagcgtctcaaaagactttgttgagattgaacatatcgcttcttcacttatcgcacgtcgacgtcatcacgccgaatgcgcatga

SEQ ID NO: 147151 - DNA, 195 bp, Enterobacter cloacae
atgggaatcggcccaccttgccaggcgccgctgtcgtgtgggaatcggcccaccttgccgggcgaggctgcgggcgccagcccggagaactttgatccggagatcgggcgtaaaattgcacgccagaacgcaattgccaaaatctggcccctggaaggctatcttctcaagcagcagctgcacggggtgaagtga

SEQ ID NO: 147152 - DNA, 1221 bp, Enterobacter cloacae
atgagcgagatgagttatctggaaaaattgctggatggggttgaggttgagtggaaatctcttggtgaggttgctgaaatttatggtggattaacaggaaagaccaaggctgattttgaaaaaggtaatgccaggtatatttcatacaaaaaaatttttggtagcttagatataaaaaatatgccaactgattatgtccatgttcgtgaagacgaacgacagcatgaagtcagatatggtgatattttatttaccggctcatccgaaatagctgaagaagcaggcatctcatgcgcagtcacatcacaatttgatgagcctgtatacctaaacagtttctcttttggtgttagatttaacaataaaattaaattaacccccgagttcttaaaataccttttcagaacaaacaagatgcgtaaagaaataagcaaaacggcgagtggcgtcacacgctttaacatttcaaaggctcgatttaaaaagattctaatccccattctctgtcctaacaaccctgaaaaatcccttgccatccagtctgaaatcgtgcggattctggataaatttaccgcccttaccgctgagcttaccgctgagcttaccgcacgtaaaaaacagtacaactactatcgtgaccagttgctgagttttgaggacggagaggttgagtgggtggttctagggaatcttgttgatattaatactggatcaaagccaccagaaatttatgagaaagcgacagactacgattacatcaatgcaggaacatccagatccggatatagcgatgaaagtaattgtgaaggagacaccgtaaccactccctctagaggccagggaggaattggttatgtcggatatcaaaaaaaaccattttggttaggtcctttgtgctataaatttcgagcaatagatgaagaacttcttgttaataagtaccttttttattttcttcaatcaagaaatgagcttctgttaagcttgaaaaaagaaggtggtgtgccagcgattaacaagtctgacctcgtaagattagaagtgcctgtaccaccactagtcaagcaacagaaaattgtagatgttctagacaatttttataccttaatcacatctataaccgaaggcctccctcgcgaaattgaactgcgccagaaacagtacgaatattaccgagatttgctgttcagtttccctaaacctgattccgtaacgaactga

SEQ ID NO: 147153 - DNA, 834 bp, Enterobacter cloacae
atgacgcagcagaccagaaccatcgccgaatccaataacttcatcgtgctggataaatacgtcacggaatgggaagcgagtgaccgctaccagagtgaatcggagttagagcatgaactgattcaggatttacgtaatcagggttatgagtttgtgcctgatttaacctctcagtcggcgatgctggccaatgtgcgggtgcagcttcaggcgctgaatcaggtggtatttagcgaaggggagtggcggcgctttactgagggttatctcgataaccccagtgatactcttatcgataaaacccgtaagattcatgataactacatttgtgatttcacttttgatgatggtcgtctggaaaacatctatctgatagataaaaagaacctgctgcgcaataaggtgcaggttatccagcaatttgaacagacgggaacgcatgcgaatcgctatgatgtaacaatactggtcaatggactaccactggtacaggttgaactgaagaagcgtggtgtggcgattagggaggcctttaaccagattcatcgctacagcaaagagagttttaatagcgaaaattcgttattcaaattccttcaggtgtttgtgatatctaacggaacggatacccgttactttgccaatacgactagacgggataaaaatagtttcgatttcaccatgaactgggcgcggtctgacaatacactgattaaagacctgagagactttacggccacgttcttccagaaacataccctgctgaatatcctgtttaattactccgtatttgatacggggtctgacgctcagtggaacgaaaactcacgttaa

SEQ ID NO: 147154 - DNA, 324 bp, Enterobacter cloacae
atgaatactgataactattttttcagagtcccggccacacgcggaatacagggcggcatagaacaatacatgctgacggttcctatggtcgtgttacgtcgtattcttgcaatggacaatgatggcgatgttatggatcgcagccagcgagaagcgaacaaaacgcgggccaaaaaaatacggaattatgttgccggcgcaacatcaaaacgagctccctatattttgccgtcaattaccggaaatattgatagtcatgttgaattccttcccagcgaactctcgccggcagtggggattctggtaatgactccaacttattga

SEQ ID NO: 147155 - DNA, 546 bp, Enterobacter cloacae; identical to SEQ ID NO: 95960

SEQ ID NO: 147156 - DNA, 159 bp, Enterobacter cloacae; identical to SEQ ID NO: 95958

SEQ ID NO: 147157 - DNA, 1452 bp, Enterobacter cloacae
atgcgcgatctgctgggcagaaacgacaagacgggtagcagcggcgcattgcatatcgccgtcatcggcagcggcggggccgcgatggcagcggcgctgaaggccgtcgagcaaggcgcacgtgtcacgctgatcgagcgcggcaccatcggcggcacctgcgtcaatgtcggttgtgtgccgtccaagatcatgatccgcgccgcccatatcgcccatctgcgccgggaaagcccgttcgatggcggcatcgccgctaccacgccgaccatccagcgcacggcgctgctggcccagcagcaggcccgcgtcgatgaactgcgccacgccaagtacgaaggcatcttggagggcaatccggcgatcactgtgctgcacggctccgcccgctttaaggacaatcgcaacctgatcgtgcaactcaacgacggcggcgagcgcgtggtggcattcgaccgctgcctgatcgccaccggcgcgagcccggccgtgccgccgattcccggcctgaaagacactccgtactggacttccactgaagcgctggtcagcgagacgattcctaagcgcctggccgtgattggctcatcagtggtggcgctggagctggcgcaggcgttcgcccgactcggagcgaaggtgacgatcctggctcgcagcacgctgttcttccgcgaagacccagctataggcgaagccgtcacggccgcattccgcatggagggcatcgaggtgagggaacacacccaggccagccaggtcgcgtatatcaatggtgaaggggacggcgaattcgtgctcaccacggcgcacggcgaactgcgcgccgacaagctgctggtcgccaccggccgcgcgcccaacacacgcaagctggcactggatgcgacgggcgtcacgctcaccccgcaaggcgctatcgtcatcgaccccggcatgcgtacaagcgtggaacacatctacgccgcaggcgactgcaccgaccagccgcagttcgtctatgtggcggcagcggccggcactcgcgccgcgatcaacatgaccggcggtgacgcggccctgaacctgaccgcgatgccggccgtggtgttcaccgacccgcaagtggcgaccgtaggctacagcgaggcggaagcgcaccatgacggcatcaaaactgatagtcgcacgctaacgctggacaacgtgccgcgcgcgctcgccaacttcgacacgcgcggcttcatcaaactggtggttgaagaaggcagcggacgactgatcggcgtgcaggcagtggccccggaagcgggcgaactgatccagacggccgcactggcgattcgcaaccggatgacggtgcaggaactggccgaccagttgttcccctacctgacgatggtcgaagggttgaagctcgcggcgcagaccttcaacaaggatgtgaagcagctttcctgctgcgccgggtga

SEQ ID NO: 147158 - DNA, 318 bp, Enterobacter cloacae
atggcctggatatacctgatcctcgctggactctttgagattggctggcccgtcggactgaagatggcgcaggtaccggaaacccgatggagtggtgttggcattgcggtcgcgtttatggccgtgagtggctttctgctatggctggctcagcggcacattcccatcggtactgcctacgctgtttggacgggcatcggtgcggctggcaccttcctcgtcggcgttctttactacggagatccaacatcagttgcgcggtactttggcgtggcgctcattgttgccggggtcatcacgctcaagctcgcgcactga

SEQ ID NO: 147159 - DNA, 318 bp, Enterobacter cloacae; identical to SEQ ID NO: 147158

SEQ ID NO: 147160 - DNA, 846 bp, Enterobacter cloacae; identical to SEQ ID NO: 63227

SEQ ID NO: 147161 - DNA, 1356 bp, Enterobacter cloacae
atgaacttgaattcacatagatcaccgtgttgtgatagtgatgaacagcgttcgactgtgaataatacctcgaatgaatataaccaaatagatcatgaccttatggcaaaggtactaagcaaccacaatattagcgcagcatggcaacatgttaagcgcaataaaggggctgcgggtattgataatatgagtattgaggaatttaatgacttcgctaagttacattggctgggtattaaacaacaattacttaacggcagttatcaacccttgccagtcaaacgcgtgatgatacctaaacctgatggcggtgagcgaatgcttgggatccctgctgttatcgacagagtgatccaacaagccattgctcaagtgatcagcccttactttgagcctcaattttcaccacatagttatggttatcgccctcataaaagagccagtcaagcagtgaaccatgttcagtcttgtgttaaacaaggttataaaacagcggttgatatcgacttgtctaagttctttgatgaagtagaccatgacatgctgatgaatcgtgttggccgtaaaatcaaagacaaagcactcatgcgcctactcggtaaatacttacgagcggggatcgcagagcgcgaaacaggtctgtggtttgagtcaaccaaaggagtccctcaaggtgggccattatcccctttgctttccaacatcttactcgatgaattagataagaagctaacctacaaacaccttaagtttgcacgttacgctgatgacataatcattttagtaaaaacgaaaagcgaaggattaataatccagcgggaaattactgcgttcatcactaagcgattaaagctcaaagtgaacgaatcgaaaagtcgagtgggtccagtatcaggctcaaaatttctcgggttcacattccgttacggtcaagtgcagatccacgaacaggcgctaaagaaattcaaagcaaatgtcagggaactcactaaccgcaactgggggatctcaatgaccctacaaattcataaactcacgcagtatttgcgcggctggggacactactacctgatagccaacgcttatcagctaacggtggatttagatcattggatccgacgtaggataagaatgtgctactggcggcaatggcgtaaacctcgcaccaaagtacgcagtttaatgaaattgggtgttagcgaacgactcgccatagcctgtggtatcaccagtaaaggcccttgtagaagctcaaaaacaaaaggtattaacattgcgctaggcaataactacttagcttcacaaggtttagtgtcattgagggatatttggatcaatattcattacgggagatga

SEQ ID NO: 147162 - DNA, 285 bp, Enterobacter cloacae; identical to SEQ ID NO: 70433

SEQ ID NO: 147163 - DNA, 2973 bp, Enterobacter cloacae; identical to SEQ ID NO: 56202

SEQ ID NO: 147164 - DNA, 1116 bp, Enterobacter cloacae
atgcccgttgattttttgaccactgagcaggttgagagttatggcaggttcactggcgaacccgatgaacttcagctggcgcgttattttcatcttgatgaagcggataaagaatttatcgggaaaagccggggtgatcacaatcgacttggtattgccctgcaaatcgggtgtgtgcgttttctgggcacttttcttactgacatgaatcatattccttccggcgtccggcattttaccgccagacagctcgggattcgtgatatcaccgttcttgcagaatacggtcagagggaaaatacccgccgtgagcatgcagcgctgatacgtcagcactatcagtatcgtgaatttgcctggccctggacatttcgccttacccgtcttttatatacccggagctggataagcaacgaacgtcctggcctgcttttcgacctggcgacagggtggcttatgcaacatcgtattattctccccggagccaccacgctgacccggttgatttcagaggtaagggaaaaggcgacgttgcgcctgtggaacaaactggcactgataccgtcagccgaacagcgttcacagctggagatgctgctggggccaactgattgcagccgcctgtctttactggaatcactgaaaaaaggccctgtgaccatcagtggtccggcgtttaatgaagcaattgaacgctggaaaactctgaacgattttggcctgcatgctgaaaacctgagtacactcccggctgtgcgcctgaaaaatctcgcacgttatgctggtatgacttcggtgttcaatattgccaggatgtcaccgcagaaaaggatggcggttctggttgcctttgtccttgcatgggaaacgctggcgctggatgatgcactggacgttctggacgccatgctggccgttatcatccgtgacgccagaaagattgggcagaaaaaacggctccgctcgctgaaggatctggataaatctgcattggcgctcgccagcgcatgttcgtacttgctgaaagaagaaacaccggacgaatcgattcgtgctgaggtgttcagctacatccctagggggtcgtctcagaattcggaaaataaagcacgctaa

SEQ ID NO: 147165 - DNA, 219 bp, Enterobacter cloacae
atggattacaacatatataccctgggtgatattgattttgtctggtcggcttttaccggtattgccctgatcttttctcaatatactggtgtaaaagagttcctgaccacggccgccgttgtagcaggtgtgagcctattctataaaacgtggctatggcttcaggctccgaccaaaaatgaattaccgtttttctcggtgatgctgccaacttactga

SEQ ID NO: 147166 - DNA, 657 bp, Enterobacter cloacae
atgaatttcgaaacgaaatatatatgggaatccctgccgctattattacaggggctgcagctgacaatattgatctctatggtcggtttggcgggcggctttatcatcggtctgctggcaggaatctgtcgtgcactgggaggcggtattgcgaaaacgttatcattaatttttgtcgaattgattcgcggtacgccaattatggtacaggtgatgtttatctattttgccttgccaatgattctgcctgttcgtatcgaccctatcacggccgcgatggtcaccattattattaactccggcgcgtatattgcggaaattacgcgcggcgcaattttgtccatcaatagaggatttaaagaagccagtctggcgatgggattatcgcagcgcgcaacgctatggcatgtgattatgccgctggccctgcgccgcatgatcccggcgttgggcaaccagtggattatcagcattaaagacacctcgctgttcattgttatcggtgtcgcggaattaacgcggcaggggcaggagatcatcgccgggaacttccgtgcccttgaggtctggacagcggtagccctgatttatcttgccgtcaccctgtgcctgagctttctgctgaagcaactggagaaaaggatccatattttatga

SEQ ID NO: 147167 - DNA, 231 bp, Enterobacter cloacae; identical to SEQ ID NO: 67167

SEQ ID NO: 147168 - DNA, 2277 bp, Enterobacter cloacae
ttgcaacagtgccaaattaacagtgcgtttcagtcaaagaaatggagcagcactgacggaggcgggtttatctggcatacgacaggctcaggaaaaaccctgaccagttttaaagccgcccgactcgcaactgaactcgatttcattgataaagtcttcttcgtggttgaccgcaaagacctcgattatcagaccatgaaagagtatcagcgtttctctccggacagcgtcaacggctctgacagcaccgcaggactgaagcgtaatatcgataaagatgacaataaaatcattgtcacgactatccagaagctgaataacctgatgaaaggggatgcagatttggcggtctatcagaaacaggtcgtctttatcttcgatgagtgccatcgcagtcagttcggggaagcccagaaaaacctgaagaagaaattcaaacgtttttatcagtttggtttcactggcacaccgatttttgccggtaaaaatgcgctgggcgcggaagatactgccagtgtatttggtaaggaattgcatgcctatatcatcaccgatgccatccgtgatgaaaaagtcctgaaatttaaggtggattacaatgatgtgcgtccgcaatttaaggccatagaaaccgagacagacgagaagaaaatcactgccgctgaaaataaacatgccctgctgcaccctatgcggattgcggaggttacaaactacatccttcagcacttccggcaaaagacccatcgggctttccccggcgctaagggctttaacgctatgttcgccgtcagtagcgtcgatgccgccaaagcctactatgaatccttcagacacatccagaagttaagggctgagcaggacagcagttataagcccctgacggttgcgaccattttctcgtatgctgccaatgaagcacaggatgctatcggtgatattaacgatgagagtattgatacctcagagatgaacccaagctcccgtgagtttctggaatctgccatcgctgactataacgccgcctttaaaatgaatttcagcactgatggcaacggttttcaggattactaccgcgacctggctaaacgggttaagtctcaggaagtggacctgctgattgtagtgggtatgttcctgaccggcttcgatgctccggcactgaacacgttgtttgtcgataagaacctgcgttatcacgggctgatgcaggcattctcgcgtaccaaccggatttataacgccacgaaaacctttggtaatatcgtcacgtttcgggacttagagcaggccaccattgatgccattaccctgttcgggaagagcaacaccaaaagtgtggtcatggagaaaagctataccgaatacatggaaggcttcactgatgcagtcacgggtgaaacacgtcgtggttttatcgatattgtccgtgagctggagacccgctttcctgacccggcagatatcacttctgaaaaagagaaaaaagccttcatcaaactgtttggcgaatacctgcgggctgaaaatattctgcaaaactacgatgagttcacggcactgagagcgattcagacagtggatatcaatgaccctgtcgccgttgacgcttttaaggctgaacatttccttgatgatgaaaaactggcagcactccagtccatccggttaccttccgaacgagaagtacaggactatcgttcaagctacaacgatatccgtgactggcagcgcaaggagcgcgaaagtaatgtgaagggcaatacgacagtcagctgggatgacgtggtgtttgaagttgacttgctgaagtctcaggaaatcaatctcgattacattcttgaactgatttttgaatacaacaaacagcacccgaacaaagagacactgaaggaagaggtcacccggcttatccgtgccagtctggggaaccgggcgaaagaagggctgatgctggaatttatcgggcagacagatatagataacctgccgaataaagagtccgtgatagagcagttctacaccttcgctcaggccgctcagcagcgggaagcggaggcattgattcaggaagagaatctcaatcacgatgctgccaggcgttatatcagtgcgtcactcaagcgtgaatatgccactgaaaacgggacggctctgaatgaagcgttaccaaaactcagtccgctaaatccacagtataaaaccaagaaaaagacggtgtttcagaaggtctcagcattcattgataagttcaaaggggtgggtggagggatctga

SEQ ID NO: 147169 - DNA, 390 bp, Enterobacter cloacae; identical to SEQ ID NO: 65791

SEQ ID NO: 147170 - DNA, 474 bp, Enterobacter cloacae; identical to SEQ ID NO: 10335

SEQ ID NO: 147171 - DNA, 867 bp, Enterobacter cloacae
ttgttggatgcctttcttagcagtgatgaggatagcgaagattatcacgatgctttggctaaagagattgaaggtattgcatcaaaagtatccgatgacgtgaaagccgaattcggtgcttctgaatgggatatccctgatctccttatcgatttgaatgtttacaatgaggctttgtctctgagtcattcaatcggtagcgacttgtctgttttacagcaggttaaaatgcgtggccgaaacaaaactcatgagcgtggaattaccttcgatggaaatcgattaattctgtcacaaatgggagttcgtgatgtcttcagagctcaaagcgaatctaaaaatagagggcatgttggcctcgtattagttcgtgatatttcagcgtcaatggctaatgatgaaagatatattcatgccattaagtcagatcttgctttatcgatggccgctgaaagtttgtcaaaaatgcatgtctccaatatagtttttcccttcaaggaaagtgaatttgagattatcaaaacgtttgatcaaagcgttgaggaatctctatcgaaattcactcttggatgtaagggttattatacccctacgggatctgctttaatggcagctgttgatctgttacttgacagccaattcgataggaaaataatttttcttataactgatggttatccgaataaatcggaatttactatcgtcgaagttatggaaaaggctaaatgtaatggaatagaaatcgttggtgttggtattaagactgatgaaataattggttttgaaacggacactttcgtaacagttgatgatacttctttattgtctattgaagtcagtaagctagttcatcaaatactttcttaa

SEQ ID NO: 147172 - DNA, 348 bp, Enterobacter cloacae; identical to SEQ ID NO: 6026

SEQ ID NO: 147173 - DNA, 759 bp, Enterobacter cloacae
atgtatcactataccggtgaaataaagcctaatagtcctgttgctttgtacctccgtaatcgtgggatctcccgcttactgagtcacttaccaaaggatttaggctttaataaccggatctactattgggataaagataagcagaaatcgattatctatccgggaatgattgcaatctatcgtgacacccgaggtcggcctctgactatccatagaacatacgtagacaaaaacggtgataaggcacctgtagaaaatccaaagctgatgatgaagcctcctgccgatatgacaggtggctcaattcagttgtttgaccctcactatgattcaggtagttcgacctggacactgggagtggctgaagggatcgagaatgcgctttctgttgtagaagcgacttcaacaccatgctgggcagccagctccgcatggtgccttgaaaacgttactgttcctgattttttactgcctccgccggatgtaaaatatataaacttttatatctgggcggataaggatattgctaactcacaaggcactcgtgccggtatcgaagctgctcagcgacttcaaagccgcatggttgagtttttggctaaacgatatcccgcatcaaagctgacaattgaagtcttcgaaccagcacaagatattcctgatgggaaaaagggtatcgactggaacgatgttctccagttaacagggcaggatggattcccgattcactgggctcctgaatgtcttaatcagctgtaa

SEQ ID NO: 147174 - DNA, 477 bp, Enterobacter cloacae
atgaaagtcgcacgcatctacctgcgcgtgatgtcattttcagaagacgactgcacggaatatcaggagtcggctgcactggtggattgcagcgcggtgtacagggccgtcttgctcaccttgagccgtgtagcggcctctcggacattaagcccgttggcgatgtgctcccgcgctcgctgcaacttgtcggcggtgacaaccggctttcgcccgcccttcctcccacgagcggcggcggcagtcaacccggccttggtgcgctcgcggatcaagtcgcgctcgaactggcccagcgcgccgaacacgtggaagatgagccgcccgcctggcgtggtggtgtcgatggcttccgtcagagaacggaagccgacgcctcgcgcttccagcgcgcctatcgtttcgattaggtgcggcatagagcgcccgagccgatccagccgccagacggccagcacgtcgccgtcgcgcaggtag

SEQ ID NO: 147175 - DNA, 1206 bp, Enterobacter cloacae
gtgagtctcaccgacgttaaagttcgaaacgcccgtccaacgggcaaaactatcaaactcagcgatagcgatggcctatatttggaggttcgcacgaccggcacaaagatctggcgctatcgcttctatcttccgaacggtaaggacagccgctacaccattggcgaatatcctgccgtctctttatctgaagcacgtgcagaacgtgaccgggtgcgggaactggtgcgcaagggcatcaacccgacagacgcccgtcgcgaggatgagcagcgcgcggaggctgaggctgccaatacgtttaaaaccgtagcgttggagtggatagagaaaaagcggccgcgctggactcccggaacttatcagcaggttaaaagctttttggctatcaactgttatccagcgtttggcgataagccgatcagagatgtagcagcgcatgaaatactcgccgtgctgcgagggatggagcaacggggatcggtgtcctctgcgctcaaagttcgccagtggtgtagcgctatattttgctacgccgtagccacgttgcgagccgatgcagatccggcagcggcgcttaaaggcgcagttatccctcataaggtgcaaaactcccggtgcctggcgcatgacgagctgagaaagtattttgcgggcgctagctcctacaccggccatccgcagacacgcctttgccttttgctgctaccgtttatcttcgtccggcagggcgaattaaggcggggtaggtgggaggaaatggactggaacaataacctttggacgataccagcggagcgcatgaaaatgaagcgtccgcattcagtaccgttaacgccgatcacgcgcaatttctttgagaggctgcatgcgctgacgggtgataaggctctgatgttccccggcatcaaaaagccacttgagccattatctgactcaaccattaacagggctatcgagtatctcggcttcccgtcgaaacagatcaccagccatgacttcagggctacagcatcaacgacgctttacgaagcaggtttccgacgggaggtgatcgagaagcaactggcacatgcggagagtaatcgcgtggttgcagcgtacaaccacgcagaatatttgacggaacggcgggaaatgatgaaattttatgaaggttggttgacgggatttatgtcctctcccgtagacgttcctgatacttga

SEQ ID NO: 147176 - DNA, 303 bp, Enterobacter cloacae
atgatgaggctgattaatcgcagtaagcaatcacctattggtcgccgcgcttgcacaccgtgcaaaattgaggtcgacggcgatactcaaaaaagcagaatagataaagaggaagcgatgaaccaagcagaacaattatataaggcgtgggaaatttgccaaatcctgaaaatttcccgcgcgacattttaccgtaaagttaaacgaaacgagatcgatccaccgctgaaagatggcacaatggcacgttggccggagtcttcgatcatcaagtatcaggaacgtctacgggagaggacataa

SEQ ID NO: 147177 - DNA, 597 bp, Enterobacter cloacae
atgaaaacactcaaagaaagactggcttatgccatgcatacgaccgggaaaaacaaccagactgaactgggacgacaagccggtgtgcctcaatcttccatatcaaaaatactacggggggatagcgaaacatcgcgccataccggaaagctcgcggcagctcttggcgttagcgctgattggttaatcaacggcactggttcgatttttggtgaagcaagccaagcaatacaaccaatcgatgtttcaaaaaatgtaaaggttttcgattttaatggttttacaggcaaccatgtttcttggtttagcgcattaccagaacactttagagcctatgaaattaaagggagaactggcatttcgcaggctcctgctggggctatagttattgttgacccagaagaacaaccagcgtctgaagatttagttttggtccgactaaaagatactgtctccgtttttcgttatcacataggcggtgatggtaacggatacttgtcagtagatgattcacgagttcccctggcgccagtttcggatctctcctcagtggttggtccaatcgtccaggttttcattcccgaattgaacaagtaa

SEQ ID NO: 147178 - DNA, 213 bp, Enterobacter cloacae
atgagtgtcacaaccaacgaagccattaaacgcgctattggtattgctggttctcaagctgagctggcccgaaaagcaggcgtaaaccagtcaacagtcagcaagtggctaaatggcgctgaaattggttcacgcttcatcaagtcaattgtcattgccaccgatggtcaggtgagcgcatccgaaatccttaactccatatctcatcgttaa

SEQ ID NO: 147179 - DNA, 147 bp, Enterobacter cloacae
atggcaaaaaacaaccgctattaccagaccgcagtacacaaaaacaatacccgcgatcgcttcgtgcgttcgattaatccggcagtggcggagaggatgcgcgccattctggaagagttgaagcgcaaggaggaaaaccgtgggtaa

SEQ ID NO: 147180 - DNA, 888 bp, Enterobacter cloacae
gtgggtaatctcgcaacagtcataccaatcagaccgactcttacggtcgtggagcgtcgggtggcagatcttgatgatggttttacgcgcctggcaaatatgcttctggaagaatacgcaggcgctgacctgacgaagcgacaattcaaagtcttgcttgctgttctgcgcctgacctacgggtggaataagcccatggacagaatcgccaattctcagatagctcagatagcacgcttgccagagaagcgcgtcagcgaagcgcgagtccagctcgtcggaatgaacctgcttacccaggttggccgtagcattggaccgaacaaaaacaccgccgaatggttattaccagccagcgaaagctgcaatacagaaaatccctcaaagcaggggataaatgacgaggaagaagaatccctcaattcaggggataatccctcaaatcagggtatccctcaaaatgagggaaaatcccataaatcaggggaagaagaatccctcaattcaggggaacaccaaagacatataaatacaataaatactaataccccccaacccccagagggggagtgtgtcgggcaggaagaaaaacctgtctcaaagaaaaacccgatcgactaccaggcagtgctgtctgcatacaacactaccctgggagaccgccttccccaggcagaggcactaaacgataaacgtcgccgtgctatcaaacgcctgctgaccgaactgaaagagccaaccgtcgaggctgtggagaattacttcgccgcgttcgccgagcgagcgccaaagttttatttcggggagaacgaccggggctggcgcgccagtttcgattatctgctgcgctctgacaccctgctgaaaaccagggagaaggcgctatga

SEQ ID NO: 147181 - DNA, 360 bp, Enterobacter cloacae
atgaaaatttacgacatcaccccaatcggcaagccccgcatgactcgcgccgataaatggaaaacacgccgagcggtcatgcgttaccgcgcgttctgcgatgaagttcgcctgagcaaaatccacctgccggagtccggcgcgcacgtcactttcgttatgccaatgcccccgagctggagcaaaaagaagcgggaacagttcgacggtaagccgcaccagtcaaaaccagactgcgacaacatgcttaaagcgctaatggatgcgctttttgatgatgatgccagcgtctgggattgtcgcatcacgaagctttggggcgagaaaggccagatcatcatccgggagaacgcacaatga

SEQ ID NO: 147182 - DNA, 306 bp, Enterobacter cloacae
atgaatgtaactgaaatccctttatcgccggataaccagctatttcgcattcagttagcagagacaacatacacgctgagagtcatttggcgtgattctgctggctggattctggatgtacaagatagcagtggcgaaccgcttctttctggcgtgccgctggtaaccggtgtaaatcttcttgagcaatatcctcaactaggtattaacggggcgctgctcgttggctgcgatgtaggcgcaccggacgaccccaccaaaaccaacctcggcacatacagccacctcattttcgtgcaggagtag

SEQ ID NO: 147183 - DNA, 348 bp, Enterobacter cloacae
gtgagacatttactttgcactgtcaccgtgttcgcagtgcttatatcagcgccagcttttgcggatcagcaatgtggtgattttaaaatccattgggcagatgatggcttagccagaatcaatggcgcaaagccagaaatgcaaaaaatcaccttcctgaaaaacaaaggcgattataacaatataaagatggattggcgtatggctaccgatcagcccggaagatgggttggtcttgagtacatcaatcgaaacggcaagataattctcaatgcccagtggctgcaagccagtatgaatgcgccgcgtcaatatgcaacttacgactgtgtaaaaataaaaggataa

SEQ ID NO: 147184 - DNA, 321 bp, Enterobacter cloacae
atgaaaggatttttagcgctttttctgttggtatccactgtggctagtgctggaacgttaaatgatttttttgcaaaacatccagatctagataataacctcgctatacacactgcaatctcgaaggcttccggtatggaagctgctggttttgcacgaagagagggcggcagcgaaaaagaattgatgaataccaaaggtgatcaatttgctgtccttgggtttcgccgagtgaaaatgtattgcagctatcctgagtcagcgcaaatgacagggctaagtgctgaagattgtcagcttgtgcttagtaagaacttatag

SEQ ID NO: 147185 - DNA, 1197 bp, Enterobacter cloacae
atggctttgaacctcgacacgctggggctatcggcaacggtaaccgcccaggggattagtgcgcctgattaccagacaatcctcgatacactgaccagctatttcaggcagatttatggtagtgatgtctaccttgaaccagacagtaaagatgggcaaatgctggcgatttacgcccttggtatccatgacgcaaataatacggcgattgctgtttataactctttctctccgtctacaggagtgggacgggcgctttcaagcaacgtaaaaattaatggcattaccagaaaaggagcaacaaattcaacgtctgatctggttattagtggtgaccccggggtactcattaccgcaggtattgtgcgggatgagaacggtatgcagtgggcgcttcctgtaaacgtcaatattccgccttcagggaccgtgactgtcacatcaacctgcactacaccgggagcagtcgcggcgctggctggaaccatcaaaaacattgcaactccgacaaggggatggcgttccgccaccaaccctgctgcggccactctggggcaaccaggagagaatgatccgcaactgcgtgtcaggcaatcaagaagcacggctctaccctcacaaacaacgattgacggtatggacggcgccctactggatattgccggggttacgcgagtacgtatttacgagaacgataccgacactactgacagcaacggcttgccggagcactctatttgcgccgtggtggaaggaggggatgccactgaaattgccactgtcctgtcgaaaaagaaggaccaggggacatacacctttggcaccacctcagtcgacatcaccggcaagtatggcgagccgaaaaccattcggttcaacaggccggttattgtcagcatttttgttgatatcgagttgaccacctatcctggctatacgtcacaggttgccgagctgatgaaagcggagatcgcgaagtacatcaacagcctgaggattggcgatagcattctgattagccggatttattcgcctgcaaatcttggcgtaatgagtggcggggaaagtcgttattacgatatcacctcactgaaaatcggtaagtctgccaccagtgtaagcgctgctaatgtggacattctttttaacgaagtcgcagcgagtgacgttgccaatatcaaggtaatgcctgtatga

SEQ ID NO: 147186 - DNA, 1332 bp, Enterobacter cloacae
atggaactgtcccaggccctcggcattattaatcttaccgcccccgaagaggtccagagccttgccgaccttcttccccacgacctcattcagcaggctttttccctgactgatacagtgactctgcgtaaacgtaaactcccgctcgaatccatggtctggctggttatcggcatggcgattttcaacaacaaacctctctctcatatcgtcaacctgatggatatcgttgaccgcaccggaaggtcatttactgcccccagctccgttatcgcccgccgtaaaacactgggcgaggatgctatccgggagttgtttaaccttacgcaacagcactggcacaaggaagcccggcatccgctctggcatggactgacgctgaatgccgttgatggtgtggtctggcgaacgccggacacaccggaaaacgctgctgccttcgcaaaagcggaaaaccagcatggcgaaaagggcttcccgcaggttcgtatggtgtgtctgatggaactgagcagccatctgctgcgtgccagtgtaatgggccggtatgacgttaatgaaatgcgcctggcagcagggctgactgaacaggtaccggataacagcgtgacgctgttcgaccgggggttctggtcagccggtctgctggataactggcaccgggccggagaaaaccgtcactggctgctgccgctgaaaaaaggcacgcagtatgaagtggttcgcaggctgggtaaacaggatgcgctgataaccctgaagacttccccgcaggccagaaagcagtgggaaggactgccggatacgctcacagtccggctggtgagccgtaaggtaaacggcgtggagcgacaggttgtcacgtcaatgacagatgccatgcgttacccggcggcagacatagcggaactgtataaacaccggtgggaaatagagctggggtaccgtgaagcaaaacagtatctgtgcggcaaccgctggacactgagaagtaagttaccggagatggtaaggcaggagttgtggggaatactgctgacctacaatctggtgcggtatcagatggtaaaaatggcgttcagcctgaaaggtgactatctgccgtatcagctgagcttcagcggctcactggcagagataatgcggttgttaatcgggctgccatggtcatcaccgggcgcagtaccggggcatctgaagcacttctacagtaatgcggcaatgctgaaactgccactgaggagggagcgggaatatgaaagggaaatcaggcagaaaaatcaaaatatccctttaaaaacaatgctggtcaccttaagtgaccagcattag

SEQ ID NO: 147187 - DNA, 423 bp, Enterobacter cloacae
atgaaagacaaccgcatcgccagcgcgattgacctggctatccagaaatacgatacccctgcgggctcgctgttcgttgcagcacgtcacgggcgcactaaaaaatgcttcacgcgagatacggcgattcgctatctggctttctttatgacttcagaagcgttttatcgctccggcttcgagcagcgacacccggatgtgcaggcagtccacccactcaatccagagctgaattgttggcagcgtggcggcgtaaccaccgagtatttcatggcacaccagcgttgtgttcgccgtctgcgtcgcatcctggcgcgcaagcgagaaatggagaaatggtgtgaaaaatgggacgcgatgcatgaccggttcattaaagaggtcgatgcacttcaagccatcaagcctaaaggagtgtattga

SEQ ID NO: 147188 - DNA, 222 bp, Enterobacter cloacae
atgacgctcacagcaatccgaattcctgattgggttcacgaacaggcggttcaagttcttcgtcagtaccgtaaagggcgtattcatccgcgccgcatgcatgcctcgggaaatctgagcctgaaagtaaatttgcgctggcgtctgctgtcccgtgacggcggccagcactgggaagtaatgagccatgagcgttattcaaaattaaaggacagaaaatga

SEQ ID NO: 147189 - DNA, 360 bp, Enterobacter cloacae
atgaataattcaattctcacctatcgtcgcagaatattaaaagcggctttactccgccaccagcataaaacaggaagcacctgcattgttattagtctgccgaaaggtggaattacaacgctggagcttacagaaattgttatggatgggcttctggttcgtttcgaaaatatagcccggaaagaacatggaagtatcgacggtgataaagctgtccgcgaattataccggaatgcagttgatgtgaatgggcatggtgaatatctgacagaaagcggaaagctgctggttgatgagcttatagccgaactggtggggcatgcaaagaaaatcgccgccaccacgcaggagcatttatga

SEQ ID NO: 147190 - DNA, 1191 bp, Enterobacter cloacae
atgagcaagacactctcagagatagctcaacagttgagtacgcccaggaaaaccaaaaaaactgtcaccaaagaagtagaagagatcaagtctgtaccaaaagtacagttaatctacgctttcaatggcacagggaaaacgcgtctttctcgggatttcaagcaactgattgcgcccaaagtcaatggtggagaaggtgatggcgaagctgaacagtccgagttgtcgcgcaaaaaaatcctctattacaatgccttcaccgaggacttgttttattgggataacgatctggaagaagataccgagccgaagctgaaggtgcagcctaattcctatacaaactggttgctgacactgctcaaagatttaggacaggatggcaacatcgtccgttatttccagcgctattcgaacgacaagctaacgccacacttcaacgtagattttaccgaagtcactttttccatggagcgcggcaacgatgagcgttccgcccatatcaagttatccaaaggtgaagaaagcaacttcatctggagtgtgttttacaccctactggatcaagtggtaacaattctcaatgtcgccgacccagatgcgcgcgagaaccgcgcatttgatcagctggaatatgtgttcattgatgatcccgtaagctcccttgataataaccatttaattgaactggcggttaaccttgcgggcctgatcaaatccagccaatccaatttgaagttcattatcacgacgcatagtccaatattttataatgtgcttttcaatgagttgaacggtaaagcttgctatatgttggagaattttgaggatgggacatttgccctcatagaaaaacatggcgactgtaataagagtttttcctaccatctacacctaaagcaaacaatcgaacaggcaattgctgacaacaacgttgaaagatatcacttcacgttactgcgcaatctttatgagaaaacggccagctttctgggctacccaaagtggtctgaactcttgcctgacgacaagcagctttatctgagcagaatcatcaatttcacaagccacagcacgctatcgaatgaagccgttgcagagccaacgccagcggagaaagcaactgtcaaactgttgctcgaacacttgaagaacaactgtggcttctggcagcaggaacaaaaaaatggttga

SEQ ID NO: 147191 - DNA, 1461 bp, Enterobacter cloacae
  misc_feature (1374)..(1383): n is a, c, g, or t
atggttgattgcaccaagccaattactgaatccaataacttcatcattttggatacatacagccaagaatggaagattaccgagagctaccagagcgaaggcgatctggagcgtgaactgattcaggatttggttaaccaagggtatgaatacctgccaaccctgaataacgccagggctatgctggctaatgttagggaacagttacaaacccttaataatgtggagtttctggaagctgagtggcgtcgttttgtggaaacctggatggacaagcccagcgatggcgttgtcgaaaaagcccgtaagattcatgacgactacgttcatgatttcgtcttcgacgatggccgcattcagaacatctatctgctggatagaaaaaacactcttcgcaataaattgcaggtgatcaagcagttcgagcaaaccggcacgcatgccaatcgctacgatgtcaccatcctagtcaatggcctgccactagtacaaatcgaactgaaaaaacgcggtgtggcaattcgtgaagcctttaatcagatacaccgttacagcaaggaaagctttaacagtgacaactccctgtttaaatacctgcaactgtttgttatttccaacggcaccgatacccgctactttgccaataccacaaagcgggataagaacagtttcgacttcaccatgaactgggcgaagtccgataacacgctgattaaagatctaaaggactttactgccacttttttccagaagcataccctgctcaatgtgttgtttgactacagcgtgtttgacagcagccagacgctgctggtgatgcgcccgtatcagattgccgccaccgagcgaattttatggaaaatcaacagctcctataaagccaaaaactggtcaaccccagaaagcggcggttttatctggcacaccactggctcaggtaaaactctgaccagctttaaagccgcacgtctggcgaccgaactggacttcattgataaagtcttctttgttgtcgaccgtaaagacctcgatttccagaccatgaaggagtatcagcgcttctccccggacagcgtcaatggttctgacaatactgcaggccttaaaaggaatctggataaagacgataacaaaattatcgtcaccaccattcagaagctgaataacttgatgaaagctgaagctgacttaccggtctatcagcaacaggtcgtcttcattttcgatgagtgccaccgcagccagtttggtgaggcccagaagaacctgaaaaagaaattcaaacgcttttatcagtttggttttaccggcacacctattttcccggaaaacgcattgggcgcatcaccagcagcgtctggctgctgtcaaacnnnnnnnnnncgcattgggcgcagaaaccactgccagcgtgtttggccgcgaactgcattcttacgtgattaccgatgcgattcgtga

SEQ ID NO: 147192 - DNA, 1761 bp, Enterobacter cloacae
gtgtttggccgcgaactgcattcttacgtgattaccgatgcgattcgtgatgaaaaagtgctgaaattcaaggtggattataatgatgtccacccgcagtttaaggcgcttgaaaacgaaaccgacgacaagaaactcacggtagctgaaaacaatcaggcttttttacatccgcgccgtattgaggaaattacccgatatattcttgccaattaccgtcagaaaacccatcgtacttttccgggggcaaaaggattcaacgccatgctggcggttagcagcgtggatgcagccaaagcctattatgaaacctttaagcagttacaacatgggctcgataatcacactgacgcccgtaagccacttagggtggcaaccatcttttcattcgcagcgaatgaagaacagaatgcggtcggtgacattacagatgaaagtttcgatgtaagtgctatgaacagcagcgccaaagaatttcttgatgcggccattggagactataaccgtcatttcaaaaccaatttcagtaccgacagtaatggcttccagaactattatcgtgatttagcgcagcgcgtgaagaatcaggatattgacctgttaattgtcgtgggcatgttcttaaccggcttcgatgccccaactctgaataccctgtttgtggataagaatctgcgctatcacggcctgatgcaggcattctcacgtaccaaccgcatttatgatgccaccaaaaccttcggcaatatcgtgaccttccgtaatctggaacacgcgacgattgacgctatcacgctgtttggcgacaaaaataccaaaaatgtggtgctggaaaaaagctacaaagagtacatggaaggctttaacgatatcgtcaccggtgaagcgaaacgtggttttatgactgtagtctcagagctagagcaccggttcccagacccggcgaatattgacagcgagaaagagagaaaatccttcgtgaagctgtttggtgagtatctgagagccgaaaacattctgcaaaactatgacgaatttgccacgctaaaagcgctccagaagatcgataccagcaacccggaggcactcgaagccttcaaggccgagcattatctcgatgatgagaagctcgctgatttacaggccattcgccttcctgccgaccgcaagcttcaggattaccgctcagcctacaatgacatccgcgactggcagcggcgcgaaaaggcagcgaatgataaggatgactcaaccaccgattgggatgatgtggtgtttgaggtagatttgttgaagtctcaggagattaacctggattatatcctcggtctgatattcgagcataacaaacagaacaaaagcaaagacgggctgaccgaagaagtcagacgtcttatccgctcaagcctgggcaaccgagccaaagaagggctggtcattgattttattcagcagacgaacctggatgaactgccagataaggccgggattattgatgcgttcttcgcttttgctcagcgcgaacagcagcgtgaggcagacgcattgataaaagaagaaaacctgaatgaagaggcggccaaacgctatatccgtacgtccctgaaacgagagtatgccaccgaaaatggtactgagctaaacgagacgttaccaaaactcagcccgttaaacccgcaatataaaacgaaaaagcagtcagtgttccagaaaatcgtcgcattcattgagaaatttaaaggggtgggtgggcaaatttaa

SEQ ID NO: 147193 - DNA, 1341 bp, Enterobacter cloacae
atgggaactgtatcctatcaggtaaaaaaaatcgggatgctgctagagcagcgcctcgctattccgtcataccagcgcccctacaaatggcaacaaaaacacgtcaatcaactaattgatgatgtgttaacccaccaaaataaacagagctaccgccttgggactgtggtgttgcaccgggataagttaaaacctgcttatgaaggtgagcttgatatcgttgatggtcagcagcgccttctgaccttaaccttgctttgctcagtgctcgatcagagtggtgagttttcaacgcccctgttggaacaatcttttgcttcaagggttagcatcaataaccttgagcacaatgccaaagtcattgagaaccgcctcgtgggactaaatgataacgagcgcaaatcactacttcacttcgtgtgtaacaagtgtgaactgatcgaagtgacgctcgatgatttgagcgaagcctttcagtttttcgactcgcaaaacgccaggggtaaggccctcgcgccccatgacttactaaaggcataccatttgcgcgaaatgatggatgctacagagcaagcggaacgactacaccacgttagcctgtgggagcaaggagtcagtccggatgatgaatccgctaacctacacctcattatgggcgagtatttgttccgcatgcgccgatggctggatggcgattatggcgtgcagttcagccgccacaatcttgaggtgttcaaaggcgtcaacctctccacctctgattaccactatctgcagtctctgctcgccctggattttgcagttgagcactacaataacgaccctatcaggaagtgggacaagcagaaaaaaccttatccgtttcaggttaatcagttaataattaacggaaagcgcttttttgagtatatccagcactacaaatccctgcatcacaccctatttgaaggtgacaacgcgctgcttggcaatttcttaaaaaaacatacccgctacgttggcagttcacgcaaaggggatatgtatattaaaaatctctttatgtgtgcagtgatggcctattacgataagtttggcgataaagaattaattcaagccgcaacagtctgtttttgttggagttactacttgcgcttgcaatatcaaaaaatcggcatggacagtgttgatggctatgcgcgtgagccccgaggactattgagagtgctcgataaagcgatccacccacaacaagtcctacgctttcagccaacgcgttgtataaacattcgttttcaaaatgccaaacccgtagaagattcaatcgctcagatgcagggagaagtatatgccactgagtaa

SEQ ID NO: 147194 - DNA, 1617 bp, Enterobacter cloacae
atggagtcgaacgattcaggcggagtagccgccaagcacggtttcttatttcaggactgcgtagccgcttaccacgtcacccgaatgcttcgtgacaagactatccgcagtgtacgctgcgaggtctcagacgatatcgatattgtatctgatggatacatcgacttcgttcaggtaaaaagcaccagcaaaacgcgttggaacatttcggacatcgttcagaattcaaaaggtgctgataaaaagacgatcccctgtagttcaattttgcacaaatcaatgcagtgtgagtctgacccgccccttggacgtaagtactccatcgtcacagaggaaaaggtcaacaaaacccttgagtacttgacgatcagcccaaacgcccgactagataagccaggccgacaggaactcatcaatgatctcaacaaacgcacagacaattatttaacagactcgggtataagcgtttcagattggatcgatgcggctacatgggaagtgttttcatccctgcgagagcttgaacttctagggatcaagaacatacggctggcctcccaggatctacatggtgtcattctcagttccgaaactgtcgccgaagacatttggtgccgcatccttgataccgtgacgcgcaagggcgagcattctcgtcgcattcacagtgctgatgacaagtcctatctccgaccagacctacttgagtggttcaagcagcgtgtcgaagatgaccagtctcggtcaggccgcaaaatctacgtcaaacgggacttaccccacatcctaacgccatttagagcgcctatggcttcggtttgcgctaagcgtaaaggccaggttctacatcagcagtactcgcttaagaaatatcgctacaagcacatcgcggataacgtttgccaatggttggatgaggtctttctccgaccaaaagaaatatctgatattcataaactgacatttattgaaaagcgagaacgactaaagaattccgtcttcaaatcgctccatgacgtcagcgaattcttgggtcgagtgttgttgcacgcaacgatccggcagcaccacgaaagccagcctatcccttgcatgctatacgtggaaaaagcaggggccgaaaaaattcttcaaaacgtgcatatcgttcgccgcgatccagaaggtgatcagctttggattggcttcagcgagttggtgactgatattgatattgccgtcagattgcccgagatacgggatcagttgtacgaggatatttcggattgcatcgatacagcacgcagaaagatcctcgacattaaagacgataactacctgcttcgccacgacattgacgaaattcttgatggcagccaacctttcgatgctcacctcgatcgtttcacgtttgttctgttcgtgggctacaactcgaacctgcttaccgagcctgaaacgccgggattcgagggtgacctggagaaggaaacgacggcgctattcgaaaaattcgcggctgaccttatcgaggattcgccgtttgcgaatctttgcatccacgtattcatttatccagctccgagtcttgagcggttaacccaattggttgatgagaaggtgagagaggtcgtatga

SEQ ID NO: 147195 - DNA, 2190 bp, Enterobacter cloacae
atgacagaggtctatgaacaggcgaaacatagcctgcagggtgaggacttctcatctttcaattacctgtttgcggttaacaagctgttgtcaaatcctgtttcgtatgacttgggacgggacttgatcgtgcgagctctcgattcgcgcgagcggttttccgagcacaccacaattttgaaaaatatggtgagaaaatcaggtttgttcccgtatctcaaaaaggagttcactggcctgacaccggatgacctgagggtgcttgagctataccagacgccattctcggatggttatgttttccactcaatgcagttccacatatttgatctgcttaagtccggtcaaaacgtggtgctgagcgcacctacaagcatgggcaaaagcgcaatcgtcgattcactgctcggcatgggaacgttgaaacggcttgttctggttgttccgaccgtggctcttgccgacgaaacccgtcgccgactgcaagagcgattcggtgaccgatatcagatcatccaccacagttcccaagtgtgccattccgatcaggctgtctacgtgttaactcaggagcgagtgaacgagcgtgacgacatcgtcgacgttgacctcttcgtcattgacgagttttacaagttggcgttccgacaactaaaaagcggggacattgatcatcaagacgaacgagtcatcgagctcaacattgcgttgagcaaactgcttaaggtctccaggcagttttacctgactggaccgttcgttaacagtattcgcggtctcgaaagacttgggtatccgcatactttcgtttctaccgacttcaatacagtcgcgctcgatgttcagacgttcggcatcaaagcgaatgacgacaaagccaagctcaacgcgctaggtgaaatcgcgcacgcatgcgtcgacgcaacgatcatttattgcaagtcaccaactgttgcgggccaggtggcacgcgagctgatcaggcttgggcatggcactccgactgagagtcctcatatcgactgggtcagccaagagttcgatgccgactgggattacacagtcgcacttagaaacggtattggcttgcattttggcgcgctaccgagggcactgcagcaatacaccgccgaccaattcaatgctggaaaactgcgctttttactctgcacctccacgatcattgaaggagtcaacactatcgctaagaacgtcgtaatctacgacaaccgcgatggaactcgcagcattgacaaattcacccatgggaacatcaaagggcgcgccgggcgcatgggcgttcacttcgtcggcaaaatcttttgcctggaggaaatcccggaagacaacctcaatcaagaggtggatattccgctcggtattcaggacattgatactccaatcaacctcttagccagcgttcaaccagaccacttgtccgagttttcacaggatcgctttgatgagattttcataaacgaccgtgtttccatcgaccttgtgaagaagcattcgtacttccgtgtcgagcagttcgaaatgctgcaaagcatgttcgagatgatggacgacaacgaattttcctcgttggtttttcactggacccccgcgacaaacttcctcaagacctttgcaaagatcattgccagactggttccccatacgttcagtcgcaatggggtccctgttaagcccacggatgtcatgatcgccaaacttgccggctatttaaacgctgaaagttattcggaatatctgaaaaatcagatcgattacgcacgacagtgggtttctgaaggggagaagcgcactctttccattgccctcaacaatgatttgaagctcataaccaatactttcggttacacattacctaaagtgctcagcttgatggaggatgtagttaaataccacgctttgaagcgaggtatacgcagcaaagtcgattacacgcatgtcaaattggcgtttgaaagtttccatctaccaccaggtgtcaatgccttagaagagattggcattcccattcagacgttacaccgactggtagacttgctggaattttccgacgaggctgatgtggatgagttgagccagtatcttcgggatactcaggacatttggagtagatcgattgggtacgttgatcagatgtttatcaggcgcgcgctcggtattagacgacattga

SEQ ID NO: 147196 - DNA, 1422 bp, Enterobacter cloacae
atgtttaacgctcgtccttttcctattgattcgtttcctcagattatcagaaatgcggtttgtgaagtggaacagcacacgcaggctcctcaggctttgattgccgcatcggtactgggggttatttcgcttgcatgccagaaccgtattgatgtgtgccgactgaataatctgcgcagtccggtatcgcttttcttactgacgctggcggaatctggtgaacgcaaaagtactgtggacaaactactgatgaagccattgtatcaactggaagaagaatggtttgaaaaatatacccatgacttggttgtctggaggaatgaagaaacggtttttaacattgaaaagaaagccttgatgtcaaaactgaagtcagatattcgcaaaaataaagatcactcggcaacgaatgaacgtctgaaagagtttctggagtcgcaacgtaaagcacctgtgaggttcaagcagatatttaacgacgccacacctgcggctattaaggattacctctgtggttactggcgctctatcggtattatgtctgatgaagctggtactatttttaatggttatacgctgaacgaactcccctttatcaacaaaatgtgggatggtgcaacattttccgtggaaaggaaaagcgaaccggaaaaattaatcaaaaatgccaggctaacattaggattgatggttcagcctgaggtgtttaaaggttatctgcaacgtaaaggtgatgcagctaaaggtatcggattcttcgcccggtgcttgatatgtcagcctgattcaaagcaaggttccagaattatctccagtcccgttatttcaagcgaacatttgccggtattccatcaacgactgatggagatagttaacgaaaatatttccagagataataaaaataatcgtctttgtctgcgtttctctgtagaagcggaaagtcgctggatagaattttataacaaggtggagtcagatatgggcttacttggcaccttaacagactttaaagactatgcatctaaggtcgcagaaaatacggcaagagtagccgctcttctgcatttttttaatggcaatgatggcgatatacctctttctgcagtcgaagatgctgtgaagataactacctggtatgtgaatgaatacatccacatattttctaaacctcaagaattcacgctggcaatctcggaggcggatgagctgtattggtggataaaaaaccattgtaatcgccttgttgtaccttatattactaaaaataccatcctccaatatggccctaataaattcaggaatcgtagtaaagcaaatgaattactcagtacattatcctctcaaaataaaatccttgtgggaaaaaaagggaaaaccacattaatagctatcgctggtttgaactcctcaacttcattctga

SEQ ID NO: 147197 - DNA, 873 bp, Enterobacter cloacae
atgatcattgtggaaactggaaataagtttgttactgtagaaaatattgtagttcagtgtggcactgaattggataaagtcatagatctttggtgtgatgataagctccctctttatatacattttgaaggatgtttatgtcagttatcatgtactattcgtaatgtggatgattccacatcaaagacgaatgaaaactatatttatacaggtattagtacacctaatagcttaatggataatattgagcaatacggaaggtttattgaagatagaaaaaatgaaataattaatgaacttgattcttatcaaaaaaacaaatctaatttgactaatgtaagacagtttcgcaggaaaaagagtgccgagatttgctatattcccatcggtgatgatcagctttattacgatggttacgcgtacgggtattggcaggttaaaccaggtgcaaccacaaagtttgtaaaaagtgattataaagtattcaatgcaaatccttttttctcagatgacgataactcatcttttttgaaagtcattggacatgatgaaaacgattttttgacatttaaagaagtgattgaagttagtattaataacctatacatgaatgttgatgatatcgaaaaattagcatgtatattgactgtttcaccgaacctagaaaaggtagaaagtggaagtcgttattcaaaaatagaacatttggctttgtacatattgctgaatgaatattgtttggataatgaagggaatattaactttacaacgatggctgatatcttaaccagtatcaataaaaataagtatggtgggaaatataaatttaattctgagaccgttcgtcgatggctaaaaaatgtttctatatga

SEQ ID NO: 147198 - DNA, 159 bp, Enterobacter cloacae
atgcacaaacaaccaatgtcattcttcgttactaaagaacaaatctaccgcgccgttgccagctcgaccgcgatagaaaccggtgctcctgtgcaaaaaattgagcagcagcttaaacgcaatcaggcactggcgaaagccgttggcctcgcccgctag

SEQ ID NO: 147199 - DNA, 606 bp, Enterobacter cloacae
atgacacaacatgagagcacgacaacggtattgcggaaaaacaaaaaggtattaattgccagtcttacgggaagttctattgaatggtttgattattttctctatggcaccgctgccgcgctggtgtttaacaagattttctttccgatggtcgacccggtaatcgggctgatcctctcctatctctccttctcgttgaccttttttattcgccccattggcggcgttctctttgcacatatcggggatcgtatcggtcgcaaaaaaacgcttgtcctcaccctttcattgatgggaggtgcaaccgtgatgattggcctgctgcccacctacgacatgatcgggatgtgggcgcccgcgttgctgatcctgatgcgtattattcaggggatgggtatcggcggtgaatggggtggcgcgctgctgctggcttatgagtatgctccagaaaaacgcaaaggcttcttcggcagtattccgcaggcgggcgttaccatcggcatgttgatggcgacatttatcgtctcgctaatgacgctgttcagcgaagaggattttctctcctggggctggcgcattccgttcctgccagttccgtgctggtaa

SEQ ID NO: 147200 - DNA, 765 bp, Enterobacter cloacae
atgagtcagaatacgctgaaagttcatgatttaaatgaagacgcggaatttgatgagaacggatcagaggcttttgacgaaaaagccttagtagaagaggaacccagtgataacgatttggctgaagaagagctgttatcgcagggtgccacacagcgtgtgctggacgcgactcagctttaccttggggagattggttactccccactgctaacggccgaagaagaagtctatttcgcacgtcgtgctttgcgtggtgatgttgcctcgcgtcgtcgcatgatcgaaagtaacctgcgactggtcgtgaaaattgcccgccgttacggcaatcgtggtctggctctgctggatctgattgaagagggcaacttaggtctcatccgcgcagttgagaagtttgacccggaacgcgggttccgtttctcaacctacgcgacctggtggattcgtcagaccatcgaacgggctattatgaaccagacccgtacgattcgactgccgatccacatcgtcaaagagttgaatgtttatctgcgtaccgcgcgcgagttgtcccataaactggaccacgagccaagtgcggaagagatcgcagagcaactcgacaaaccggttgatgacgtaagccgtatgctgcgtctcaacgagcgcattacctcggttgacaccccgctgggtggtgactccgaaaaagcgctgctggacatcctggcgatgaaaaagacaacggcccggaagacaccacgcaggacgatgatatga

SEQ ID NO: 147201 - DNA, 507 bp, Enterobacter cloacae
atgatttacggctatgcccgagtatctacaaaccatcaggatactgaacttcagcgctctgcccttgagttatcaggatgtgatcacatttttgaagagcatgctagcgggagaaaatctaatcgtccggtactgaagcggctgatcaccactatgcaggctggggatgaactggtggtctggaagctggacaggatcgggcgcaatgttctgcatgcgctgttgatgttccagcagctacaggaaaagggtatcaacttccgcagtattaccgatggcgtggatctcaaaacagccagtggccgctataactttcgtaatatcttatcagcggcgcaatatgagtctgatctgaacagtgagcgtacactggcgggattagccgttgcacggtcaaaggggagggtaggaggtcggcggccaaaattcagtgaagatgagtgggcgcagatgggagggttgataaaagggggggatggacagaaagcaggtggcgatcatttatga

SEQ ID NO: 147202 - DNA, 423 bp, Enterobacter cloacae
atgactgaacaatattactacagctattcggcgaagggctttctctggctgagtgcagatgagctaaagggaaacgatattcccgctgacctgatacccgtcagcgaggaagaacacgccgcactgttcctcggtcaggagcgggggaaatacattaaccacactcctgctggccctgtactaatagaccagcccgactatacacccgaggaactcgttgcgcaggcggaaagcaaaaagtcacggctaatgcagacagccaatgatgcgatagcgcccctacaggatgccgtggatttgagtatagcgacggaagttgaaaccgccgcactcaccgaatggaagaaataccgggttatgctgatgcgtgttgatacaacaaaacccgtatggcctacacctccgggggaacaggccagttaa

SEQ ID NO: 147203 - DNA, 225 bp, Enterobacter cloacae
atgcagtggggtaatgtggataatgccaggggaacctactcgttcccacgggcattcaatgacacctgctttgccgtctttgccacaaataaggatgggcagggcggtgctattgataacgcgtatggttatcccgtaagcaaaacgcaattctatcttgccagcaaagcgaactctggcgctgataccgcatacggcatttcatggtttgcactggggtactga

SEQ ID NO: 147204 - DNA, 174 bp, Enterobacter cloacae
atggtgaaaggggttatgacctgtgcgcaagcctactccttcaacgtgacggcgaaaatgggaacgttcccgaaatcgggcgaagatcacaataatccgtttagcgggggctatctggatgcgtttcttgatatgtgttcaagcgcgagtatgccctttgagatttatgtctga

SEQ ID NO: 147205 - DNA, 756 bp, Enterobacter cloacae
atgcagcccggcatgtttgggcttggtcgtccggatggggcattaatattcaacacaacgagccaggatgatcttcttgctggattgacaggatatgggcttacagttcttcgaaataatgcacaaatacctgagccatggaatatatggaactattcaccgacaatatttgcccgtacaggtgatacgtatagccttttttcaatgccttttcagtcatctggcaaagttcgtatttttggtggtgcagcagcaactggatggaatcacagcaggatattatacgatgataaaaatactgttgtagatagcaatggctttataaaacaggcatccccggtcgtcaaagtcttctctaatggtaaatatgaaactaacgacgaatcagaaggcgtcacggtcactcgtctggatatcggacaataccttattgaaggctgtaaagcactcaattcagacgctgcctggggcggtatcgacggaggatttgaaatccccacagacaggaataagcaaccgctcatatggctggactacgaggttaacgcagacggctctgtgctggtaaaaacctatcaccgaactcaccctgatgcgccagcatttgccaggaatgagcgtgatggattggcagatggtgagccggttgacatcccggctcatcagttcgtcagcgttcgtgtagaaatgccagctgacagcatctggaatcagaaacaagcggaagaggctttaaagcaggaacagggctcgtaa

SEQ ID NO: 147206 - DNA, 276 bp, Enterobacter cloacae
atgaaagcattgtctgtattaacagcggcgctgctggcggtttccaccagcgcgctggcagagacgaaagccagcgtggtgctggtgcacggggcgtttgccgacgggagcagctggaataaggtgatcacccggctgcaaaaacaccataccgaggtcattgcggtacaacttccgctcacgtctctgaaagatgatgtcgccgccacgcagcggctattgcccgggctcatggggatgtggtgctggtcggtcactcctggggcgggacggtaa

SEQ ID NO: 147207 - DNA, 162 bp, Enterobacter cloacae
atgacacagccattggccggaaaacatattttgatagtagaagacgagcccgttttcgatcgctactggattcgtggttatcctcactgggtgcaaccacgtcccttgccgaagatggcgtcgaggcactggaaaaaatggccagcatggcgcctgatctga

SEQ ID NO: 147208 - DNA, 501 bp, Enterobacter cloacae
atgagcggtaagcgttatcctgaagagtttaaaattgaagcagtcaaactggttgttgaacgcggtcattctgtttccagtgttgcaacacgtctcgatatcaccactcacagtctttacgcctggataaagaagtacggtccggattcttccactcataatgaacagtcagatgctcaggccgaaatccacgaaggctggctgtatctggccgtggtggttgacctgttctcacgcaaagttatcggctggtcaatgcaaccccgcatgacaaaagagattgtcctgaacgcattctttatggcggtgttgaggcgtaatcctcataagcaggtactggttcactctgatcaggtcagtcagtacacgagccatgagtggcagtcgttcctgaaatcacacggtctggaaggcagcatgagtcgtcgctgtaactgccacgacaacgcggttgcggaaagctgtgccagcgctggcgctgactggcaaatgctggagtaa

SEQ ID NO: 147209 - DNA, 819 bp, Enterobacter cloacae
atgaccaaaataaaatacatcgatactaacgatttcgattatgttccatctgaaacagcatttctcgaatgcaccaggatcaccaatctgaaatcaggcattacagagtcactcacaaacaatgacaaagatttttacgtcaggatgcggcatcgctactattacttcgtgaaagagttgggcggtacttattacgataacgtcgatcagcttggtcaaagtattggtgtcagcccagcaacggcaacacgtattgttgcaaagctgagaaagatcggtcttatttccagtgataatccaaagcgatccaatcaatggactgttacaccgctcacgccggaaaacttcctcttagaacgtgatcgtaacgcgctggaagataaagccgatcctgattgggtggactgtctgaaacatcccgtgtttggcaaatctaatgaagacgtaactccagaggtgcaattagaggtgcaacgcgaagaggcgaaagccgatccgatgtgcgagcttgaggaagcaccggaagaggaaacgccagcgcctgaaaaagtgaagcccacgaagaaaccagcggcaaggaaagcacccgccaaacagcaaaccgtttccccattcgagtttaaaacgccacgagacgaacgttttgatgggttagcctttgaaaggttaaacgacgcatctgatcgcttcttagttttccaggattacgatctgccatacctcgtgttattcgaaagtcaggggaaactaaccaacccagccgcaatagaacatttgaaaatgaagaggaatctcttcgaaataacagggcgcttgtag

SEQ ID NO: 147210 - DNA, 342 bp, Enterobacter cloacae
atgaataataaaactttggacatcgtgaacaacgtgaacaccctaattaactctttccacgatatttggcatttaccaaccctacagcttgttaataaggcgtggcgtgagagaacgccctccgtgctcctggaggcggtgcaatacactgaacaggcaatcactgcccttgaacactggtatgctgctgtagagcacctggtgcagatgaacggggataccgtcaccgtggatcaggcgtggcgcattgccaatgatatggaggagcttgccctcgctatggaacacaccaccgttgaactcggagagcttgccatccagatcgcggaagaatgcgcataa

SEQ ID NO: 147211 - DNA, 138 bp, Enterobacter cloacae
atgttgctgcccccaggctaccattgtcttgattgcattaggatttgtcttaacaagagccgactgtcgcaccaggtcaagattttcattccctttgtcaacaattcgctgccccactccgagggagccagccgttaa

SEQ ID NO: 147212 - DNA, 990 bp, Enterobacter cloacae
atgaaaagtgtatttgactcctccgatggggggaaatcagtaccggaaaagtgtctgcatattgggttgatattatggccccgttattcacttctggcggtatctggattgctggaagcgctgcgttatgcagcgaaagctcaggataaattagcatttaaaatcagcctgataagtgaatttcctgatatcccgattatcagcaatgcggggattatcatgaggccggattctccccatgcgccgccggacagttttaactaccttgctgttatcggcggtgaattgcagtatctggacttagggtatcagggggataaagcgtatctggcacatgcccaccatgccggggttccgctcattggcattggcaccggcagttttgtcctcgcacaggaaggattgctgaatgaacgacgagcgtccatccatcctttccaccttgatgcatttcggcaggctttcccgctggtttatgctgagcaagggtatgatttcatcgacgatggcgatgtgctgacctgcccgggcggtatttccaccctgacgctggcaactgagcttatccgcgcccatgccggggatgatatcgccagcaccacctgtcagcgtttgtcgctcgttccgcatgaaattgccaccccacgtccggcgaatcttgcgcttatccctgactcgcggttgcgccgcgccgtcatgctgattgaacagttcctgacccggccgctcactaccgccgggcttgcgcgagaagtggcattgagtgaacgccagctcaaccgtctgttccacgcagaattcggcaaaacggcccgcgaatttatccgcagcgccagactgcgctatgcttgctggctgctgaagaactcgcagcaaagcgtgacggatattgcgcagcgcatgggattcagcgattgcgcgcactttattcgtcattttcagacggagtatggctgtacgcctggggtgtggcgcacgtcgcagaattaa

SEQ ID NO: 147213 - DNA, 1104 bp, Enterobacter cloacae
atgaaaaagcctctattcatctgcgtggtgttagtcatgattattgcttcagctgccagtttaccgtttgtactgaatgccggatttggccagccaccgcagggtgcgcagctctctgaagtggaggcctctccgcactatcgcgacgggcaattccataacacgctccctacgccgggctttaccgggcaacaaaatatgctggtggcgtggtggcagttccttacccgtaaaaccgaaaacgcccgtcctgcgcagccgctgccgctggtgaaaaccgatctggcgagcctgtcgcctgaacaggacacgctggtgtggctcggccactcctcctggtatatgcagctggcggggcaacgaatcctgatcgatccggttctgagtaactacgccgcaccgttctccttcctcaataaagcctttgcgggggagtacccgtggcgtgcggagagcatgccggagatcgacctgctgattatctcccacgatcactatgatcatctggattacgccaccatcaaggcgctgctgccgaaggttaagcgcgtggtcaccccgctgggcgtgggttcgcatctgcgctactgggggatgaaccctgagattatcgacgagcgggactggaaccagtcggtacgtatcagcgatgcgctgacggttcacgtgttgccggcgcgccatttttccgggcgcggcattaagcgtaaccagaccctgtggggcagctttatgtttgtctctccggagcagaaggtctactacagcggagattccggttatggcccgcacttcaaagcaattggcgagcagtttggcggagtggacttagccattatggaaaacggccagtacgaccaggactggaagtacattcatatgcatccggcggaaacggcgcaggcctcggcagatctcaatgccagagcggtcgtaccgggacataacgggcgttttgtgctggcgaaacatacctggaacgatccactgatccagctggcgaaagccagtaaggataaaaactaccggctgctgacaccggagctgggcgagcccgtgctggtgagtgataccacgcaacaatttcgcgagtggtgggaataa

SEQ ID NO: 147214 - DNA, 1308 bp, Enterobacter cloacae
atggcgcttgccagacaaaaactcacctttgaacggttgcgtaaattcgagctgactgacggaaaatcacaagagtttctttgggattcagacgtaacaatgctggcttgccgtgtaactaaagggacaaaagcatttatcttccagagtgtgtttcttggtaaaactctacgtatgacgattggcaagattagtgactggaaaattgatgatgcccgtagtgaagcacggcgacttcagacgcttatagatacagggatagatcccagaattgctaaggccgagaaaattgctgccgtagaatcacagcaggctgaatcacgcagagggaaagttatgttctctgccccatgggaagaatacctaaaggaactgaaaacgggcatcagtgccaaaactaaacgcccttattctccgcgataccttgcggaccatatcaggctttctgaccgtggtgggaatgtcagaaaggtgggtggtggtttaactattgccgcgccgttagcatttttccttgatttaccgctatctgaaatctctccagttctcattacagagtggctaacaagggaaaggcagacccgcccaaccgttacggccaatgcttaccgtatacttcgtacattcttgaaatgggtaaatgaccataagctgtatcaaggcattattctttccgacatcacgcaagatcgcaatgtcagaaaaatggttccggtttcagccagcaaggccgatgactgtcttcaaaaggaacagctggaaggttggttcgcagaagtaaagcggctaagcaatccggtgatctcaacttatcttcaagttcttttgctgacaggtgcaaggcgtgaggaaatcgcatcccttagctggtccgatattgatttcaaatggtccagtatgcgtattaaagataaggtcgaaggtgaacgaacgattccactgacgccatatgtctcatctattttgtgtgaacttgccaagctttcgaatgttgacactagtactgacggctgggttttctgtagtgatagtaagagcggtagaattgttgagccgcgaaaggcgcataatcgagcattaagtcaggcaagcttgccacatatcagccttcatggtttacgtcgtagcttcggtactctggccgaatgggtcgaagtgccaacaggaattgttgctcagataatggggcataaacctagtgctttagcggagaaacactatcgccgccgcccattagatttattaaggaaatggcatgaaaaaattgagaggtggatcttacagcaagcaaattttgcaaaaaaataa

SEQ ID NO: 147215 - DNA, 3216 bp, Enterobacter cloacae
atggcgaaacctgaaattgcaactgaaagaacccgtctgagtattccctttgacgatcgccaacgtgcaatacgtgcggccggcaaactggctgatggcagtaatgctctggactacgtgaaggaagaaaaggtgtggtatgcacagccgggggccaacctgagccggctgaaagagtggatttttgaccccaataaggtgatcgaagaaccgcccctggatattcaggccattgaagatgaatttacggcgtggcttgaagagcgcggtgccattatcaaagaccccatagagttcgatggccagaagcattatgtcgatacagtggacggtaaagctggttcaagaaagggggtgtatgccgctttcctggatggccggcctgcagggtggtacagggactataagaacggtggtgaaattcagaaatgggtatctaccggcgcagcccctaaccctgaacaaatggccatgctccgtgctgatgctgcggcaaggcgtgaacaaagagctgcagcgcaagcggataagtttgatcagaccgctaaccggttgatggaagaatataaccggcttccggatgccacgggagatctggcatacctgaaaaacaaacaggtcattgccgctaacggccttaaagctgatgagcggggcaacgttgtgatccccctgtttaatgctgatggcgagttcaggacccttgagcgcatctggtccgacggtagtaaacaccttgaaaaagacggccaggcatgggggagttttttcgttgtgggtggccaactgaaggatggtgacaacctgctttatgccgagggatatgcgacagcagccagtatcagcgaagccatcaatcagcctgtgatcatgacggttaatgccggcaacatggtgggagttgctggccgcctgaaagacgcctttccaaacagcactcattacttccttgctgacaatgacatttataaagacgagaacgttggactagaaaaagcgacagaagctgcagagctgactgccggccatgttctggtccctgcctttagcaacccgaaagaagggcttacagactacaacgatttgcatgtctctgaagggctggagcaagtcagattgcaggtagaaggagccattaatcaaataaacagggtagacactatgccgactgataacccgaacattactgacgttaatcacagctcgactgacagcgctgccgttgcagcccctgaaaatgccgcgccggtggccagcgcccctgcagctgctgaaccggtggaagccgcgccggtggccagcgcccctgcagctgccgaaccggaggaaaccgcaccggtggccagcgcccccgcagctgccgaaccggaggaaaccgcgccggtggccagcgcccccgcagctgccgaaccggaggaaaccgcaccggtggccagcgcccccgcagctgctgaaccggaatacgccgcaccaacagatcgagacggtgatgatgaaaagagtaatagcgccagtgatcttgaggcgtatgccgctatgatggcctttggcggtgaaacaactgacaccgctcagcaaaagcctgaagggatagcgcccagcgaacctgtagctaataccgccccggctgaaaatgaaaccgaggagaagaagaaaaaaacaaacgaagaactggaaaacggcatacgctgggcaaccaacgataatgcagaaacgcccccaaaagaacgtatagacctggaagggttaattgcccggtttgggtacagagcagagaaagactatacggcgtatacgcttgatgggcaggatgcgttttacgattacggctcacatctgcgtatggctacccctgaagccagccagagtgacgagatgatcctggcggccgttcttaccgcggataagcaacatcatcgtggtattgaaatcaccggcagtgacgaatttaaagagcgagtgtttaaccttatcagtgaatacaacattgaggtgaaactgactaacccagaacaaagggttaaattgctcgaactcaaaaaagcaaatgaaacagcaaaagaaacggcaaaagaaaatgttgctgattcaaaagcgaataagcaggaaggggtaaacgaaaaggcaaattcatcagttcagcaaaatggaatgcgctgggaagaatcggcctctgtacaaccgaagaagcagaatgcatctgatactcaaaaggaagataaagctgcgggtgaatcctgggagaaaggcgttatcgtcgcgcatggacgtgctaagtatgagtggaaagatgatgaatccatgaactactttgtcaccctcaaaaatgaacatggagagaagacactctgggggaaagaccttgagagagcggttaaagatgctggtgtagacaccgaacgtcttgttacggtcagaaagctgggatttgtggatgttgaggtgaatgcacctgtccgtgatgaaagcaacaagatcgttcgttatgaaactatccagaccaaacgtaatgagtgggaagtaaaacctgtatacccacagccaacagcagggaatgaacaggcctataagccttctgaactggttccgtatgatgctgcaaccttccagaagctccgcacaacaattcagcagattaccggtgttgatctcagccgtgaggccgtgcctgaaaaagaactgtattggttcctgccgaatggtaagccagctcctgaaagcatgacaaaacccacaggctataaactccctcaagagtcaaaaaccgcgggtacacctttgctggtcgcaccgcataaaaaaggcgaacgacctgattattaccttgttgagtctcgtaaaggattcatgcaggggatcgcaaaggataaggaatctggcgagtaccatagcgtaattggtaaagtgaacaagcgtattgataaagatggaaactggaaaacgtatatgacactttcagcaatcaataaaaattctgaaagtggaattgttttgcacggatacggccatgttgatcaggggggtaaaaacctgctttacaaaaacacaattgcaaatgaaaaacagcctcagcatttacaaccggcctcagatgaggtaaaaaacaaaacagtaatgaagcagctttttcatccttctaatgctgcaaaaagaaaagatgatgaaaggagagaacagactcatgcaccagtcgcaaagtcagcgcctcggccataa

SEQ ID NO: 147216 - DNA, 159 bp, Enterobacter cloacae
atgagtaacctgctgctgtggtggaggaatctgcggcatgggtgcaggaggcagtgcagtagttggctgctgttggggctgtgcctgtggttgttggccttgcgcctgctgctgaccttgttcctgtgctgtttgctgtggtggctgttgcacctgtga

SEQ ID NO: 147217 - DNA, 252 bp, Enterobacter cloacae; identical to SEQ ID NO: 30842

SEQ ID NO: 147218 - DNA, 549 bp, Enterobacter cloacae
atgaaaattaaactgaccgctgtacgtcatgcattctgcaatttgtttgaagccactgacttcgaaggagacggaaacttcaaattccgtgacacctttctgatccccaaaaacagtgaactcgataaagaaatctgggcagctgttcgtaaagttgcaaaagatgcctggggcgataagtacgagaaaatactggagtctatcaaacatatcccgaaccgcgccggctaccgcgacggtgacactaaatccgagtatgaaggctttgagggccacatgttcttagcggcatcaaacaaagccagacctttggtcattgatcgcgaccgttcccctctggttgctgctgacgggcgaccttattccggctgcttcgtcaacgcaacggtgaccgtgtacgcgtatgacaacaaagggaaaggtattggcttctctctgggtggcgtccagttcttcaaagatggcgatgcattcagcggcggcggagtggcaaccaccgacgacttcgacgacatcagcgaaggtgcaaacgcttccgatttggtttaa

SEQ ID NO: 147219 - DNA, 225 bp, Enterobacter cloacae
atgcagtggggtaatgtggataatgccaggggaacctactcgttcccaagggcattcaatgacacctgctttgccgtctttgccacaaataaagatgggcagggcggcgcgattgataacgcttatggttatccggtaagcaaaacgcaattctatctggccagcaaagcgaactctggcgctgataccgcatacggcatttcatggtttgcactggggtactga

SEQ ID NO: 147220 - DNA, 423 bp, Enterobacter cloacae
atgactgaacaatattactacagctattcggcaaaaggttttttctggctgagtacagatgaacttaagggaaacgatattcccgctgacctgatacccgtcagcgaggaagagcacgccgcactgttcctcggtcaggagcggggaaaatacattaaccatactcctgctggccctgtactaatagatcagcccgactatacacctgaggaactcgttgcgcaggcggaaagcaaaaagttacgtctgatgcagatggctaatgctgagattgctccattgcaggatgcagttgatttggggattgcgacgacaaaagaaactgtcgcactcaccgagtggaagaaataccgcgtcctgcttaaccgtgtggataccagtaaagcgccggatattaactggcctgaacctcacgaagattaa

SEQ ID NO: 147221 - DNA, 219 bp, Enterobacter cloacae
atgatgaattgtccgaaatgcggacacgcggcacatactcgcagtagctttcgtgtatcagataatacgaaagagcgttattgccagtgccaaaacataaactgtggaaccacttttgttactcatgaaaccgtagtgcgctttatcgtaacacccggacaggtcgattatgtgcctccgcaccctttaaacagtggtcaggggcacatgaatttttga

SEQ ID NO: 147222 - DNA, 705 bp, Enterobacter cloacae
atgacgaaaattatcgaacgcgggatgatttttaacgctgagatggtgcgcgccattctcgacggccggaagacgcagacgcgccggataatgaaggtgcagccgcagccatcgaaatcacgaccgggagatttttggttttcatcgaaaaaattagaaagcatggtgcacgtttctgacctcgttccaggtaactcacttatttccgattgccatcttttctttcaagagcactgctgcccttacggtgctgtcggcgatcgcatttgggtgcgggaaacgtgggcagaggctggagccagcgcgccggatctaaaactttatcgcgcgaattaccctgcgcatgttccaactcattacgagaacgtgccgccggctgaggatgtccgctggacacccagcatccacatgccgcgctgggcgtcccgcattgtgctggaaatcactggggtaagggttgagcgcctgaatagcatcagcgaaacggacgcagaggcagaaggcatcgatatggaggcactttttgactcccaggactgttacgactgcattgcaggccacaacatgaccggaagaccaacggcaacgggcgcatttaagtacctgtgggaatccatctacggttctgacagctggtatgcaaacccatgggtctgggtgatcgagtttaagcgtatcgaaggagatggctatgcgactgattaa

SEQ ID NO: 147223 - DNA, 159 bp, Enterobacter cloacae
atgcagaccgaatgcggatactgcggcaaaccggttaaacccgaggaggtggtcaaaagcacccttctctatcgcaacggctcactgcttgcgcgcaaagagaaagagtactgttccagacgttgcgcttcgcacgaccagatggctcacgaaggctaa

SEQ ID NO: 147224 - DNA, 198 bp, Enterobacter cloacae
atgggttcgttattcgcactcgtcctgaccatcagcatgaccaatggtgaatttcaggatgttgttctcgatgtttacgacgaccagcagcaatgcgagcaggcagccattgaccagaaggtgtcaggtaactgctatccagttgaaaggatcgtccgcaacgaagaagtaccagcggaaaccacagttaagttctga

SEQ ID NO: 147225 - DNA, 207 bp, Enterobacter cloacae
atgaaagctaatccagcagtaccaaacagcggtcgcgccgttcaaatgcgcaaccaacgtaccggcgcagcatggctggtttcttttaactacagcgaaggcacttactggcatgagccgcagggcaatctgcgccacattcgccgcccttatgcctctcgcagcatggagccgcatctggttcccgccggaacggggctgcactga

SEQ ID NO: 147226 - DNA, 216 bp, Enterobacter cloacae
atgaaattcaaactcatctcaggcaatcgcacgattgattcagttgcctacgatttggcgctttcgattgcctcaaaagaaacttcaacaaccactccggccttagtgttggcgaaggtcatggagctgatgcctgaatgcatcaagcttgtttccgaaaaagcttccgaagaaagcaagctgaagaccggtaaagttcggccgcttgtcctttaa

SEQ ID NO: 147227 - DNA, 276 bp, Enterobacter cloacae
atgagaggtaaatttcgattcacaacaataactggcgatgatgatcgtgttgttgtgattcacagtagaagcgttacctaccttgaatcctacgatagtggggcgggcggtgaggtggtgagaattgttttgaacagcggccactcaatttatgcaagcggctcgctggaagatgttatgaccgagctatatggccgatctcttaaaggacaagcggccgaactttaccggtcttcagcttgctttcttcggaagctttttcggaaacaagcttga

SEQ ID NO: 147228 - DNA, 432 bp, Enterobacter cloacae
atgagtttactaattactaaaccttttagtcaagtatttgcttgtttagcattaactaatcaaaatacgcagatgagcacagcagatatccgtaggaagcagctaaaggcatggtttgccgataagtcgctaccagaaaaagagaagagctatttatcacaattgataaatggtaaggcctcctttggtgaaagagctgccagacgaattgagcgcgactatggtatgcgcccgggctatctcgatactgatgagcagcatcctgacaaggccagcaatgataccgttcttctgattgatgaaatggagctgcttttgcactaccgcgcctttccggactcggagaagaaggctgttcttcaggaattcaaagctaaacacgacaagtacaacaagcttttccaagagctgcttgcttcccgcaataagtaa

SEQ ID NO: 147229 - DNA, 261 bp, Enterobacter cloacae
atgcaactcaaagattacttatcccagcagcgcggcaacgccaaatggttggctaaaaagctgggcatttcgatgccgtatctgtctcagatggcctcatccacttccgcaatttcgccggagagagctatcgaaatagagcgtttcacgaatggagtcgttaaccgtgccgactgcctgccagagaaatggatgcgtatctggccggaatacacccctgcgaacatatgtcctgtcgagggtgcccaaaagaggacttaa

SEQ ID NO: 147230 - DNA, 558 bp, Enterobacter cloacae
atgcaaacactttcttttcaacagaataacagagcgccaacagaacgcctgaaattccagtttcaacaggatgagcagagcgaccaacaagtcgatcaccgcgcaatctgttctgccgttcgcgcctgggccgcggatgagggtcgtgtggcagtcgcattaataatccgggaagcggtagaagaggctggcctggcggatatcgacacatccgttaatgccgatgtgtggaacgtgaaattgttccgatggttagaccagccagagaaatcggcagtttaccgggcgaacgtcgagcagctggcaccggtaattatctccgttctgccgctggcgtaccgggatcgggttgttaagcacgataacttcgcgcttcgcatcgccaagtcggtgaaagaggatgctgaggccattcaggctgtcgttctaaaagcccctaaacaggagcgctggaaagagatcagcgaaagcatcgttgctaagtacctgctggatgggccggattcagtcgcgccaattatggcgatggttacaacgatgctaagtggagcgatctga

SEQ ID NO: 147231 - DNA, 258 bp, Enterobacter cloacae
atgaaccatatcgagttcatcgaaaagcatgtgcgtgaagagcttatcaaacaggggttcactttggcggtcgctcaggggggggcatttcaggcagtcgatatgtacaagcgtatgtctcaggccagtcgtaaggggaggatttttgatgatgtgttacgtcacgcaaagctatgggccgagaagcaacagacggcttccgataagttcgcagaacgcagggttaaacggaatgagcagcaaacagggttgttctga

SEQ ID NO: 147232 - DNA, 927 bp, Enterobacter cloacae
atggccggggactggataaaaatgcgaacgtcgttggtcaccagcccgaaggtgaacggcattgctcgaatactggagcggtcaacggaggtgggaagaatgctaacaaatagccataacaccacgttatctgacgttgtaacgcgtaacgtaacgcgtaacgttacggtgtcgttactgctaacgctctggtcagcagcgaacgaacatacgcgtaacggagtgttcgaaaatgcagacctctctgacattgatgacattgtcggcgtacccggttttggtgccgcattgtctaccgttggctgggctatccacgatgcgcaaagtaactgcgtcatccttcctaacttcaatgaatacaacacgtcaggcgatatgcgcagtgcgtcagcaaagacaaatgctcagcgccagaaggagtttcgtgaacgcaaaaagcaacaggaaagtaacgtaacgcgtaacgttactaataacgttacgagtaaccgcagagaagagaagagaagagaagatctaaaacaagagagagagaaaggcgcgggcgacgcgtttttgcctcctgaacaaaataccccgcttgaggatttccagccaggcaccatggccggttacccgcagattggcaaattcccgatcaccagcgactggatgccacagcctgagttcgccagacgcgcgacgctctggggtaagaatctcggcaccgagccgggttacaccgccgaagaactccagcagttccgcgattactggtcatgcgacggccgcgttaagcatcagcagcagtgggaaatggcctttgccgacagcctgctgcaatcccgcgcccgcatccaaagggctaaacctgccggagcgcgggatcccaaccgcgtctctgaacctgataaaaaaatcccggcagggttcagggggcaaccatga

SEQ ID NO: 147233 - DNA, 714 bp, Enterobacter cloacae
atggaaaccgtaatccaagcactggaaaaaatgggccgggcgacataccgcgaattggccgctcgtctggatattgagcctgtcgaagcactgaacatgctgcgtgaacagcgcgatcagggtctttgtgatttctccgatggcggctggttccttggttccgcaaagtatgcgaaacgcgttgcttgcgtgccaccggcaaagcctgcactgcatggcgaagcgccagagcccgtagacccggcggtgattaagcaactcctggcgaagaacggcgccatggataccgtatcgctggcagcagcggtgaaccgcaacggtcgcggcatgacctcagcaatgcgcgcgctggagcgccagggcatcgtggtgaagaacgggcagggaaaaggtgtcacctggtcactaccggcgacaacaacggaaaccgctgaagaaccagctgcgccagcagaaattgcattacctgaagtagccgaacaggttcaaccgaaggacgttgcgcggattgtcagcgagatcccctcgttcaccgaagggcgcgacgtgtccgtggccattccgacggtccgggttatctcccgcgaaattcgccgcgcgaagagcaagctggcaaacctggagagattgcgcgacgccgtgcgtgttgttggccgccataagcacctcgtgcagcaactggtaaacgcggaggtcgaaaatggcaaggcctaa

SEQ ID NO: 147234 - DNA, 261 bp, Enterobacter cloacae
atggcaaggcctaagacccatcaggaacgcgcgctgtttatcgcctggatcatcgagatggtgaaaaagtatggccacgcgacgaccaaagacatcgtggagatgtttgggttgcatcgcaccaccgccgagaagtacatccgggttgccataaaacagggctcactaatccgccatggacgctgcggcatcttccgcgacgaacgcgcagttatcgactttgacctggaacgctatacgcatcggggagcatcaaaatga

SEQ ID NO: 147235 - DNA, 330 bp, Enterobacter cloacae
atgaacgattcactgaacaacaaagagctgatcgcagtagggcacgagtttgcgaagacactgagcagcgacacgccgatcatcgatatggcgaagattgtttcccgactggccgaacggctggattgcaccaccgcggcgctgcgcgagatgacgaagcagcgcgacgcgctggaggcgcgggaggtgaagttggctaagcattccgttactgaagtcatgctcatgagcggatttgaccgtcagtatgcggagggctggtgcgctggcaatgacaacgcgattcacgagattcatgtggctggcatccgcatcaacggggaggggtga

SEQ ID NO: 147236 - DNA, 258 bp, Enterobacter cloacae
atggacccgttactgcaatacgcttgcagccgggtggttgagctggaaagcctgttgctggtggatgtgccggaaactgtctggcctgctgaggttggcctggtattctcgcagctggaaaacgccggggatctcccggcgcatcaccagcgccgcctgaagcatcacatcacccggatgtggctggagagcatgccggtaccgtcaattatcgttgctgcccagtcgttggccgccgccatggaggaatacgcgtga

SEQ ID NO: 147237 - DNA, 294 bp, Enterobacter cloacae
atgcgtgttgattatctgctgattggctatggacgggacggagagataaaacaggaagaatgtgatagtggtgacatgctcgcgcctgctctgacatttgccccagcaaatccttcttcccgtcaatatccagagcaaatttttgatgtcaaagtcatacatcataaaggtaacagatatgctgttgctatagctctggaggaaggcgaagaattacccgcatcaaaaattaacactctgattgaatcttcaggcataacgcctgtacctaatgagatttatggggaaatctaa

SEQ ID NO: 147238 - DNA, 195 bp, Enterobacter cloacae
atgagcattgaggtcgccgaagcgatagatatcgtcacggagggcggtaaattcgtcatcacatgcgaggatggacgaattactggccttgaacgtgtaagggacaatcagtacgttctttctctcactgagttactcgatcttttgcgtgaagctggcttccgcattgacgggcaagatagcctactgccataa

SEQ ID NO: 147239 - DNA, 870 bp, Enterobacter cloacae
atggcttccagcaaaactctcgaacaggcaattgccgacatcaccatctggcgcaaaggcgaacagcgtgcgccgcataagcccttattgcttctgtacgtgctggcgaactatcagcaggggcatgtgagactgtttgattacggaaccgaggtccacgagcaactgcttagcctgttagaacgctttggcccacagcggaaggcgcattacccgaatatgcccttctggcggctcaagagggacggattttgggatcttcagaacactgagttctgttcgaccaccggcagtaagcaaccgcccgtcaaagaacttgtggaacataatgtcgcaggtgggtttgatgaagaacactttgcattgctgagtaagaacaaaaacctgatcggctcgctggcgcagcagatccttgaagcgcattttcctgaaagcattcaggaggagatcgcggatgagatgggttttgatattcaacagatccgtaaggttcgcgatccgctgttccgtcagcaggtgctgcgtgtatataattatgaatgtgccatctgcggatttaacatgcggcatgataacgcctctgttggacttgaagccgcacatatcaagtggaagcagtttggcggaccttgtgagatcccgaacggactggcgttatgtgcgattcatcataaggcatttgatatgggatcgattgggctggatgagagtatgcgagtgcttgtgtccgaggcggtgaatgggagtgggatcgttgggcggctattctgggattttgccgagaagcagattgcgctaccgatggtgaaagggaattatccaagggaggggtttgtggagtggcataggaaggaggtgtttaaagaatga

SEQ ID NO: 147240 - DNA, 798 bp, Enterobacter cloacae
ttgcaaaacaaaatcaaagaacttcgtacccaactgtcaatcactcagcgtgaattggccgatatggttggtaccagccagcaacagattcaacgtatcgaaacagggaaagttgcggctaagttagggctggcacaagcaatcagtgctgttttaaaaaagccgttgaacgctgtttttcctgatagtgacaacctgctacagaaattgcgtaatcaaggtagtcgtagcagcgacgaactgaaagatattgccgcaagcggaattgagatggatggccgcttttggacggtaaagctctggttacgggggcagaaagattatttgctactacccatttctccggctgataagcgtcgtttttactcatactttgaagaaagcactgttccagatcatgagcgtttttttgttttcgattcagagcagcatcgttatgccataaatgcccgagaagtcattttccaccaattcttgtttgatggttttccacctatccctgatgacgaggacagcgatactaatgaaggaagctatggtaatgtccatattacaatggtgaacggtggcccagtcattgagctatgctgtgagtccgaggtatcggagaacgatgaatttgacgatatcggtcagttgaacgcattgtttgatactttggagttagagcctgaatcaacagagcgataccagataaccgatgaggatggagaggatgctttcatccgtattggctctgttgcgatggtccgaatctcgctcgatttactggattcggttgaggaagataatgactga

SEQ ID NO: 147241 - DNA, 834 bp, Enterobacter cloacae
atgcaaactgaagctgaagtattaaccaatcatagcgagctaatttgctcgaccagtattgaacgtattgttactggtcgtgataccgcgcttaaggaaattgaatctctgattcttcaacttgaagaaatctcccgactgacttccatgattggtggcaatactgcggatcactgggcgatgagacagggtggctcctttgactgctggttgatgcaaccagtgggcaaagcgatgccagtcatcacccggaatatcgaccgtagtatctggcgtgacctgatgctgaaatccgggatgttggccttgatggatgccgaagcccgcagtcagtgggctaagaatctagaggagggcgatctcccggctattagcgaagccaacatcctgaatacctttgaacaactccaccacaataagcaagacgttttcgaacgtgggattatcaatgtatttaaagggttaagctgggactacaaaaccaataatccctgttatttcggtaagaagattatcgtcaacaatctggtgaagcatgacagatggggctatagcctgaactggggctggcgacgtgaccagcttgccgatctggaaaggatgctccgcctactggatggtcaaaccattccagatagccgacatgatgtgtccatcaggtttatggattttatccgcgataatcctcgtgcgcagatatttgaggacgacctcttcattattcgctatttccagaaagggagtgggcatatcacgtttaagcgtttggatctgatcgaaaagatgaatgatatcgtggcaaagcactatccgaaggctttgccagcaagatga

SEQ ID NO: 147242 - DNA, 318 bp, Enterobacter cloacae
atgagcaacactacatggggcctgcagcgggatatcacgccgcgcctgggagcacgtctggtgcaggagggcaaccggctgcactatctggctgaccggaccagtatcaccggcaagttcagtgactccgaatgccggaagctggatgaaacattcccgcactttatcagccagatggaatcgatgctgaccaccggtgaactgaatccgcaatacgcccactgcgtcaccctgtgccacagcggttttacctgcgaagccgacacccttggcagttgcggctacgtatacatcgccatttaccccactcagcgctaa

SEQ ID NO: 147243 - DNA, 459 bp, Enterobacter cloacae
atgacgacacaaacacaatgcgaattgatgtgcgctaatgaacctcaatttgacctcactgcaacacccgtacctgatgaacagcgcatcgatttctggactaagtattttggcactatcccgcagtggataaccctggagccgcgtatttttgcctggatggagcgtttctgtgcgacctacagcggcggtatctggtcattctgtaccctgagtaatggtggcgcatttatggcccccgagtctgacagtgacgataaatggcatctgtttaactgcctgaacggcaataatgcccaaatgagcgcagaagctgcaggcattgcggtctgcctgattgaatacagccatcacgcctgtcgcaccgaatgcgatgccatgacggagcactattacctcctgcggaactatgccctgcagcatcctgaagctcacgccattctgcgcatcatcgactga

SEQ ID NO: 147244 - DNA, 813 bp, Enterobacter cloacae
atgcgccacttcaagctgaactacacccaaattgaggcattcttccagcgtcagatcgacgaggacaagcaaatcctggtcgaaggaaattcggttaaacgccatgtgggtggccgcagcagctacagcacaggcagtagcagcacgacgttatctgctcccgcgcccgctccagtcaaaaaggaatccccccatccagcgcttaaacatggttgtccagcaagtcgtttggaagaattcctagcctgggaaaaagcgcaccttgggattttgaatcgtgtcaaaatgccccagcgcgttgccatgttcctgggaacctgggaagaaccgaatgcggtcaaacctgaacccgtggtggccgaagaaccccaggctgaagaacctcgagccgaacggtcgctggctgaagaacgcgaacataaagaagatgtacccttctatggccgtcgccgtcgtgatcaggggaaattccgtgaagatgtgatgcttaactgcggtggccgttgcgtctacacgaatgccattgcggtacgctgcgaagccgcacaccttaaagcccacgctcgcaaaggtggcgcgagctttaaaaacggtctgctgctgcgcgctgatatccacaagctctttgacgcgggactatgtgccatcgatccgcacacgcttaaactctggttcgcgccagacctggtaaaaaaagacgcagatctcgcggccattgatgggataacgatgcgcaaaacgctgctccctatcaacaaagacaacatcgaagaccgtgggatgccttcgttaagatcttgctggcatgattaa

SEQ ID NO: 147245 - DNA, 1005 bp, Enterobacter cloacae
atgcaagatattaaactttcaacatttggttcctttattgccggtggtgaagtggtcaggcggcagaataccgtcggcgcagaagaggttaccctgcgccatcaggcatatgtggaatactatattccttcagacctgtcggcagatcgcccggctatcattctgacccataattatttcgcggcttcagcctggttaagtaacgttgatgggaaagaaggctgggcacagtatttcctgcgtaacggccacccggtatatgttatcgatccaccagggtcaggacgtgctggttttaacccggatgatatcgataatgcccagacgctgattgacggtgcgatgtctgttgataaagggttctggccaggtcaggacagcagtgcctgggctgcgtggaatatggggccagaatggggggtgcccggtgatggtattcttcagggcaatcagatgcccggtgatgaggcctccagaattcgtctgctcggtacgcttatcccgaataaaccagtctctgatgccatactggatgacactttcattagcatgcttgaaaaggtcaatgatatgtccgggcccgcagtttttgtggcgtggtcaatggctggtggcttaggacagcgtctgctgctaaagcgcccggaactgttcagagccctgatcctgctggatggctacagcggcgaaaaccggtttccgcagcctggaaaatggttcgataacgggccaatcagtgaatataaaaagttagcggccattatggccagaaacactattccacttctgaacgtcaacagtgccggcgggcactattctaataccggacattcaggtgagctgaaccagacgctggtagctcaaattcgtaccgagaatggcaaagccgacagcgtcttcctgcctgagcacggtattccgggtaacagtcacatgatgttcttcgaacagaacagcgatgatgtcgctgagctgctgaaaaagtggatagcagatattgcctga

SEQ ID NO: 147246 - DNA, 726 bp, Enterobacter cloacae
atgaaaaaaaagttaaccttccttaacacgggaatattactgggtgccagcctgtttctgaccagcgctcaggcaaaagataaccagataactgcgccggaaactcagctgtcttatacatcctcggtaatctcatcagccggtgtgaaaaatgtcagaaacgatactctggatccatcagatgtactttttatctttgccgacctgcatcctgatttaattgcttccagcaacacaatgacaccgtctgcgctggcagccaacgcagggggactggcaaaagttgctcatgccatcaaggctccgtccctttttctgaccgtgccaagaaatggaaaaccgggtgaactcctcccggaactacagccttacgcgacggcagaaaataccatttaccgggaaaatgcggacccgttcagggttaagcaaatcgttgatgcgattaaaaaatccggaaaacacacccttatcgtttcgggctatacgtcagaggttgccgtcatgctcaccgcgctgggcgcgctggataacggatatcgggttttgatcccggtggattgcatcggtaatcgctcagctcgcaccgaagatgcagctctggcccggactgcacaggcaggcgcacaaataacgtccctcgctagtgtggcagcgcagctggcacctgatttttctaaagagcccggaacgaccattctctccgttatcctggatgccaaactttaa

SEQ ID NO: 147247 - DNA, 894 bp, Enterobacter cloacae
atggctaaagataattacaacgacctcgcggcgttcatggcggttgcctccgaactcagttttacccgggcggcagccaaaatgaacgtatctccctctgcgttaagccataccatccgcaatctggaaagccggctgagtatgcgactatttacccgaacaacccgggcagtggccctgactgaagccggcattcgtctacagtcagggatttcgcccctgatggatgcaattgacgaacagctcgatgcgcttaacactctcagggctaagcctaccggtaccatacgtttatctgcccctgaattcgccgcccggttttacctctggccaaagatcagccgattcatttcagactatccggacgttacggtcgaaatgaacataagtaacagcctgcttgatatcgtgtcagaaaattttgatgcaggcattcgaatgggggaaaacttggctaaagatatgatatcagtaaggataagtccggatacgcgctatctggtcgtgggcgcaccagcctatctggacaccctccaccttccaacgcatccacgggagcttattcaatataaatgcattaattaccgcttttcgctggcaggtcagattgttccctgggagtttgcccgtgacggcaaaatcgtcaaagtccgtgtggagggtcccctgatatttaatgacgttgagcatgcactgctggctgctcttgagggggttggactggcctatgtgcatgaagagtatgcacgcgagtatctgcggaatggcatgcttcaggaactgctggctgactggtcgccgctctgggaaggcctgcatctgtattaccccaaccggcatcatacttcatctgcttttaccgcatttgtagaggcgcttagatttcgtgactga

SEQ ID NO: 147248 - DNA, 987 bp, Enterobacter cloacae
atgaataataaatttaatgctgagtcgacaagtggagaagtcctaaaagatcaagacctttccggaaaacggatactcgtcaccggggcatccgctggccttggcgtggagaccgccagagcgctggttgcacacggtgctgaggtgttcggcgcggtcagggatcctgaaaaaggtaaattggcaacgcagattgttcgtgatgccgcagtacagggtggcgggaaattctcgttgatacagctcgatcttgctgacctgcacaatgtccgcttatgtgctgccaggcttaaggaatccggtttatccctggatatcattatcgccaatgcaggggtgatggctacgccatacggtctgactaaagacggatttgaaacccagtttggcacaaactttatcggccatttcgttctgattaaccgccttttgccgctgttaaaaacaggcgggagggtggttattttgtcctcgggagcacactcgcgcgcaaatattgatttgaatgatatcaatttcatgcacagtacctatgatccgtggatcgcttatggccgctctaaaacggcaggcgcactctttgccctcgaactggaccggcgtgcgcagcgatatggaattcgtgctattgctgtacatccgggctccatccgcaccgaactgcagcggcactacagcgaagacgctcaggacgccctggtcgcctcaatcaatgaagccaacaggaaagccgggcggccaccgtttcgctataaggacatttcgcaaggcgccgcaacatcagtatgggccgcggtggtggcgcctgctgagcaggccgggggacgatactgtgaggactgccacgtcgcgcaggtgatggatggagagggacttcgggaaggtgtgcgctcttacgctgcagatcctgaccaggcgaaggccctgtgggacaaagcggaaaagctgaccggagaaaaggggccaagtttcgctgaaccggagtaa

SEQ ID NO: 147249 - DNA, 981 bp, Enterobacter cloacae
atgaaaacacgtaaactgggacaggatcttcaggtatcagccgtgggtttcgggtgtatggggctctctttcgggtacgggcctgcggtcagacaggatgacgccgtgcagctcatccgggccgcgtaccaggaaggcgtcacgttttttgacaccgcagaagcctatggtccggaaaatgaaatgctgctgggagaagccgttgcgcctttccgccaggaggtcgtactggccacaaaattcggctggaaggaaggtaacgccaggacaggactgcttgacagccgtccggagcgaatccgtcaggtggcggaaaaatccctgaagctgatgaaaaccgactatatcgatctgttttaccagcatcgggtggatcctgatgttccgattgaagacgtggcggggacggttgccgaccttgtgaaagaagggaaggtgaaacattttggcctttccgaagcagggcctgaaaccatccgacgcgctcatgccatcttaccggtcacggccgttcagagcgattattccctgttcacccgggatccggaagaacacattctgccgcttctgaacgagctgggagtgggatttgtgccattcagcccccttggcaaggggatcctgacgggagccatcacagcagatacggtcttcgaggccagtgatgtgcgtaacaacctgcccagattcagtgccgactcccgggataacaatctgaaaatcgccgcagagattgcccggcttgccgcgcgttttggctgcacagctgcccaattggcacttgcctggctactggcgcaaaaggactggatagtccctatcccggggacaaccaaaatacagcgtatgcaggaaaatactgcggcagcctcggtcacgctaacgccagaaatcctggatgaactgcatgcactcctgcttaagatgccggtgaaaggaacccgatataacgaaagggatctgaaactggttaaccgctga

SEQ ID NO: 147250 - DNA, 975 bp, Enterobacter cloacae
atgacaacccacttcaccgcaacgtccacgactgacgacgttctcagcaatattgatctgtccggtaaacgcgttctgatcaccggcgtgtcagccggactgggcgtggaaactgcccgtgccctggttgcacggggtgcatccgtaacgggtaccgcccgcaacctgaaaaaagcagaagccgccgtcagtgaaatccggtcggttgcccgaaactcaggcggctctctggatctccttgagctggaccttgccagcctgagtagtgttgtggctgccgcagatagtctgctcgctgcgcagcaacgttttgatattgtcatcgccaatgctggcgtgatggccacaccggaaggaaaaaccgctgacggcttcgaaacccagattggaataaactttattggtcattttgtatttatcaggcggctgatcccgataatgaatgccggaagccgtattatcctgctctcctcggctgcccatgccatctccgatgtggatacagacgatctgaatttcgagtccaccgcctatgatccatggctagcttacggccgctcaaaaacagccgtcgccctgcttgccgttgagctggaacgccggtacggcagccatggtattcatgctgcctctgttcatcctggcgctatccagaccgagctgcagcgccattacagcaaggaagtggatgaagccttcatcgcacagattaacgaagcgaatgtgaaaagagggttaccaccatttcagtggaagaccctgcaacagggagctgccactacggtctgggcggcagccgtggccagcgcgtcggatattgccgggaaatactgtgagaactgccatgtcgcgggtatcaatgacagcgagggcgtgaccgacggggtgcgtacctatgcccaggatcctgtacatgcaagcgcactctggaatgaggcggaacgcctggtaaaagagaagttcggcaccgcataa

SEQ ID NO: 147251 - DNA, 1593 bp, Enterobacter cloacae
atgaaacgaaacggtaaatttacaaaaacggtatcggcactgattgccactgcctgcctggctatgactctgcccgcccaagctcaggatacactggaagtcaccacgtctgcaggtccggtaacaggaacagtaattaatgggatcagctcgtggctcggtctgccttatgctgcacctcctgtgggtaaactacgctggcagcccccgcagccagtggttccctggaatactgctttgaaggcaaatacactggcagcaagctgtgcgcagaacgctgatctgggcgagttcgctagggccggaggaaatgaagattgtctttacctgaacgtctatcgtccggctgaaatgcacaacagtaataaaaaactgcctgttttcgtctggatccacggtggagggcttcaggtggggcagggaggagattacgatccttctaagctcgtcaaggagggtaagtccgttgttgtcacgctaaattatcgcctcggtatgtttggttttctgtctaaccctgggctggattcagaagggcacgaagcgggtaattacgggcttatggatcagcaggctgcgctgcgctgggttaagaacaatatatctgcatttggcggagatccatcgaatgtcactatttcaggggaatcctctggtggtaatagtgtgatggcacacatcgcagctccgggatcggcgggtctgttccaacatgttgtggcaatgagcggatcgggcattatgtcgcgtcatcctgcttttggtgctcctcgtcctctcgatgttgcgcgcgaaatgggtacaaaatttgccagagccgtgggttgtgacgccggggatgctgactgtctgcgcgccgtgccaactaaacggatcctggatgttcagcctgcctttgcacttaatgaatttatcattgacggcaaaacactgcctgtccatcctgcagatgcctacaaaagcggaaaaattaacccggttacgcttatcaacggaacaacgcgtgacgaaggccgctttttcgtcgcgctgccggaattactgacaggtaaagcgctgcaggaaagcgactatccagaatggattgaacagcagtatggtaaaacgctcaagacaaaggtgctggctgaatatccactcaagaattatgacaacccgagcgaagcttttgcagccgctgccacggacagcatgttctcctgccctgcgcgcgcattaaaccgaagtctggcagataaaatacctgtgtatgcctatgagttcagcgatcgcaccgcgccatcctatatcagcgcgacaacgttccctttgctggcagcgcatacatttgaactggcttatgtgtttccgggttttcacgggggaagcgatattcatatcagcctgaccccggcccaggaaaaattgtcgcaggaaatggtcggttacttctccacactggcaacaatgttcagccgtgagcagacctggccccgctatagtgcgaagtcagataatttcatgaccttcgcccttccgaaagcaaggattgtatcagggcatttcgccgatgctcatcactgcgagttctgggatcagcagggtctttactga

SEQ ID NO: 147252 - DNA, 894 bp, Enterobacter cloacae
atgatccgcaataatataaatgacctcattgctttccttgccgttgcgagagagcgcagctttacccgagctgctgcgaagatagggatctcacagtcagccttgagccataccatccgtaatcttgaaaaaagactaggggtacgtctgctaacccgaaccacacgagccgtttctcctacagacgcaggtgaaaaactgttacagggcataggcccgcatttcgacggcattgaagtgcagcttgatgcgcttaacgcgttaaaggagtcaccttcgggtaccatccgtctgaatgcgccggattacgccataagcaatgtgatcttgcctaaactgaatgactttctgctggcctatcctgaaatcaaaatcgagttgatgctcgataatggcctgtccgatattgtcacagagcgctatgacgccggagtacgcatgggggaacaactggcaaaggacatgatttgtgcacgaatcagccctgatttccgctttgcagtagtgggagccgtctcttatttcagtaaaaatccggtgccccgttctccacacgaactcattactcatacctgtataaactaccgttttccatcgtcgggcgcgctgtatgcgtgggaatttgaagaagaggggaaagaggtgaaggtacgtgttgacggccagctgacctttaataatattttttatgttctcgatgctgcattggccggacacgggcttgcctatgttcctgaagagattgccctgccacatatagaaaagggtactctcctccgggttcttgaaaattactccccatgctgggagggattttatctgtattatcctcatcggcatcatgcttctccggcattcagggcacttactgaggctctccgctaccgtaattga

SEQ ID NO: 147253 - DNA, 468 bp, Enterobacter cloacae
atgaaaatacgttcaataagccgatttgtgctggctggtgtactgctcgtgagctttaatgcctctgcggtcccgggactctggcaacaggggttcggtcagggcaatgcggaatacagtgtgacggatggcagcggaaagatgtttaccatcaactgcacggaaaatccggaccagaacggtatttatcagcactcggtttttctgaccctctcaggagataaaacgctcagctcgcatgatgatagtaccgacatcacagtggtgatggaccataagcaatatgccattccctcaacccttggctggcgtaacggagataatgcctggtttagtttcatcatggatattcgcaaggctaggcagttcgacgtctacgtcaatgaccagaaagttggatcgtttaaccctgatgttcgcaatgcacaaaaggtcctgccaacattagcggactgcactaacgactga

SEQ ID NO: 147254 - DNA, 1167 bp, Enterobacter cloacae
atgatgcagatggattatggtcgttgtaggaagtactatcagtatctgagatgccttgagatgttctacaaagcaaaggtgaactgggatgaagtgagattttttcactctgcgactcagtatgcttatttgatcaataaacttattgctgataatgactcgttaagagaacgaaggaaaataatcattcgtgatatgaaggcatatgcctctgcgactattgttcctgagatttattttatttggatgaaagatagcgacagggttgcatgttatacaatgttttggctagcaagccaaagtgagatttctcttcctgttttaaatagcttaaaaggattctctatcccatctgttaaaagtgattttaatccttttattaatgatgaatcagaccaagctgtcgatgcttcatatatacagtcggtccaggagttgacgaatttttctaaaggtgaacaatatctggaaaatcctttttttgaaaagaatagctttggcttttttgttgatgaccatgctaatggaattaactttcagcgtattaatgccgtcagcgatacggttgatggttatatttttaatgtgatgctactgattgatcagataaacactacaattgataaaaaaatttctttaataggtaaagcacaccaagcgtggtgcgagcattttagtcgattccctcgcccatttaagtggattgatttaaacgaagaagataacgttctttggttgtgggactatatgcggaaaaaccatattggatgcgatgtgcttccgtcatcgtctaagcaacaaaaatattttttgctggcaacatttgataactgggccggttggacgaatgaacagtttaataaacaaaaagaaaatgcccgtaaagtgagggctaaccccgaagagccttcttcgctaaagaagctgttaaatccccttacgcccgatgattgcaggaacgttttcctggacaatgcgcgcaatgcttgggtgcagagacggcatcgtcagaaaataaaaaaagatacgacgggaatcaaacttacggcggaatctaggaaaaagcttgtggctatacagcagttatcaggagttgaaccaaatgccatactgaaaagtttgattgatgatgcttaccaaagaatgaaagaaaaaagcaaagattaa

SEQ ID NO: 147255 - DNA, 576 bp, Enterobacter cloacae
atgaacgataactacccatacattgccaaatataaaatggactggtttttacatagtctgataaatcaccacctgaacagtgttattgaacgttattcaaaggtgatcggtatccggctggacttttcgtacaaccagaactcagaacgttaccaaaaggagtacagttgtcttcaggaggatcttcgaaagctatttaggcaagttgaacaggaacatggtgtagctggatttttctgggtgattgaatatggtgaggacagtagatttcattctcactcggttgtgtatctggatgggcaaaaaatacgtaaagcatttccgatagcagaacgcataggtgctttttggaaggaaataactcaaggggaaggtaaatatcatcgatgtgaatacaaggagagttataaagctgacatcaacaaaactattaaccatcgggataccgattatatccatggcttgagatatatcatcagctaccttgccaagcaggaacaaaagaatggcatgaatatttacgcctgtaatgaggtaccgccaccaagcgggttaggccgcccaagaaacgtgtaa

SEQ ID NO: 147256 - DNA, 207 bp, Enterobacter cloacae
atgtatacaaaacccactctgcttgaagaccaattcattgatatgaaattcattacccagctcactggtctgagcgataaatggttttacaaactaatacaggatggcttattcccgaagccgatcaagctgggcagaacttcccgttggttaaaaagcgatctggaagaatggttgtattgtcgtatttatgagtcccgagcataa

SEQ ID NO: 147257 - DNA, 972 bp, Enterobacter cloacae
atgactactctcgttttttcctactctcatgcggatgaagcacaacgcaatgagctagagaaacatctgtccccgctgaagcgaatggggaaaatcaccacatggcacgatcgccgaatcgttcctgggcaagagtttgaacatcagatcgaccactatttttcgcaagcagatattatcctgttgctaattagcagtgatttcatcgcttctgactattgttatcagatagagatgaccaacgcactggagcggcataaaaaaggtgaggcggtggtcattccggtgattttaagagagtgtgcctggcatcagttgccattcggcagcatcatggcagcgacaatcgacggtaaagccataagcaggtttgccagtcacgatgagggttacgttcaggtcgccgatgctgtctcccgagccattgccaatttggaagcgaaaaagccgcagcagattgtgcacgccccagctccggctaatccgatgcttcaggtaacggataccgtctttacaccgcgttcgagcaatctttctctgccaaagagttttactgaccttgataaagatcgtgcccgtcgcgagggttttgagtatgtcgctcgttactttgctaactcgctggacgaactcaaaaagcgccatgcagggctagacgttgatttccaccgacctgataacgattccttcacatgtgccgtgtatatcaacggtggcaaggttggtcagtgcggagtctggtgtggcagtcgtaatatgggattcggggatatctgctacagtcaaagtggtgtgactcgcaatagttgcaatgaaagtcttagtgttgcggataatgggcagacgcttgggttccgcaccttgatgggactgggttacagtaattcaagggattcgttgctgactaacgaaggcatggcagaacatctatgggatatgttctttagcccgattcaacagcgtaatcgataa

SEQ ID NO: 147258 - DNA, 1173 bp, Enterobacter cloacae
gtgagctggcgttatttaaaaattgcggatttttgtagcaccggtagcggtggaacacccagtaagtcaaagcctgagtattatgaaggaggagatatcccctggattaaatcaggagatcttaaagattcaacaatttatgacgcaaatgattacattacagccgcagggctagaaaatagcagtgctaaaatagttgagaaagactcaatcttaatagcaatgtatggagctactgttggccgcttggcgattttaggcattaatgcagcgactaatcaagctatctgtaatatcaggcctgatacaacaattgctgatatgaagtatctctattacttcttgaggagtaaatttagctattttgtcgaaaatgcggttggtggagctcaacctaatattagccaaggattgattaagtcattggaagttcctctaccttccttaattgagcaaaagcgtatcgcagatattcttgataaagctgctgatatacgtcaaaaacgtgagcaagcagtcaaactcgctgatgattttttgcgtgccacgtttttggagatgtttggtgatcctgttgcaaacccgaagagatgggatgtggcttctttgttagaatatggttcatttaaaaatggaatgaattttacgaaaggtgagtcaggctctgtactgaagtgcctgggagttggcaatttcaaatcactagcaacgattacctgtatggacaatatcgatgaaattgaattaaatactctcccttcagatgattatcttttgaaagatggtgatatcgtctttgtacgttctaatggtaataaagccttggtcggaagatgtcttactatttatccaaataaagagaaagtcacatttagtggattttgcattcgatacagaatagaaaagtctgcaataacggcagagtatcttaactttctcttccgtacaccttcaatgaaacggcaaatgttaagcgggggccagggagctaatattcagaatattagccagggtaccttatctgcactcaggatacctgtacctcctttagaaaaacaacagacattttctaaaatcgttagttttcactctgaactaatgaaaaaacttaatattaatatagttgaaacaaatgacatgtttggttcaattagccaaacatatttcaattaa

SEQ ID NO: 147259 - DNA, 927 bp, Enterobacter cloacae
gtgattaagaaacaggcatttaaatttttgcttgagccgaataaaactcatatgaatgactttttggttttcgcaggttcctgtcgatttgtatacaataaaggacttgctcttattaatgagaattatgattcgggtaagaaattcttgaattacaatcaactagcatcagaactagttaattggaaaaacgaagagtgccttgcatggctaaaaatggctccatcacagtgcttgcaacaatcattaagagatctggatagagcttttaaaaacttcttttcgggaaagtcacaatatcctcgattcaaaaagaaaggccgtaatgattcttttagagtgccatgccaaagagtcagactggaccaagaaaagcatttagtatcattgcccaaactagggtgggttaagtatcgtaaaagccgagagataacaggagtattaaagaatgttactatttcaagaaagcttgataaatggtatataagctttaatacagaagaagttgttcctgaaccccttcatccatcatttagcaaaaccaaaattttgctaaataatgaatggcttatgcaactcacagcgtgtgagagtctggtcgagcaatttgccaacatggaaggtaataaaaagctaaggaacctgaataatatactaggcagaaaagtaaaatacagcagtaactggctaaaaactaaaaagaaaattgacggcgtaaaagcaaggtcaagcaggcggagactggatgccttacataaaataactacggcaatatgcaaaaaacacgctattgtagagttggttaatttaacggattctttacctgataaaaataatggttctgtaagcatgacttatgaatttgttaggcagttaatgtataagcaagaatggttgggtggtaaggtaattcggttgggcgattag

SEQ ID NO: 147260 - DNA, 1725 bp, Enterobacter cloacae
atggcacaagtcatcaataccaacagcctctcgctgatcacccagaacaacatcaacaaaaaccagtcttcaatgtctactgccattgagcgtctgtcttccggtctgcgtatcaacagcgcaaaagatgacgctgctggccaggcgattgctaaccgtttcacctctaacatcaaaggtctgactcaggctgcccgtaacgccaacgacggtatctccgttgcacagactactgaaggcgcactgtctgaaatcaacaacaacttacagcgtatccgtgagctgactgttcagtcttctactggcaccaactccaagtctgacctggactccatccaggacgaaatcaaatcccgtctggacgaaattgaccgcgtatccggtcagacccagttcaacggcgtgaacgtgctggcaaaagacggctccatgaaaattcaggttggcgcgaacgatggccagaccatcactatcgacctgaaaaaaattgactcgtctactctgaacctgactggctttaacgttaatggtgaaggttcagtagctaataaggcagcaactaaagctgatttgacagctgctcagctcactacaacagctgctggcggtcctatcgctgctcctgctgcagatgctaatggcgtaactaagtatacagtaagcgcgggattgaacgaatctaccgtagctgacgtgtttgctggcttaggtgatactgccgtagttaatgctaatattaccagtggtttcgacgctgttactggtaataactatacgtatcataaagatactaatgattttacattcaatgctactattgcagctggtgacggaacaactccaagtaatagcgccaagttacaatctatcctgactcctaaagcaggtgataccgctaatctgaacgttaagattggtgcaacatctgtagatgttgttctgtcaagcgatggtaaaatcactgcgaaagatggttccaagcttttcattggtattgatggcaacctgactcagaacagtgctggtgctggtattaagcctgcaactcttgatgctcttactcaaaacacaactactcctgcggcggcagttccagtcaccattacgaccgaagataagactgaaatcaaattagcgggtgcaactgttgctggtcagagtggtgcaattgtagttactggtgcccgaatcagcgctgaagctatgcagtctgctaccaaaacgactggtttcacaactggcacaacgacagtagcagctaatactggcaaagttacaattggtggtaatcaagcttacactcagactgacggtacgttagctgccaagaatgaaactgagattttcctgcagaaagacggctccattactaacaattccggtaaggctgtatatgtacaggaagatgggaaattcaccacagatgcagcaactaaagcagcaaccactgctgacccactgaaagcgctggacgatgcaatcagctctatcgacaaattccgttcttccctgggtgctgtacagaaccgtctgcattctgcagtaaccaacctgaacaacaccaccaccaacctgtctgaagcgcagtcccgtattcaggacgccgactatgcgaccgaagtgtcaaatatgtctaaagcgcagatcatccagcaggccggtaactccgtgttggctaaagctaaccaggttcctcagcaggttctgtctctgctgcaaggctaa

SEQ ID NO: 147261 - DNA, 420 bp, Enterobacter cloacae
atgggccgaccaaagaaacctatcgaagtacctgggcaggaacctgaaacgggcgcagagctgattacaggtaccaccggtgaagccacagcaccgggcccacagcgcgcagagcctgagattatccagcagcgcgttgccagtctgctggacgttgccgcacttgctgagcgcaatactctgctgggtaccatcaacgagcagggcgcggccatcatcgcccgctttgaaacgctgggttacaccgaccttgccgaccagcagctcaccgacaatatcgaattcctccagctcgtcaagaaagccaccacggcggagccagccgcgccgctgggttacgtgacgaacgaagagggcaagcctcaacctgtgacgggtaagcccgttctgactgagcacggctggcacgttccgggctaa

SEQ ID NO: 147262 - DNA, 501 bp, Enterobacter cloacae
atgactcaacatatcggtgtgaaattaattaatgcgttccctatgacccgtctagcatataacgattttcgtggatggcagctccccgctgatgagaacggcgcggacgaaggttatctggtggaatatttggacggcggaaaacctaatacggatcgctttgatggctatgtcagctggagcccgaaagaagtattcgaaaaggcataccgtccggtttctggcttgaacttcggtcttgctactgaagcccttaagcagggtaagaaagtcgcccgaactggctggaacggaaaaggtatgaatttgcagctggttaagccgcctcagtcggctacacctccagacatgcgctacgacgtaactgtcggtgacgaatatacctttgttcctggcgttaaattacttccgtggatcggtatgaaaacggctgatgggggttttgtgccttggctggctagtcaaaccgatattctggccgaagattggcagatcgtttaa

SEQ ID NO: 147263 - DNA, 531 bp, Enterobacter cloacae
atgatcgttttcattgaggcaataacaatctttgtctgtgggttcatagtgatgcgcacagcgaagaagaagacagaaaaaatcacctgcagcgtcattttgataggcgttttttatctaattcaacatttctctgcggtaggcgcgcatgcttttacagctttcgtaattttaggtgcaattggcgccattctggaaatgctgcgcccttcttccaagggcccatcagaatcagcggcggatgcagctgttgacaatggcggcactaactcgtcaacgaacagtgccagcattaatctgaatctaattacttttcaatattgtaattctgccggggtagcaacaacgcgcgaagttaatgttaagaatgtgggtttagactgccttactggttactgcaacttacgcaaagagatcagaacgtttcggattgatcgcattactaaccaagaaattgtccttcgagaatccggcgaggtgatgaatgtctatgactggatcaccatgttatatccacttccagaggaataa

SEQ ID NO: 147264 - DNA, 651 bp, Enterobacter cloacae
atgatccaaaattggaacggtcaacaaaaagattttacgaatcgtaaatcaatcacactcccaaatggtggcaaggaccccattgaaaggatttgtgcggcttatggtttcacatcgcgtcaagcgttatgccgtcatttagacgtgtctcaaagcacaatggcaaacagggtaatgcgcggtaacttccctgctgattgggtgttgatatgcgcgatggagactggagcatcgctggaatggttggtttatggacaaggcaacccacctatgcccataccacaaaatgaagcaaacaatctcaacaggcacgcgccagaacaaacccaaatagagctttctgaaatccaaaatggggttataagcaatcacaaaacggtatcaattgcatcagagctactaccaccgaaaacgagtgaacctcgcttaattagtttcgatggtgtcatttggatagttgatacctttagtggtgagctagtcgatggtttctggctgatagaaatggataacgttatcagcgttcgtgaaatgtaccgcttaccgggtggaaggttacgggttgaaaatggcaaagcttcattcgagtgtaatgctgatgacgttaaggcacttgggaaagcagtcggcaaaatggaattcatagagtga

SEQ ID NO: 147265 - DNA, 237 bp, Enterobacter cloacae
atgagccgtcaattatcaatgcgccccagtatcaaccttgtggtgtcagagccatatatcacgcttgatgagttctgccgccgtaccggttataaaaccagctatgcccgccaaatgattcgcgaagggcgcctaccaatccgcaagaaagaaaacgctaacggtctggttgaagtgaacatgttcgcgttgacgatggaagccgctcaaggctgtgaaatcgcaatgcaagcctga

SEQ ID NO: 147266 - DNA, 225 bp, Enterobacter cloacae
atgctgaaaaacgaaccttctttcgcctcgctcctggtaaagcaaagcccggcaatgcactacggccacggctggattacaggagataacggcaagcgctggcacccgtgccgcgatcagtccgaattattaaacgggctgaaaacaaaagcggctaagccgtcagcttttttaattattcgcattgctcgtttgattattaaaggagtgaaacatgtctcgtaa

SEQ ID NO: 147267 - DNA, 201 bp, Enterobacter cloacae
atgtctcgtaatgagctgagaattattctgggcgtgatcatcccaaatatggcggaaggttttgaaattaaaacccgtgacggcgctgttttgcgtgtcgatcctgaatgggagtgctgcaaagaatttaaagaaggtttgcaggctgaaattatcaaccaaattaaaagtaagcctgttccggttgccggttatatctaa

SEQ ID NO: 147268 - DNA, 234 bp, Enterobacter cloacae
atgaaaaatattaaaacccactcaacgaaaacaggcccagacgatgctggcctgttcgctttgttaaatgaaacgcgcctggatgagcgccgttgccgtgctgatgcaatggcggctcgtctggatagtctggccgtgcgcatcgtttcccgtcagttgagccatatcgaggcggccgaactgcttcgcgttgaagcggtacgcatccagaacgaagcgcaggagctgcattaa

SEQ ID NO: 147269 - DNA, 228 bp, Enterobacter cloacae
atggctgattcaatggacctcgcccagcagcgcgaacaggaagatcgtgagcgccatatcaacaatgcccgcgcaaaagtgccgggcgtttcccgtgtcctctgtgcggtgtgtgatgctccgatcccgccagctcgccgccgcgctattccaggcgtgcagtgctgtgtgacctgtcaggaaatcgcagagctaaaaagcaaacactacaacggaggtgcgttatga

SEQ ID NO: 147270 - DNA, 315 bp, Enterobacter cloacae
atgactacgcgcgttcaccaggtaaaaatcgctccggcctatttcaatgccgttgttgcaggcgaaaaacgtgcagagcttaggaaggatgatcggggctataaagtcggtgaccttctttctttgtgcgaatgggaccacgacggcaaatataccggcagagaatgcgctgcagttattacccatattctgccagtaaatgacgttcttcctatgccgggaaactggattccgggtagttgggtgatgctatcaattcgcccgttcacaaccgtagaagcgctggttcacttattcacagggagtgtcaaatga

SEQ ID NO: 147271 - DNA, 177 bp, Enterobacter cloacae
atgaaaaaagatgcgctgctcatcactgcatatgacccggccaacggggaagaaatcgctgtttcggctgttatacgtttcgaccgcgaaaccggaatttttacggtgatttctataaaccgaaacccagaaggtttgggtgaggaagcattcatcagcgttgagattgatgaatga

SEQ ID NO: 147272 - DNA, 2304 bp, Enterobacter cloacae
atgactgatgcagtttttccctacgcatggaatgccccgcgccctgcaatcggtggttttaagcaagccgatgcggcgccggggatcatgtatctgacgccggacggcaatcgcaagcgtttgtcgattgccgaactggcagaaacggatgaagcaccagaccggggccgggcggttcgtcgtcgcctggcttcgctgcctcattttgtccgtcgtatgtatgctcaaaaacttgaacaggtagaccgtaaaggcaaacaagcggctgatgcctggctaatcaatacctttgaacgattcgttctgagtcgtatagatcaggtcaacgagcagtatctgccgcagggggttatgcctgcggctttgttgcctctgcgtgaacaattctggcgcctgctttgggctggcaaaagagagctgaaacggctggcgcataaccttgctgacctgttgggtagcgagtttaaccgcgagtttgatttccagatggcccgcgcgtccgatccccatttcgccaccctgtcaggttatggccgcatggggtttcttgccaatcacctcaaaacgtcggtcccgtgctggacggcctactgcaaagaagagctggaggcggaagacgcactgaaagcagttgcccgcctgcagtctccgcagtggtggcttaatcgtctgcgccgtatgcatgctcgctggcgtgagcatctgatggttgcggccggatatgtacacaaaaaatccgcaccgtactgcagtgacccatgtttgcaggaatggacggcgcaaaagaaagccaaccgcgaatttctgaaagcgatggagctggaagatgaggacaccggagagcgcgtatcgctgattgataaagtggccggcagcgttgccaacccagccaaccgacgccgtgaactgatggcgcgcatgcgtgggttcgaagatttagcgaatgaggccgggctggccggggcgttcttcacgcttaccgctccatccaaataccactcaatgcagtacgacgggcgccggaacaacaaatacagcggcgcgtcaccgcgtgaaacgcagaaatatctttgcaaagtatgggcgcgcacgcgtgcggcctggctgcgcaatggtattcgcgtgtttggctttcgcgttgttgagcctcaccacgacgaaaccccgcactggcacctcctgcttttcatgcgcccggagcatatcgaaccagcaacaacaatctttcgtaagcacgccatgcgtgaggatgggaatgagcctggcgccgctgaaaaccgcttcgaaatgaaacccatcgagaaagagaagggcagcgctacgggctatatcgccaaatacatttcaaaaaatattgatggctatcagcttgatgacgatctggatgatgaaaccggcaagcctctgaaagagatggcgcgccgcgtaagtgcctgggcgtctcgctgggcgatccgtcagttccagcagataggcggcgcaccggtaacagtgtggcgtgaattgcgccgcctcggtgatcgtgagctggtcctgcaccccgaaattgagccagtgcgccaggccgctgacagcagcgcgtgggatttgtacgtgagtgctcagggtggcccgctggtttcccgtgatctcctgcgcgtgcgcctcagctatgaagtcaccgaaaacggcaacctttacggggatgacgtctccaaaatttccggcgtttactctccgatccgtgggccggaatcgctgattcatacgcgcactaccaaatacaaaattgtgccgaaacgtcaggccgacggcgtttccggttttgaccttgatttttcaggcggccccgccgcccctcggagttctgtcaataactgtacgcgggagccgcgggaggttgaaaaacacgccgatcctggcggcacggtcatgaatgactgtgccagctgggcggatattggctctttatcccggaaagaaaaacgggtgatagcgcagcggctgagcgacgcggcaagggtaactaacaagcgcgtcaaagtgaggccaaaagccagccctatgacggagcaggaaaagcaaattagtgagctgctgtctctgcgtggtgtggatgccagtgccggaatggtccgttcgttgatttctggcgcggtggttgccattggcgatcaggtgttaacggttgaagaagggcgccttactgtccgaaaccgtactgctgcaggtgttcaacgtctggcgtcccagattgtggagattaaacagcaggcggatgaccttttgaaccgaatgaagcgtgcattttcagcgcgtgaatag

SEQ ID NO: 147273 - DNA, 696 bp, Enterobacter cloacae
atgacctatctgggaagcaaggccgcaagcggtgtttttcaaaagattattgcggaaatgccgccgcatgatacctacattgagacgcacctgggcggtggcgctgtcatgttgcgtaagccaccggcccgccgcaattggggcattgatattgatcccctgacggttgaggcgttctgccagggcaatgctgatttccttgataccgtgggcgatagcctttttatcgatgttgccgatgcggtgcagtttttaagggacttcgatttttcctccgccggtcgtgtgctggtttacgcagaccctccctatctgcatgaaacgcgcaccagtgccgcgcgttatcgcaatgaatatacggttgccgatcatgagcggctgctggcctgccttaaaagcctgccaaaaaatgccagtgtgattttgtccggctacccatcagcgctttatgacgaactgttaacgggctggcgccagaaagaatttcaggccatgacacgcggcggcgtgcgcacagagaaaatctggatgaattacccggaggggagagcctactcgcacacttttgcgggtaaggattacaacgacagggagcgcatcaaacgcaaggcgaagcgctggcgcgaaaagttcgcagctttgccccatgccgagcgactggcaataatgacggcgctgagtgaagttaatgattaa

SEQ ID NO: 147274 - DNA, 342 bp, Enterobacter cloacae; identical to SEQ ID NO: 24324

SEQ ID NO: 147275 - DNA, 441 bp, Enterobacter cloacae; identical to SEQ ID NO: 24323

SEQ ID NO: 147276 - DNA, 444 bp, Enterobacter cloacae
atgtctgcactttatgaaaaatcgcagctgacgaagatccttatttcctctctgccagccaccaaagaaacgatggattccgcaaccttcctcgatctgagttgcaccatcaaagaaattcagttcaccggtggtcagaagcaggatatcgacgtaacaacgctttgctctaccgagcaggagaacatcaacggcctgccttctccgtcagaaatctctctatccggtaacttctacaagaatccggcgcaggacgccttgcgtgaagcgtatgacaacgatacgacctacgctttccaggttatcttcccgtccggcaagggctttaagttcctggctgaaatccgccagcacacctggtcttccggtaccaacggcgtagtggcggcaacgttctccctgcgcctgaaaggtaagcctgaaaacatcgagtctggctcctga

SEQ ID NO: 147277 - DNA, 354 bp, Enterobacter cloacae
atgagcagagaagatccgcagttgagaatcaggcttccatctgaattgaaagtaaaaattgaagattctgcgaaagtcaataaccgttcaatgaatgcagaaattatctttaggctaaatctgagctatctacttgaagaagataagaatttatttactacaactgccgagcctgacagttttgttggccacgctgaaaaattgcttaaaaagcgagttgaagaagagctaccatcttttcttgatcttatgtctagaaagatcatgactgatgagttcaaggaagaaatcaaacgtaaagcaagggagcaggccgaaaaagaatggaatgagaagtttaaaaagcccacatga

SEQ ID NO: 147278 - DNA, 417 bp, Enterobacter cloacae
atgtgtaaaaccatgacaatcaaggggatgatagtgaaaaagtgcgttttagttttgtttggtgccttactactcagtggttgtatgtctacgccatcctcaactgagctgagcaacgcctactatggtgagctgccacagtattacgaagggcaaattaagcaaactattggtgacaggctcaaggatgctgactcggctaaatatcaattcggtacaccatctaaagcctacctgcaaggtgggatggccgagaacttcaagatgtattatggttgggctatccctgtccgtgttaatgctaagaacagttacggcgcttatgttggctatgagagctatatgtttatgtacattaacgataaccttgtagatgcaacgcttaaatttaaaactggctatgccaagacaatttaa

SEQ ID NO: 147279 - DNA, 345 bp, Enterobacter cloacae
gtgagcgacaaagatattgagcagcaaattcaggccaaaggcttaacggcaccgcgcgttacacttgggaaaatcgaaagcgttattgccgaagaggttttctttactccagctgatgccgtcaaaggaaaaggtggtcaggttgctgatagctctcctatcaatctgcttaccatctgtgtgctggttctgaaaaacggcttcactgtaaccggtgaaagcgcctgcgccagcccggagaacttcgacgctgaaatcggccgcaagattgcccgcgaaaatgcggtcaacaaaatctggatgctggaaggctatctgctgaagcagaagctttccgaagtctga

SEQ ID NO: 147280 - DNA, 1317 bp, Enterobacter cloacae
atgaagcgcctgataccgccagacgactgcccggaggaaattgcccgccgtctcgacgtcattcagcagcaccgggcgctcaacgcgatcctcggggttaaccctgacgccatgtctcaggcggaacagcatcagcagcagcgtcgacgcggggagccgatcggccccctgcacggcgtgccgttgatcgtcaaagataatattgcctgcgcaccgatgcccattactcttggctgcggggcgctggcctcacttaacgcgacgtcggatgcgcttgttatacagcggttgcgcagggcaggagcgattatcctcgccagagcgaatatgtccgagtttgcttttgacgtgcgctcgcgaagctcgctggggggcgatgtggcaaacccgcttcgcccgtcactcaccgccggaggttccagcggaggatgcgccgcggcggtggcggcggggatggcggatggcgcattgggtaccgataccggcggctctatccgcattccctgtagctataccgggctggtggggctacggcctgcttttcgccgttcacagctggatggcgtggcgccgctctcgcccagcaaagataccgttgggccaatggtacatagcgttgaagatgccgccttgctgcatgcggtgatccatggtttgccaccggttgcgcttcctgtgcgttcgctgaaaggcgttcgctttggtgtggtaaccgcgttacagggagaggatgaggtacagctggaggtctggcagtcggcgctgcacacgttgcgtcgtgccggagcaacgctggtggaggtatcattacctttgctggacgacgtaagtcaggcgacatgcctgagcctgtatgaatttcgcgtggcgattgacgactggcttagcaaacagcctggcgctccctccggactgacaagcaatgtggactccggcgcttacctgccagagtttgcgccgtttctacgtcagatgctggcgagtagcacgctgaaaactccgctctggctggcggggcgtcgctttcagcgcctgttacggcagagcctttgccaggtggcggaggcgcagcgcatcgacggatttgtgtatcccaccgtacaacggttaccagaaagtatggcgaagatgccgccaggctgcgcgccggaactggccgccatcagcggcctgccagctataacgttgccgtgcggcgtaagccgtatcggtctgccggtggggatggagatgttatcggtgcaggaggatgagacggcgctgatggtgctggcgctggcgtgtgagggggcattgctcagggaatgtaagatataa

SEQ ID NO: 147281 - DNA, 225 bp, Enterobacter cloacae
atggtcagtttcgcaagccgttatcgtatgcctacctcgatccgtaaagaccgtccgctgactaatgatgaattacagcgcatcgttcccagcgcgttctcatcggataaacacgattcacgctctgaacgttatacgtatatcccgaccattaacattcttgatcgcttacgtgatgaaggttttcagccatattatgccactcagtcacgtacacgcgactag

SEQ ID NO: 147282 - DNA, 357 bp, Enterobacter cloacae
atggcctcaccgggggaacaggatgcacacacccgacacgtcggaacggcgtggcgccatcagagcgacggcatcagccggcgcggtgaaagcggcgcgaccggaacggtcgcagcaagcgctgcctttgaccttagccatcagaccctagcgtcagcccgaaaccgcttgcgggttcggcggagcccggcgggtgcgtcagcagccgccctggcggagtggggctcgacgaccggacagcagcgctggccgggagccgaagggggccatagccctgccctttttccgtgttatggccatgacggagctgcagctgagaaagataaccagcaggacgccggttctgatcgcaggtga

SEQ ID NO: 147283 - DNA, 3366 bp, Enterobacter cloacae
gtggataatttaaattttgacgcattgttagaaagattaaaatatggaagagtgtttctttttttaggatttgactactttctcgactcactcacgttcaatccagttttgcgagtgatttctgagagcattgataaagaggtgttaaatttaaacgatttatataaacatagcaataggtttaattctgagaaatgctttaatgaagtaaaaggtaaaattgataaactccccactaataacaatttagatcctatttcaaaaatcaaatggaatgcaatttacacaagctctattgatgatttgatactgactaggttgagggataaaaatcgcgtaacgatacctatttgtaaaagtgatcgtgcaatttcatacagccgtgatgaattgaatgttttttacttatctggattatatagccgtattgatcctaatgaacgagtcccacaagatcgtaaagaatatgtaaaaagaaagcatgaagcacagttaattcttaatggtttagtagattcaatgtctccaatggacaccttaattatatatgggtggaatcctgagaatgatattattagtggtgagaacttataccaagtattatcaagattatctataaatcaagcttttatgtttagtggtgatatcaaagtagatgatgagtatattaaatttcttatagatgataagattttatctcattcatcattaaaacttcctgattttatagaaggtaacatctcggttaattcagatgattttgagcgccattttgaactaaactcatttgtcaaactaagtgatagagcggttgaaataccaactagaataagaagattaataaatcattatggtatagttattgaggatgaatttttcaacaaaatcactcaagatgtagatgaattatttaaggattttttattcgaatcatcacgaatccctgtttggctagcttacccaaacaatcttgactttgaaagagagtactataaagctcttcattctaaagtaaattcagaaataaagagcaagaaggtttgcgaaagcccaataattttgcatggttcaactggaaccggaaaaagtatttccttagctcggctatgctatgatttatataaagatggtaaatacttattggtttatataaactcctattctgacacattagactttaaagtcattgatgaagtatgtgaatgggctgaatcaaattcattcatctcaacagtaatctgttgggatggaatgaatagcatcgacacatatcaaagtcttagctcatatctctctagcagagggcgtaagcaaatagttattggctcatcctataaaatcaatgacagtaaaaaaataaaaaactcgattgaagctaaagaacaatttagcgaaaaggaaaatatatcatttaagaagtatcttaaagacaaaaatattgtttttgaagatacctttagcagttacaactcctattttttggtaaccttatatagacttttgcctgaaacacggtttgctatcacatcaggaattgtaaatgaagcaaatcatattaaaaaaataattatcaatgacttaaccttaaatgaaagcactgaaagcataattgcggaggcttttagaaaagcttttgcaaatactagtaataaaatcacatctcaaaacacacaaaaaataaatatcaatataaatgatatagttgatgtagtgatggtttttgggaagttcgggatcgaaactccgtttgacttattaatgcgtgtgtttccagcccttaagtactctaacatcgattccgttttcaaagtcattgatattatacgatggtcagaaaattcctacggagaaatttatctctcctcaagaaatactttagaggcagagatatattgcaaaagaataatcgcaagttcaaaagagcatgtaaaaatattactatctgttattagttgcgtggaacaaagaaaatcctcaaattgtcctgaaattggtttctgcgcagatgttgtaagagcatttggcccaaacgggaagtatgggaaagagtatagtgagtattacttagatatttcaagggcgttgggggagttaatggaatctaagaaaatagtcaatacaaaacttatgttattacaggctaacttgttacgagagtatggccgttctaaatatgataacccttctctgttttaccaggaatactatgaccttcttcacgaggctttggctgttattgaaaaagcaattgatttggaagaaagacttgaaaagcgttctataaaacaagctagattttcactgattgccttatacggtgaaaaagcatcaattttaggaacagtcgcaaatcaatgcacgaatgataataaagatgaaaatgtgattacaaaacatattttagaggctattgatacagcgcgtgagtcgttcaagtacaacatttcaaattatcgatcacttgattctatagcatggattgtaacaaatcatgctaaaagtaataaaggattgactgcagaaaaacttaagcttgttttagatgcaattagtatattcaatgaatatgcaattgaagatttagaagaaagacatcatgttgattttcttacacgaaaaacagcgttgtatgaaacaattggtaatgatgatgtaaaaactcaaactttagaatcccttaaagaaattagcttagtcgactaccattactatatgttgacaaaattattagccgatattaacctatattcaaatgcaacagaagaaaatttaaaaaatgttagcaaggctctagattatattaagataaataatcttgagtcactatcttcatataaaataaatgttatgcatttgagactgttctggttttatgaaaataaaataccattattcaatggcgaaagagttgtaattaagaaaggcatttctttttggcatgaagtcgttgatttgtcagaccggattttgtcttcggcatataacaacaatatcattttttacagattcatcaaagcagttgggttatttcatgttggccagtataaggctagcgaggagatatttaattatctttctcgagattcagagtccataagtggttccagacgtgttttcaaaagtttcctaatggctgatgaaaatggtgttaggaaattttctggtgaagttattaatataaactcgttacgaaacagaggcgagatatatatcgatgagctaaaaacaaaagtgacatttttgccaacggattttaaccttacaagtgagaagataggtttcccccttactgactttcatatagcttttaattttttacgcccaacagcagataacgaaaaatatttccagggtgctaatcaatga

SEQ ID NO: 147284 - DNA, 894 bp, Enterobacter cloacae
atgaatatttcaaatttagaaagaaaaatagaagaaattaatagtttactttctctcattgtgaacaatggtgggcaaagttttttttctaaaacaaatgttattcgacctgactttgccaataaggaactttcttttgttaggttggtttcttacttgtatactatatattttgagactggtaagtcaggcattagcgtactccagaagtctatgggtaatgaggcagaggagaacttaaaaaaatataaaactatagtccagattctaagaacaaaattacagcataatcttgataaaaacacgtctcgtgatttcaaaattgagattgattgtatgtcatggactaagtctgcttgcggtaaaaacattcctacaaatgaagaggattggctgaactgctctagaaagttagtcgccgactcagaagttataatgtcttccattgcatccactttagaagaaatgactaattcaccagcaaataaagaagcttttgttattaattggagtattacatcaacaaaggaaatcccttctcatttatatgataaccatataaatgaacatattaaatttatagctgtagcggatttcgacactgttaaatatcgtaataaaaatctagcgacttggaggaattatattacaagtttaaatccatgcgccgattttcagctagagataaaaaaaatagtagagtcgtcattagtacgtgacttcttttatgtattgccagtaactattgatgatttaaatggaacatttattttaagtagaaccttattgaatgacatgtatgccttcatacattcgaaattcgattcgaataatttcgataaatcgatcattttagaacagctaaagttagaatttaaagcccacctcaagtag

SEQ ID NO: 147285 - DNA, 411 bp, Enterobacter cloacae
atggccggtggttttctgacactggtcagatgccgttgtggtagtgacttaaactgtcgccgcaaccgccggcatgatgacgttcgggcattattattttcttccggcttttcacacgaccttgcgcgaaggtcatgcctgaaactagtgttcctcatgcccattttcggatgcaagcgcagagcactaaaaacactcatcaaatcgcacaaaagtcgcgatgatagccatttttattcagtggctatgcagggggctgcacaggaagcaaagcagggtcacgggcgtttggcagaagaactgctgaatctgctggataaagccaaagctatactggctaatgacaacaggggaaagctggttccgtttgccaatgtggcaaaaaaccgtaccaacttaaaaccttggtga

SEQ ID NO: 147286 - DNA, 294 bp, Enterobacter cloacae
atgaggtttccgtccaaacctgacgcctgccgccatggcgatgacccggccttcgtttgtgcgctccaggatccgctcccgctcagcttcagcaacggcagcaaggatctgaatgaccattttacccatcgtgccttcagtactcagtccattctccagaaaccggatggctattccctttttatagcaggcatcaacaatgtggatcatatccgctgtgttgcggccaagccggtccattttggtacacatgataatgtcatctttttcggcacgggcaagcagccgttgtaa

SEQ ID NO: 147287 - DNA, 2058 bp, Enterobacter cloacae
atggctgctgattttctgaccgacaaacagacacagaactacgggcgttatgccgcagagccaaacgagatccagctggcacggtattttcatcttgatgagcgagaccttactttcatcaacctgcgtaggggcaggcataaccggttgggaattgcccttcaactcacaactgcccgctttctgggaaccttcttgtccgatctcatgcaaataccgcccggtgtccagttttatgtcgcaaggcaacttaacatccgctatccagagatcatttcccgctatgctcaaagggaaaacacacgttgggagcaccacgggcttatcaggcagcactatagctatcatgatttcggtgatttcccgtggtcgttcagactgaagcgattgctgtatacccgtgcatggctcagtaatgaacgccccggactgatgttcgattttgccaccgcgtggttgcttcaaaataaagtgttgttgccagccgcatccaccctgacgagagtcattggtgaaatccgtgagcgtgcgacccgccgcttgtggcgaaaattggccgcgctgccaaaccgttggcagaccgcacaactggctgggttacttgaaatccccgaaggacagcgactctcagtgatggagcacctaaaaagaggccctgtcactatcagcggccccgcgttcactgaagcacttgaacgttacactcgcctgcgcagcctggagttttcctgtctgaatttcactgggctgcccgccatacagctccgcaatctggcacgctatgccggaatggcatcggtgaaatatatcagcagaatgccagaagaacggcggctggcgatccttaccgcattcgtgaaagcgcaagaaatctcggcgctggacgaggccgttgacgtgctggatatgctgatcctcaatattacccgggaggcgaagaaaaccgggcagaaaaagcgacttaggacgctcaaggatcttgaccgcgcggcgttgctgctggcgcgggcatgcgcacttttacttgatgaagataccgccgatgatttgctgcgaaagaccatattcagcagtgtgtctgtcgccagactggcagagtccgtggaaaaagtgaatgaactggcccgcccccaggttacaaactttcaggatgaaatggtggagcaatacggacgggtaaggcgttttttgcccgcactactgcgcgatctgcacttccgtgcggccccagacggtgaacataccttggctgccatccattacctggcagagctaaacggctcgaaaaaacggatcctggacgatgcacctgaacatatcatttcaggcccttggaaacgcctggtgtacgatgctgacggtcggatacagcgagcaggttactcgttgtgtctgctggagcgacttcaggatgcgctacgccgtcgtgacatctggttggaaaacagcgatcgttggggtgatccgcgccaaaaacttcttcagggggaggaatggcaggcgcagcgggttccagtctgccgggcattgggtcaccccactaatggcagtaaagcatcggagcaattggccgctcagttagatgaaacctggaaaacggtggcatcacgttttgatcgcaataccgccgtggacatctgcaatgaaggtaaacatccttcgctgaccatcagcagcctggataaattggatgaaccaccggcgctgatacaactgagcagccgagtcagacaattgcttccacccgttgacctgacagaactgttgctcgagattgacgccagaactggcttcacccgtgaattcagccatgtcagcgagtcaggtgcccgtgcgcaggatctgcatataagcctgtgtgcggtgatgctggctgaggcctgcaatatcggacatgagccgctgatcaagcacaatatccctgcactgactcgccatcgtctgagctgggtgaaacagaactacatccgagcagaaacgctggttagcgccaatgcgcggctggttgattttcagtcctcgttagcgttggcaggatactggggggcggggaggtag

SEQ ID NO: 147288 - DNA, 276 bp, Enterobacter cloacae; identical to SEQ ID NO: 36785

SEQ ID NO: 147289 - DNA, 369 bp, Enterobacter cloacae
atggtgcctaagagactgaaagaagctaggatggaggcaggattatcgcaggcaaaattatcccagcttctcagcgtggaagaaggggttaacacacgctctaggttttcgagctacgaggtagggagaacggaaccgccgtttagtctggttaaaaaaattgcggaattactcgactatccagcaaattatttttacaccgaggatgatgattttgctaaagctgtcttgcaatttcaccgagagcgcaccgatccagagtcaaatccgcattacaattcggtagtaatagaagcaagaaaattatcatcaaagctcgataaggtgagaaaaaccgtagcccagttgaacgaatacctgaaagagtga

SEQ ID NO: 147290 - DNA, 498 bp, Enterobacter cloacae; identical to SEQ ID NO: 112249

SEQ ID NO: 147291 - DNA, 1062 bp, Enterobacter cloacae
atgtttggcgcttacatcaaagtgcagcataccaaacggacggaacaaaatttcccattcctggattggctggaagagcgggacggattgttattcctgagtgaggataagcgtgaagatttctacgactattggcacgaaacagaggcgaatggtgctgagttaaagcgcctgctctgggcgattatgcagggtgctggacttctctacgaagagaataaacacctgtttgccttcactgagtctccaattatcagatctgtagaatgggctgaacaactcacacttttaggtgctggctcttctcgaagtttgtttacctgggctgctgaacatctggcgaaatacgaagttgaggaagctggtgaagatttacagccgccacttgaaagacgtaaacataagcgtgtaccgatctccctggtcgccgtatgtgaaaacagatgcactttgacagcattacagaaagtgtttcacgaacatctccaggaaatcatccagcgcgtgcctggtgaatttatcttcgctaccaacagagataaatccctgtgtcagtttactacgataggggatgaaattcttaccgatgcttcccgtggtatccgtgtttcaatggcttcctatggcctgaaccattaccagcacatacacaatgcagcgtttcttggttgcagtaatcttgataaagatttccaaggtaaatggcggcagtatgcggagcttaacggctggaatgttgaagaatttgaacagaagcaacgctccgcgatgaattatgaacggtgctaccagtttattagtcgtacatctatccgtaatgctgacactgatcaccctctggtgttcgtagtacctgatctggcaactgctgaatacatcaaagagcattatttccctggagcaaagattgaatgtctgaaatttgggaaagtgagaaagaaagttaaaggtaacaacacccgtaaagaagtacaggaacacaaatccaaaggattgacccaaagacaaacggctgaactaatgaagaaagggatcgccacaatacaacgccactggaactaa

SEQ ID NO: 147292 - DNA, 255 bp, Enterobacter cloacae
atgggcaagtttactttcgtcattgagttcgaagacggcaaggagccgccagtacatgcccatatggaagctttcggtggggtgattgttgcggtcgcgttccgtgatgcattgagcgaggatgatcaccagaagacgatcactacctctcctcaggtgcttagcgagatgcggtgctttatctgcaatggcaagcatccgataggtgtcgcctgcccacttaggtcgccaacagtggtatcgcataatgcctaa

SEQ ID NO: 147293 - DNA, 822 bp, Enterobacter cloacae
atgacccgtctggcttcgcgctttggcgcagcaaacgttattcgtcgtgaccgtccgttaacccgcgaagaactgtttcgcgtggtgcccagcgtattcagcgaggacaaacacgagtcccgcagtgagcgttatacctatatacctaccatttccctgctcgacagcttacagcgagaaggcttccagccattctttgcctgtcagacccgcgtgcgtgaccccggtcgtcgtgaacatacaaagcatatgctgcgtctacggcgtgaggatcagattaccggtaaacaggtgccggaaatcattttgctgaattcacatgatggcaccagttcgtaccagatgctgccgggactatttcgcgcagtttgtcagaacgggctcgtctgtggtgagtcgtttggcgaggtgcgggtaccgcacaagggggacgtggtgagtcaggtgattgaaggggcgtatgaggtattggggatttttgaccgggtggaggagaagcgggatgccatgcagtcgttgctgttgccacccccggcacagcaggcactggcaaaagccgcgctgacgttccgctttggtgaagaccaccagccggtgactgaatcgcagatcctctcccctcgccgctggcaggatgagagcaatgacctgtggaccacgtaccagcgtattcaggaaaacctgattaagggtgggctcagtggccgtaatgccaaagggggacggtcacatacccgtgccgttcgcggtatagacggggacgtgaaacttaaccgggcactgtgggtgatggcggaagcgatgctcatgcaactgcaataa

SEQ ID NO: 147294 - DNA, 864 bp, Enterobacter cloacae
atgaacaattctgaaggtatgaagtcgttgcagcagtcgctttctggcctgccacagtgggtatctgaacgcatattgcagcagataaatcagttaacccattacgagccagtaatcggcattatgggtaagagcggtgccggtaaatcctcactctgcaatgccctgtttgccagtgaggtatcaccggtcagcgatgtggcggcctgcacccgtgaacctttacgttttcgcctgcaggttggcgaccgctatatgacgctggtggatctgcccggcgtgggcgaaagtggcgctcgcgataccgagtatgctgcgctgtatcgcgaacaactcccccgactcgacctggtgctgtggctcattaaagccgatgaccgggcactggcagtggatgaacatttttatcatcaggtgattggtgaggcataccggcataaggtgctgtttgttatcagccagtcggataaggccgaacccaccagcggtgggggaccattgtccaccgcgcagaagcagaatatcagccgtaaaatctgtctgctgcatgagctgttccagcccgtacatccggtgtgtgccgtgtcggtccgtcttcagtggggacttagggtgatggccgaacgaatgattaagtgcctgccacttgaggccaccagcccggtggtgtcgcaactccagtcttcctttcgcacaacggtagtccagaagcaggctcgtagcgattttggtgaaaccgtcggtgctgtactcgatagcatcagtgcctttcctctgatacccgccccggtgcgggccgtcattcaggccgtgcgcaccaccgtggtgtcagtggcccgcgccgtctgggatttcttcttctga

SEQ ID NO: 147295 - DNA, 1557 bp, Enterobacter cloacae
atgactagtcttcaacaacgagcagaactacaccgtcaaatctgggcaattgccaacgatgtccgggggtcggtcgatggttgggatttcaaacaatatgtccttggtgcgctcttctaccgctttatcagtgaaaacttttccagctacattgaagccggtgatgataacgtccactatgctgcactggatgacagcatcatcaccgatgacatcaaagatgatgctatcaaaaccaaaggctatttcatttacccgagccagctgttctgcaatgttgccgctaaagcgaataccaacgacaggctgaacgccgatttaaatagtatcttcgtcgcgattgaaagctcagcctacggttatccgtctgaagctgacatcaaaggcctgtttgccgatttcgataccaccagcaaccgcctgggtaacaccgtcaaagataaaaacactcgccttgccgccgtgctgaaaggcgttgaagggttaaagctcggtgactttaacgaccatcagattgacctgttcggggatgcatatgagttcctgatatctaactatgcggcgaatgccggtaagtctggcggcgagttcttcacaccacagcatgtttcaaaactaattgctcaactggcaatgcacggtcagacccacgtcaacaaaatctatgatcctgctgcaggctctggctccctgctgctccaagcgaaaaaacatttcgataatcatatcattgaagaaggtttctttggtcaggagataaaccatacgacgtttaaccttgctcgtatgaacatgtttctgcacaacattaactacgacaaatttgatattaagctggggaatacgctgactgagccgtatttcggtgatgagaaaccctttgatgcaattgtctctaacccaccgtattcggtgaagtggattggcagtgatgacccaacgctgattaacgatgagcgttttgctccggcaggcgtgctggcaccgaaatctaaagccgactttgcgtttgtgttacatgccctcaattacctgtcggccaaaggccgtgcggcgattgtctgcttcccgggtattttctaccgtggcggtgccgagcaaaaaatccgccagtatttggtcgataacaactatgttgagacggtaatttcactcgcaccaaatctgttcttcggcaccacaattgccgttaacattctggtactgtcaaaacataaaacagataatagcgtacagtttattgatgccagtaggctatttaagaaagaaaccaataacaacattctcaccgatgcccatatcgctcagattatgcaagtgttcagcagcaaatcagatgttgaccatctggcgaaatcagtgcccttcgaaaaagtggccgggaatgattacaacctgtccgtcagcagctacgtggaagccaaagacacccgagaaatcgttgatattgcggaactgaatgccgagctgaaaactaccgtcagcaaaatcgatcagttacgtaaagacattgatgcgattgtggctgaaattgaaggcagtgaggtgcaggaatga

SEQ ID NO: 147296 - DNA, 228 bp, Enterobacter cloacae
atgagctttaacaaagaagaccagcaggatgaagctttagcgtttttattagccgttgccactgtcgaatcagatgatgccggagcttttcgcaagcgcgttactgagtatatgacgaaggcctacggtggagatacatcaaaaatgacgatgcaagagcaaggtcgtgccgaggcggtatccaaattgtatgccagggctgataacatctaccatcgcatcaagtaa

SEQ ID NO: 147297 - DNA, 258 bp, Enterobacter cloacae
atggaaatgactgtaggattccctgaaatgggttcgcgatttgaaactgtaagcttcgatccagatttagaaattaaaatgataaagactgtcagaaccaaaattacagtttgcaagctggagcaaatcaatgcgcctcatgaactggtgtttatctatcaggaggatttcaatccaggcagctcttttgccgaagtcgaagcacgcgctaaagaatatgccagtaaggcaattgccggattaaaaaccccggcttaa

SEQ ID NO: 147298 - DNA, 2343 bp, Enterobacter cloacae
atgctccaggctttgcgggacgcattgtttgggtttaacgaggagagcagagaaacatccgagtcggcagcggggattagtgacgctgctgaaggacttaacaataccagtgaggcagcggagaaactggggcgggccggcgggctgctaaatacctttaatcttgcgattgcgggcacggtgggtttactggctcttctggcgggggctgcatacagttcatcccaacagttcgacaacgttgccagatcgctcattttgatgggcggggctggtttttcctccatgcagcaactgaatgatgcggcaaaagctgttgctgataacgcaggtgcttccctggctgagtccgttgataccctggtccaactaaatgacaccgggaagtataccgccgaccagatgtcgaaaatcgccaaatcaattctggctatgggcgatgctgggctggatacaaaggctgcgctggcggatttttcacgcctggcaagcgaccctattaaagcgctcgcaagcttgaaccagcaatatggctttgttgatgaagccatgatgaagcacatcattaccctggagaaaacgaaggggaaaacagcagcggcaaacgaagctataacgctttttgccgacaccatggaggatcgaagtaataaaattgtagaggccaccgataatatcgggcaggcgtggaacgggattaaggctttctcctccgacattttcggtcaaatcggggttaccgtgcgcgcatggggaaaccagatcatcgatatcttcgaacttgttaaggcttcgattaaagacctgttcctcaacattacttcactggacgcgaaattcaccggcactattgctggctgggctgaaaaaatccctggtggcggggcgctggctaattttcttggcatggatgtagaggccatgaagaaggccggggatgaagcggacaaagaaattgaggcgaataaaaaacgctataacgagctttggaagcgagtaaccgatcctaacgcgcaggctaaatatgaacgtgaggctcgcggctcaacagtggcaggtgaagggggaacaagtcgcgaatcgagagatgcagtctcgaagcttgctcaggactcagacaaaaagaccaaagaggcgaaagccactctggaagctggcgatcgcaccctggagaactaccgcgcccaggccagaacgttaactgaaacgctcgagaccctccgacaaactggcgaaacccacgctaaaaataccgagttcagtaaacagcaatctcggtttgctgaattggatgaggcagccaaaacccgcgcgctgactgctcaggaaaaatctttactgtcgagccgtgaggcgattctgaacgccgccaaggtggttgatcagaagaataaggaagtagaggcgcagcagaagattaacggcctggcgcagcaggcgaataaatacgtcacgcagatgtcggaaaagactgatgctttgcgcgctagtgcaggcctcagcagtcggcaaacacagcgcatgatggaagaggcgcaactccgccagggctggctgaatggtggcggcaagcttgaagatgcaggctatgcgaaagagctggcagcgctgcgaaattattatgcagaagaagacaagctgcgaggcgactggaaagcgggggctgttgctggatggaatgaatatctcgatgctgcaaccaacacttacgacgccgttaaaaacgttgccagttccacgctgactggcctgagcaacatgctgactgagcttatgacaactggcaccgcgtcagttaaagagttcggcaagtcgatgctcaagatgatcctggatgtgacgaaccgcctcatggtcgcctacgcagtgcaggcggctttggggtggattaatggatcatcaaatccgcagggtggtgggattggcagtcctgattttgttggtccagtcaggaatgctaaaggcggtgtttatgattcgccagggctcagtaagtacgttaatggggtatacgactcaccccagtattttactttccagggcgcatcgaagtttgcgaagggcggtgtattcgcagaggccggagctgaagccatcatgccacttactcgggattccgccgggcggttgggcgtacgcgcccagggtggtggcggtatggctccggttattaataccaccgttaacgttgatgctggtggttctgcaactgttcagtcttccagctcaggtgatgctatgggccgtgcccttgctgatgaaatgcagaacgctgcgttgcaggttatccagaagcaccttaagcctggaggcatgatctacaacttcagtaaaggcaggtag

SEQ ID NO: 147299 - DNA, 642 bp, Enterobacter cloacae
atgaaagttaaagagaaaatgtgggatggtcgcggccgtccacgtaagttccagccgggtgaagctgtggagtggcgattgcgcgctccggataatctgcttatggagctgagaatatgtgccagagctggcaacaggagtgtgaatgaggaaattattgccaggcttttgttgtcgctgaattatcagccgggtaagcctgtgattaaaacagcggagggagagaggctcattgcgctggcggtgagatttgaggaatggcttggaaaattacttgatggtgaatccgttgatgctgtgaaggaagttaatgtcccgctcaagcaagagcaattgtggatgtggcgtgagggtgaaagaattttgcttccgggcaaaacaaccggatatagcatgcgtattcctgagaaccttgcggatgaaatcagggcaatggcgaaggtgcataaccgtagtcttaatgacgaaatgctcacccgcctgatgaatacgctggattatttcacggaaaggttacttgaccagaacgaggatgcgcaggcacttaaagttctttgcatggagttcgaggtgttcctgaaggaaaaaataagggaggtggagaaaagtgaccttccctgggatgaaaagccgtctcagtga

SEQ ID NO: 147300 - DNA, 126 bp, Enterobacter cloacae
atggagcagatgggaatcaccgagagcgttgtcatcgatatgattgaaaaagtcgttgcgcatgtgttgctgtggatggcggaaaagcgcttgtttttttcgattattttacctgatgaagcttga

SEQ ID NO: 147301 - DNA, 1179 bp, Enterobacter cloacae
atgatcgtttcagctcccgccgattatcgtgaggccgcccgtcatcgccttcctcgatttctgtttgattatattgatggcggcgcagtagcagaaaataccatgcacgcgaactcaactgaactcgcctcaattgcgctgcgtcagcgggtgctttgtggggttggcgacccgacgctgacgactaatatccttggaacgtcatgggcaatgccggtcgcgctgggtcctgtaggagccactggcatgtacgcacggcgcggcgaagtcaaagcggcgcgagccgcaaccgacgccggcatcccttataccctttccacggtatcggtatgcccgatagaagaagttgcgcagcatgcctccggagagctctggtcacagctgtacgtgcttaaagatcgcggttacatgcgcaatgctctcgaacgctcgtgggccgcagggatgaaaacgctggttttcaccgtcgatatgcccatccccggctcgcgctatcgcgataatcgctcgggtatgtccggaccgtgcgccactctgagacaatatctgcaggcctgtacccacccccgttgggccatagacgttgggctggctggcagacccctgtcgtttggcaacattgaaacctacaccggacacaagatgacgatggacgactatatggggtttataagcaataacttcgacccctccattgcatggcacgatttggagtggatacgcgacagctggaaagggaagctgattatcaagggtatccttgaccctgaagatgcaaagaatgccgtccgtctgggcgctgatggcattgtggtttctaatcacgggggcaggcagcttgatggcgcaattccaacggccagggcgctacctcgggtggtagatgccatcggcgatgatctcacggttctggtcgattcaggagtgcgttccggggtggacgttatccggatgcttgcccttggcgcaaaaggggtactgctgggacgttcatatatttatgcgctggcgacggcaggagaagctggtgtcgcacacctgctgcgcctgtatgctgaagatatgaaggtaacgatgactctgacgggcgcagcatcaccggcggatattcacgctgactgcctcgaccgtttagagaaagatatggcgcagctagccaggacgcattctggacaatag

SEQ ID NO: 147302 - DNA, 279 bp, Enterobacter cloacae
gtggatgtggactggctgatcgccgagcgtcccggcaaggtaaaaaccttgaagcagcatccgcgcaagaacaaaacggccatcaacatcgaatacatgaaagccagcatccgtgccagggtggagcacccgtttcgcatcatcaagcggcagttcggcttcgtgaaagccagatacaaggggctgctgaaaaacgataaccaactggcgatgttattcaccctggccaacctgtttcgggtggaccaaatgatacgtcagtgggagagatctcagtaa

SEQ ID NO: 147303 - DNA, 315 bp, Enterobacter cloacae
atggcggaatatggtgttcagacatgggacgcatcaggcaaggtaaacaactatggcgttaaacctgtcagcgtttgtggctatctccagctggcccagaaccagaaaacaggctcttacacagtagcgcttccaccgggttgcaggctgacctattttcagagcatgaacggcgatcagtttggtacgagtcggaggaagatcaccatttcggggggaacagcaacagtgtcagcagcaggtgataccgactactcagcagggactgagcctgcggcagcggcttatctcattttccagatcgagagggcataa

SEQ ID NO: 147304 - DNA, 630 bp, Enterobacter cloacae
atgaaccaaacacaatttgaaaaggcggcaggtataagcgccggtctagccgtgcgctggtttcactatatcgatgctgcaatgaaggaattcggcataaccgcgccgctcgatcaggccatgtttatcgcgcagatgggccatgagtccggcggtttcacccggctggtggaaaacctgaactatgcggcagaaaacctggtacctacgttcggcaagcatcgcattactgcacagcaggccgccgcacttggcagaacggcaacgcaaccggcaaatcagaaagcgatagccaatctggtttatggcggtgagtggggcaaaaagaacctgggcaaccaggttgctggtgatggctggaaatatcgcggtcgcggcctgaagcaaatcaccgggctcagcaattaccgcaactgtggccacgcgctgaagttggaccttgtaacccagcctgaattgctggaacaggatgaatatgctgcgcgctccgctgcatggttctatgtctcgcacggatgcctgctccattccggcgacgtggagcgcgtgacgctgcttatcaacggcggccgtaacgggctggaacaacggcgcaccctgtttaacctggcgaaatctgtgctggtgtga

SEQ ID NO: 147305 - DNA, 798 bp, Enterobacter cloacae
atggctttagaacaagttatctacaatcttgaagaggttaaagggttctctgatgaagagctttatcaacgcctttgtgagagttgggggattacgaatggaaaactggcagtttggggcaagattctaaatggcccagattccgatagcagaaagctcccaacccgtcttttagagattaaatccctccaaacgggactggatactgaatatcccattaatgttcgtttgacgatggacaaaggtgtttttgtttccttcaaaagtgtcgaagagttatttggcttggaagatgggagttttgtctcatgcgagcttgctttagcgcctcaatctgaacgcgaaaaacatgaaaacccgttcgaatgcaatgtggtagtaagttcagtccgtcgacttatcaaacttcctgaatatacggcgaatgacatcatcaaaggtgatgaaaacatcttccttgatgaagctgtttacaagcagcatttacagaacgttcaatcaagaattgacagcgaagtgactgcacttaacgcagaatttgagcgcgaagaatcctcattgaaggctcagatatcgtcatataaagatcagcttcaacatgtccaagatgacctaaatcaaaaaaataacgttctctctcaggcaattgcgaaagcccaaaagctggaagttgaacactctgaatggcaacacaaaatcgcattgcaaaagaaggcagaagaaacaatgtctaaaaaaattgaacgcttaaggaaggtgcgaataagcaggtcatttcttcccaagctgactcgctga

SEQ ID NO: 147306 - DNA, 234 bp, Enterobacter cloacae
atgaaaaatatgattctttgcctggcggtatcggtattgctctccggttgcgctggcgttattgagaaacagcaacccgtatgcaccggaacagccctggtcggcggacaggaaagcagcgtccagatctacggagtccgtaaacaaaacaatcagacgcagtaccgcgccggttatccctttaactggtcatgggtgagcgccaacacattcaccagcaccacctgccactaa

SEQ ID NO: 147307 - DNA, 705 bp, Enterobacter cloacae; identical to SEQ ID NO: 8686

SEQ ID NO: 147308 - DNA, 219 bp, Enterobacter cloacae
atgaccgacactacgggtattaaaccctgtcttgtcctgcacccaagaagccgcactatcagcactacctgttacaccatctattaccgcctgggccgctggcttgttagcttcgctaaaccaatctgggaacttctcacgaatgccagcattcagatcggacactacgctggagatttctccaacaaagcccgtcacctgtttagcaaggtcgcctaa

SEQ ID NO: 147309 - DNA, 351 bp, Enterobacter cloacae
atggcagttgaaacatacagctggcgctcgcagctcggtgctggcgcgattgaatatagccaggcggtacgcgcggcgcagttcggtgatggctatgagcaggtggctgagaatggcatcaactccacagccattcaggtgccgatgaagcatacaggagcagaggctgaggttgatgcagtccgtgatttcctcctggctcataccgtgaaggctttcatcattacgccgccaggtgaagaaaaggggctttaccgcgtcgtagccgattcggttcgtaaaacgcagatcagcagcaaatatgctgagttgacgttcaccatcaaacgggcttacggagtgtacgcataa

SEQ ID NO: 147310 - DNA, 216 bp, Enterobacter cloacae
atgcctgccatgctggggctaattaccggggttatatcggctggcggtcagccgcagccatacatggccatatacaagagcatggcaaaacttgagggaagcaatacgcggatattcgccagaccgcagacaacccccggcggcaaccttcaaaacgtcgcgtattcgaatctgagaaacgtgattatggccatcaactgcgccaactatgattga

SEQ ID NO: 147311 - DNA, 216 bp, Enterobacter cloacae
atgcctgccatgctggggctaattaccggggttgtatccgccggcggtcagccgcagccctactcggccatatacaaaagcatggcaaagcttgagggaagcaatacgcggatattcgccaggccgcagacaacccccggcggcaatcttcagaacgttacgtattcgaatctgaggaacgtgattatggccattaactgcgccaattatgattga

SEQ ID NO: 147312 - DNA, 1041 bp, Enterobacter cloacae
atgactaagaagatacatgtttatgattttttctccggctgcggtggtactagtgctggcttgaaatcagttggcatggatattgtttttgggttggacattgattttgactcatccaatacttttaagaaaaacaatccattagcacatttcgttcatggtgacatcagacaaaccagtgttgactcaattgaacatttgtttactcagtcacaaaaaagtaatgctcagacgcttttttgtggctgtgcaccatgccagcctttctctaagcaaaataaagcgcgaaatcaagatgacccccggaaagaccttttgagtgaattcactcgatttgtttcgtactatgcccctgactttgttctgatcgaaaatgttcctggcatacaaaacgttgatataaacaatggcaattttcagaagtttttggaatgcctcaaaacccttgattataaattcgactatggtgtaattcctgccttatggtttggtgtaccgcagacacgtgagcgatttgttttattggcatcaaaacatactgctatatctttacccaaaaaaacgcatgatggtcttaaaactccattcgctactgtaagggattggataggttctcttccgcccattgccgccggtgagagtcataaattggttgttgatcatactgccgcgaagttatccgctataaacataaaacgtatacaggcaactccagaaggcaaaggacgtgaatcctggcccgaggatttgatattagattgccatagaaaatattctgggcacaccgatgtctatggccgtttgtcgtgggataaaccagctagtggtttaaccacccgctgtatcagctattctaacggccgatttggccatcctgaacaagaccgagctatttctattcgtgaagctgctttgcttcaaacattcccttttgattatatcttcactgggtctatggtttctaaagccaaacagatcggaaatgcagtgcctcccaaaatggcggaagcgcttggaaaagctatcatttcttcatgttaa

SEQ ID NO: 147313 - DNA, 216 bp, Enterobacter cloacae
atgttgcagacaagttttctgctaggtttaagcaagatcagtcagtgttttacgcatctcttggctaacgtttctgccagccctttcgcaacgaacaagcaattcttcagcgtcagagaggtgattgaagagttcggtcaattcatcaaaatcaataccaattccggcgtcagctgccagcattgtatctttaagatgatcgatatccccacgtag

SEQ ID NO: 147314 - DNA, 264 bp, Enterobacter cloacae
atgagagaacaatatctgatacccctggcggagtggaagtccggacgattcggatttgagatcacaaataccactctggttaagtatgggaagcttggctatatcaatcctaaacctgaaaaagtccgtgggcgatggtgtgttgatcgcagcgcgatctacgtcggaccaagtgccgccggggtagcacccgaaattcacgaggacgacgatgaagcgttgaaggagatcctaaatcatgtcaccaaggccacgaaaaaatag

SEQ ID NO: 147315 - DNA, 1119 bp, Enterobacter cloacae
atgtcaccaaggccacgaaaaaatagcatatctatacccgggctttatgcccggtttgaccgccgcacggacaaaacttattaccagtacaaaaatcctgtcaccggcaaattccacgggcttggtaccgacaaagccaaagcggagaaaatcgctgctacagccaaccagagaattgcagctgctgaaaccgattacttccttaaacagattgatgaaaaaccggcagccaataaaactcggggaattagccttaaaggctgggtcgtcaggtacgagaaagtccagcgaaccagggtgagcaatggggagttatcggaaggacgtttcaaagaaaaaatgaggatggcaaatttgctggcagaacggctggggaaccatccattgcgcagcctggaggttcgtgatttttcccttctcctggaagagtggcttgataaaggccaggcgagtacagcgctgaataatcgcgtggtgtggatagatctttaccgtgaagcgcaacatgccggtgaggtaccgcccggctggaatccccctgaggcgacgcgtaagccaataccaaaggtttcccgcgcacgattgagcatcgaggactggaaagcgattttcagcgtcgctccggaagggcattatatccgcaacgccatgttgctcgcattggtagccggccagcgaagagaggacatagtcaggatgaaattctctgatgtgtgggatgatcacttacacgtgatccagggaaaaacagggatgcggctggcgttaccgctctcactttacagcgaagcggtcgggatgactctcagggaagtaatcgcaggttgccgggaccgaatagtaagcccgtatctgattcatagccagctacagaagaaaggccagccaatgagcaaagataacctgagtgattattttgctgaagccagggataaggcgggtattaaaccaccggagggaaaaaccccaacaacatttcacgaacagcgctccctgtctgaacgtctatatcgtgctcaggggatcgacacgaaaactctgctgggtcataaagtacaggcaaccaccgataaatataatgacacacgcgggcaggaatggatcaaactggtcatttga

SEQ ID NO: 147316 - DNA, 765 bp, Enterobacter cloacae
atgaaccttgagaacacgctgaagttccacttcgcaaaatcaaccatgatcagtgattctcctcgcgctactgcgtctgactctctgactggtacggacgtaatggcagccatggggatgactcaggaacgagcatcgatgggatacagcgctttcctggggaaaatgggtataagttcccttgaccgtgataaggcggttgatctgcttactcagtacgcgctgaagaactgcgacaaggtggccgccctacgcaaacttgaatctgatgttaagccgaaggtcatgcaactgctcgcaacctttgccttcgaggactactcccgcagcgctgccagcacccgcacgtgcgactgctgcaatggtgatcgcttcgttgaagtagaggtcatgaccatgaagcacattggaagaccgcacctgaaagagaagcgggagacggtgaatgttctttgccaaaaatgcaaagggaagggcgtggtcagcaacgcatgccgctgcaatgggaagggtgtcgtactggacgaagagaagacacgtcagcaaggtggcgtaccggcccacaaaacatgttcacgctgcaatggtcgtggttattcgcgtctgcttccagaaagcgtccgcaaattcattagtgaaaacgttatcgaaataccggagacgacatggcgccgatcctacaaagacttcttcgaaagcctggttggcgagtgcctcaagcaggaggaatatgccaacagcatgctcaaaaaagttacgcaatga

SEQ ID NO: 147317 - DNA, 282 bp, Enterobacter cloacae
atgcacaactcagaaacaaaacgttttattaaagctcgccataattcaaatgatgggataaaaaccgttgtgcgggacatccgcatctcaagttttagtcgtgatggaattatctaccgccatggtctttttcctgatactggcgtaagtatcgcaatgaatgagtattcctatttaaggacgtatagcacagccgaagaggctgaggtgggcgaacctgagtggctccattggcgtcagcaggaagcgttgggtttaaaagtaaatccatttggaaactaa

SEQ ID NO: 147318 - DNA, 225 bp, Enterobacter cloacae
atgaagcgagttaaaattgaattctcatccagtggtattgttctcaataatgttgagtttcaggtattgcagggtgatagcgtactggttgaggattccctgtcaggtaaaatttcgaatgtgttcatccgccactatgatgtaagtgttgatgatagccccctgtcagttctgtttccatccggtggtatcaccgggttaaacgtgaaagccactttatcctga

SEQ ID NO: 147319 - DNA, 354 bp, Enterobacter cloacae
atgaaaggtatgcgcaacatcgctccgttcggactaagaatgccggaggagcttcgagaggctatccaacagcgagctaaagacaatgggcggtcaatgaattcagagatcgtgcagatacttcaggaaactctagataccgaccgagcgcttgctgaaagcgatttagtagacttcgactcaactcaagccgcatttaatgccgcgtcgacagcagaagagaaagagaaattcctaagtaatcttgcgaaaaaagacccgttcacggcagacatacttcgcgagggagaagagcacgccagaagacttgctgcgatacttggccgccgcatggggtatctggatgaagagtag

SEQ ID NO: 147320 - DNA, 174 bp, Enterobacter cloacae
atgaatgatgttttatacaccgggcgcaaaagtgaaaatattcttctccgtgtacccgagcgcatgaaagaagaaatccgccgcatggctgaaatggatgggatttcgattaactctgcaattgtacaacgtctagctaaaagcttgagagaggatagggctaatggtcagtaa

SEQ ID NO: 147321 - DNA, 717 bp, Enterobacter cloacae
atggtcagtaaaaatagcgaagcccggatgtgtggggacactaaccgggcctctatcgaaaaatcctgcacaggaaatatcgacatgaatattatagcaaaatcagatcttaacttccacggcattgatttagttcctgcgccagtaaatgacggaatctggctgacatcgtcagatattgccaaagctcttgggtatgcctcaagcaagagcgtatcgactatttactcacgcaattccgatgagtttacaagcagcatgtcaatggtcatcaaaatgaagaccaacggaataaacaataacttacgtgaaaaatctgttcgtgttttctctctacgtgggtgccatctgatcgcaatgttcgccactacgaaagtagctaaggatttccgccgctgggtgttggatatccttgatcgcgaagttgctcactcaccgattgccaagcagtttacggacgaagagttatgcacccttgcatatctgtggcgttcggctgcggtgatgtatgaagcgtgccgagaagttcatccgctgctgttggttgctgagcatagactggttccacgctttacttccattggcactaattacagccgcaacatcaataaggcgcgttccatcctgaggcgagaaacagatcacatcaaagaacaaccatggggagatagtaactggaaaaatgtattttcatacgggacgggagtattgcagtga

SEQ ID NO: 147322 - DNA, 378 bp, Enterobacter cloacae; identical to SEQ ID NO: 146978

SEQ ID NO: 147323 - DNA, 1281 bp, Enterobacter cloacae
atgaacagttcgaccaatgcagtaaaacgctggtggtacatcatgccaatcgtgtttatcacgtacagcctggcgtacctggatcgtgccaacttcagtttcgcatccgccgccgggatcaacgaagaccttgggatcaccaaaggggtctcctccctgctgggtgccctcttcttcctgggctatttcttcttccagatccccggcgcgatttacgctgaacgccgcagcgtgcgaaagctcattttcatctgcctgatcttgtggggtgcctgtgcgtcgcttactggcgtggtgaataacatacctgctctggcggccattcgctttattctcggcgtggttgaggcggccgtcatgccagcaatgctgatttacatcagtaactggttcacaaaatctgagcgttcacgtgctaatacgttcctgatactcggtaacccggtcaccgtgctgtggatgtcggtggtttccggctatctgatccagtccttcggctggcgcgagatgttcatcatcgaaggggttcccgcgattatctgggcattctgctggtgggtgctggtgaaagataagccagcccaggcgaaatggctttctgaggacgaaaaagccgcactccaggcgcagctggataaagagcagcaggggctgaaagcggtgcgtaactacggcgaagccttccgctcccggaacgttattctgctgtgcgcacagtattttacctggagtattggcgtgtacggctttgtgctgtggttgccgtcaattatccgcagcggcggtgaaaaccttggcatggtggaagtgggctggctgtcatccgtgccttacctggctgcgaccatcgcgatgattatcgtctcctgggcatcggacaagctgcaaaaccgtaagctgttcgtctggccgctgctgctgatcgctgcttttgccttcattggctcctgggccgtaggcgcaaaccacttctgggcttcgtatacgctgctggtgattgccggtgcggccatgtatgccccgtatggtccgttctttgccatcatcccggaaatgctgccgcgtaacgtcgccgggggcgcgatggcgttgatcaacagtatgggggcgctgggttcgttctttggctcgtggtttgtgggctatctgaacggcgccaccggcagcccgtcggcctcttacatctttatgggggtggcgctttttgcctcggtatggcttactctgatcgttaagcctgctaataatcaacagctacccgttggcgcacgccacgcctga

SEQ ID NO: 147324 - DNA, 315 bp, Enterobacter cloacae
atggcgatcctgaccgttgtgctgataaaacccgccagggttctccagggcttcaacaatgcgtgccaccggaattttatccacagcgtccacgccaccctgcaccgagccctgcatggaagccagcaccgcagctttacgcgtcgggttgccgccgttagcaaagtgataggaaaggccaaaaccgccgccgggcgtgccaatctgtccgagcatcgcggcgagcgtcaccagcatccagtgcttctgctcgccaaactgctggcgctgcatcccccagccggacatgagcatcgtgacatggctatggaataa

SEQ ID NO: 147325 - DNA, 2019 bp, Enterobacter cloacae
atgaatgacgttacagttgttacatcggttacttacccatcacccgagtcgttggctctggtggctgatgtgcaataccacgaaccatatctgtcagccgctctaaaccgaaaattcaggggaattgttgacccgggattttatgctggtttcttgcctaagcctggcggtgggatgaacctgttaatcacctcagtggatggagataaaaccgctggcgcggcgtcagtggatattggtgaattctaccaggtaactattcagcatcgtaaggatatctctcttgcacttaacgcaggcaagaaatatgcaattgtgctgaagggaagataccttcttggagaagatacctatcaggtgaataccgcgtcacatattcatgcagctgaatttgttgccagaacctataccgattcatatcagttaggtgatggggaactgctggtttgtacggtgaatatccctgctggcgtatctaccattactcaagagatgattgatacatccgagcgtatcaaccgcacgatcggcattgatatttcagactctgtaaccagtaccagaagtgatgttgctgcgagttcgctggcagttaaaaaagcctacgatctggcgaaaagcaagtatacggcgcaggatgcaagcacaacgcaaaagggattagttcagctcagtagtgccactaacagcacgtctgaagtgctggccgccacaccgaaagctgtcaaggctgcatatgacctggctaacgggaagtatacagcccaggatgcaaccacgacacaaaaagggatagttcagctcagtagcgacaccaacagcacttctgaaacattagctgcaactccaaaagcggttaaagctgcatacgatctagcagccggaaaggcaccatccagtcatacacatccctggaatcagatcactggtgtgccaacagcttcattgacagcgaaaggcatcactcggctcagtagtgccactaacagcacgtctgaagtgctggccgccacaccgaaagctgtcaaggctgcatatgacctggctaacgggaagtatacagcccaggatgcaaccacgacacaaaaagggatagttcagctcagtagcgacaccaacagcacttctgaaacattagctgcaactccaaaagcggttaaagctgcatacgatctagcagccggaaaggcaccatccagtcatacacatccctggaatcagatcactggtgtgccaacagcttcattgacagcgaaaggcatcactcggctcagtagtgccactaacagcacgtccgaagtgctggccgccacaccgaaagctgtcaaggctgcatatgatttggctaatggaaagcaagcggcagacgctacgctcactgctctagcggcactagctacagcagcagataaactcccttatttcacaggtgttgatcgtgccgcgttaactgcattgacaagtgttggacgcgccattcttggtaagaccagtattcagagcgttcttgaataccttggtttaggggaaggctcggcgctgcccgttggtgtacctattccatggccctcagccacaccgccaacggggtggctgaaatgcaatggtgcagcattttcttctgaaaagtacccaaatctggcaaaggtttacccaacgttaaaattacctgatttacgcggtgagtttatccgtggctgggatgatgggcgagggattgactctggtcgctctattttaagcgagcaaggatatgcaacggaggatcatgctcacggattaccgtcaaaatcaaccgtagcaactgaccgctcaattaatttctactttgacgaggcatgggctactagtggtaatacgggagttatcagatgggggaacacaagcgatgcaggattgccagcccctaattatggaacttttaaaacatataaacagtccgtagctaatttaggtactgctggcttagaaacccgccctcgtaatattgcatttaattatattgtgagggcggattaa

SEQ ID NO: 147326 - DNA, 1035 bp, Enterobacter cloacae
atgacaaaaattactaattctaatgagttgaagttactgtataaacagtcagtgctcattccatcatacaaagatcacgtagcgatcttgcaaaaacaattaggaatagaaaaacattcttttcaaaatatgacaagattgaatagacaagctgtaattagtaactctcttcgaaaacaattggctagtataccgaacttggctggaataggcagcaagtatcgtgaacatatcgcgattttacagaaacagactcaggctcttttccctcatgatgcaaatagatatattcaaatgctaaggaaacaggccgaaatagctatgccattacgaaaacagcttgaggtgcttaataagcaagctggtttaaataacatgcaagcgatacttaaagaattacaacaaagtgcaagttataaaatagatgtaagccaagacataaagaaagtactagatcactatgctagaacaagaaatgcttcattacatcaaataatagagcaggggatttcatctattgcgcaggcttatgctgaaggtgctactgaaacatcacacaccaaaagtaatgttcaaaataaaggattaaataaacctagctcaaagtttgttgattcatttaaagagcttccttatccactgcaatggttactaatggttatattttctcaagttgtgtttggtgcttttattgattacggaaaagagaaaaccttgctgggaatacacaaggcagaatcatattttatatctctgtttgaggataaaccaatatcaaaacaacaattaattaaagaaaacaaagaaattagttgggaagatctcaatggttttcgttttataactggtgagaacgtaagattacacgtcagtccttctataaatagtgaggtgattgaatgcattggcaaaaatactatagtggctgttttagataaaaaagatcgccaatggcttttcgtgcaggttaaatcaggggacgagtttattactggatggattacacgaacatacacaaagcctcttaaggcttga

SEQ ID NO: 147327 - DNA, 477 bp, Enterobacter cloacae
atgaatatgagatggtttttattatttgtatcgttagtttcagcaggaacatttgcaaaaattgatcctctacaatggaatgtaattgaagagagaggggggagagaatatacaatccataatcataatggtgataagataagttttttatgtgatatgggattcatgtatggttcaccagatagtgcaggtagtttaggtttgttgctaagttcgtcgaataataaaaaagagtataatgctgacaagaataaaatagtattaactatagatggtgagcaatatccttttagcaatcttggatcaatggttggagattcttggtggtatgccttttggcaagatgcagcagattcaaatgctaatatgattgatgcttatgttgataatgaaaaaattgctacattccctctttctgggctaagtaagttgtatcaacaagccaaaatggatggatgtattaaacgaggcaaatga

SEQ ID NO: 147328 - DNA, 351 bp, Enterobacter cloacae
atgtcatctgaacatgttcgtaaaggtgtaacaaatgcgaaattcaatgaagagcaatctaatattctctttattgaaataggaattctgtcaatactgataggtttaatgtctaaatcatggtgggcctttggcggttcttttcttggactgatttttagtttaagaataaaatttctagcaataccattgatgattgtatttagcttagtatggggagctattggctatagtattggtactttgtttgaatcaacagcagcaagtattgttttgggggtaattgctttcctgagtggtttgggtactcattttgctgccgtgcaatgggcaaatgatattgcagaataa

SEQ ID NO: 147329 - DNA, 627 bp, Enterobacter cloacae
gtgcctgtactgttaaagggggactctaaaatggctgtgattccaatgtcgtactccccgggtactgtcgctcgtcgattttcgatcctggacggagttaccatccaaggtgtgctttaccaggttatatgggattccaaaaccccatttgcagctgtaatagaggctgcgccttctattatcgatggtgatatgcgccataaggttgtcgctactcttgaacttcaacgtcgcccgcagcttgaaggcgtactggtaaggaagttctgggaggatagcgatgttgcccagattgaaggtatcgtggttgatggaaccgtccgggatgtcggtttagctacttttgtttacgaaaccgtagcctcaaaagctggtgttgttttgctcagtgataatgagcaatacgaaggtggaaaagctctttggcaacacatcgcccgtcgctcttccgagctaaaagtgtttatccttgacaccgatgccgctcagtattacccgtttgacggcgaacgtgtttgctatgacggggtaagtattcctgaatccgagatatggagtgaacacccagatcgaagtaagcatggggttgttctggtcgctgaatccataattggaaatgcggcatag

SEQ ID NO: 147330 - DNA, 528 bp, Enterobacter cloacae
atgcgaatgaaaaatgatgggatgagtcagaaggatattgcagccaaagaagggctgtctcaggcgaaggtcacgcgtgctctccaggcagcgagtgctccggaagaattagtcgcccttttccctgtgcagtcggaattaaccttttcggactacaaaacgctttgtgctgttggcgacgaaatggggaacaagaatttagagtttgatcagcttattcaaaacatatccccggaaataaacgacatcttatccattgaagaaatggccgaagatgaagttaaaaataaaatcctgcgcttgataacaaaggaagcctcactactcacggataaaggttctaaagataagtccgtagttactgaattatggaaatttgaggacaaggatcgctttgcaaggaagcgcgtgaaaggccgtgcattttcttatgagtttaatcgactttcaaaagagctacaggaagaactcgacaggatgattgggcatatccttagaaagagcctcgataaaaagccgaagccttaa

SEQ ID NO: 147331 - DNA, 1197 bp, Enterobacter cloacae
atgagtgattccagccagcttcacaaggttgctcaaagagcaaatagaatgctcaatgttctgactgaacaagtacagttgcaaaaggatgagctacacgcgaacgagttttaccaggtctatgcgaaagcggcactggcaaaattgcctctactgactcgtgcgaacgttgactatgccgtaagtgaaatggaagaaaagggttatgttttcgataaacgccctgctggctcttcaatgaaatatgcgatgtcaattcagaacatcattgacatatatgaacatcgcggagtgccaaaataccgggatcgctacagcgaagcgtatgtgattttcatctccaatcttaaaggcggtgtgtcaaaaactgtatcgacggtttctctggcgcatgcaatgcgtgctcatcctcatcttctgatggaagatttaaggattctggttattgaccttgatccgcaatcttcagcaacgatgtttttaagccataaacactctattggtatcgtaaacgcaacatctgcacaggctatgttgcagaatgtaagccgtgaagagctgttagaggagtttattgttccttctgttgtacctggggttgacgttatgcctgcgtcgattgacgatgcctttattgcatccgattggagagagctgtgcaatgagcatctaccgggtcagaacatccatgcagtcctgaaagaaaatgtgattgataagctgaagagcgattatgactttatcctcgttgatagtggtcctcaccttgacgccttcctgaaaaatgctttggcctcggccaatatactgtttacacctctgccgcctgcaacggttgatttccactcatcgcttaaatacgttgcccgccttcctgagttggtgaaactcatttcggatgaaggctgcgagtgtcagcttgcaactaacattggttttatgtccaagttgagtaacaaggcagaccataagtattgccatagcctggctaaagaagtgttcggtggggatatgcttgatgttgtcctccctcgccttgacggttttgaacgctgcggcgagtcttttgacactgttatttcagctaacccggcaacgtatgttggtagtgctgatgcattgaagaacgcgcgaattgctgcggaagattttgctaaagcagtttttgaccgtattgaatttatcagatctaactga

SEQ ID NO: 147332 - DNA, 810 bp, Enterobacter cloacae
atgcaagaagagaaacaacactacctctacgttctggtgccagagaacggagatacttttaaaatcggcatttcatgtggtccattggcacggtttaaagggctacaagtgagtcccgattttgcgctttcacgggtctatcgtggtacgcgtttggcaatggttaatcttgagcgggctttacacgcaacctttttcccctggaatgcgccgtgggagaaaagcgccggtggcgggcatactgaatggtttacacgagagtgtcttgataaggttttggctcatatcgaatatctaaatgatatgtggggagggattctcgagcgcattaagtcgaatgatttacttcagcgtccagtagatgctgcttgctctttcgaaaaagagctggatgttacttctatcgtgactttcaaagatgacgcaggaatgagggacgtggcttatgtctccatatctggctatgaaccggacgcgatccgcgctcaatgtgaattgctgaaagcaatgtttatgcttcggactaaatatccctgggatacagggcgggtgtgcttccctatggaagagttaaccgccaccattgattcccagctttaccacgataatccagagaagttttttagccttttagccggtaatgggcttaactgtgtgtccgggctggggcgaagtagaatccaacatgcctcgctcttcggtcccttcttttacgatcgacacgggtactttgaggctgaacttccggcgcttacgcgtgctatagatactatcgatttcgaacgattattcgctgctcttagcaaataa

SEQ ID NO: 147333 - DNA, 885 bp, Enterobacter cloacae
atgccggaagaaagtaaaggcttccttagcgttgaagaagttgcaggaaatacaggagaaatccacagcctgaagcccaataacaacagcactatacaacccatcgctttgttgcgcttaggtgtgtttgtgccaaccttaaaatctaccaatgtggcgctacgtcgcggatcgtcagttacaacaaacacaacgaacgcaactgaagaactatcaagcctcaaaattgttgagcaggaaggctatgagggaattgaaattcatggtccacgcctggatatggatactgattttaaggtgtgggtgggcataacctccgcgttgtttgactacgcacctgatgatgacggcataatcaccctgccattctccgagtttgccgatcgatgcggctatccacgtaagcgcctttcaaaggcgttccgtaaaagtattgatgactctctgacacgcattcagcagacagttgtcaaattccgcttcccggcggcaaaaggtcatctcaataacattaacgtcaacttgttggcatatagcagcctgaataccgagcttgatgttatcgagatccagccgcagaaacagctatctgaactttactatgttgactataagcgaatcctgaagctgaagatgctggataaactagggcgcaaagagacggccaaggtactgtatacattctttgaggctctacccgccaacccggcacctgtcagcattgagcgccttagagcgaggcttaatctcaaatcatccgttagcgtgcaaaatagcgttatcagaaaagccatgaaagatttggaagctattgaatatcttaaattttcagagataaaaaacggcaggaaaatcggcttccagatccataagcgcaatccataa

SEQ ID NO: 147334 - DNA, 426 bp, Enterobacter cloacae
atgctcggcattctcaaaaagaaattccgcaaagcggctggcggagtcaagaagatggaaaaccgtgatgcggtggaagcgactgtctggggcgcatattccattgcatactctgacggcacctgcgatgcgaaagaaattgcagtgttggaaaaaaccattgcagcacttcctgcctttgcgccgttctccggtgaaattgcccagatgagcgccaatattcgcgctcaatatgaagcctcgccgcgccgagcgaatgcccaggctttacgtgaactggctgacgtgtctggaactaatgatgcggtagatgttctgtgcctatgcattgatattgctgaccaggatggcattggggcagaagagcaggagcaattgaagaaaattgcccaggctcttcaattgccactggaacagtatatctga

SEQ ID NO: 147335 - DNA, 768 bp, Enterobacter cloacae
atgacaattaactatcaggtactgcgtgaggcggcagaaaaggcaacaccagacgaatgggtcgcatttatttcgacggatactggtacttatgcggtgcacacgcccggtgatgaacgatttgaagacgttatcaaatggaccggctttgatggacagaaaaatgcagagaacaacgctcgtcatgttgccgcgttcaacccaaaggttgcactggagctgcttggtgaaattaagtgcctggaggacacaaatattgatgctatgtgtcgaattgcagagcttgagactaatctcgcggcgctggtggcggagaatgcggggcttaaggccttcaaaaccgccgtttatcagcagatgggcgtcggatgtgatgctcctgaattctccattacggtaggtttgagtaacttacgtcgttttgctgacacactccacgccattgagcgtgagttctttaccaaagagctacctgatgaagagcacgaaggcgaaacattcaatgaatgtccacttagctggggaatgagcgtcgaacagtacgtttccgagtttcgcaaatgcctggctgaagtgcgggcgcagggattggatgctgctatagaagctgcaaaaaatctggtggcccaagaatatgagtataaggatttcaaagcggcgcagagtgattgctgtatgcaccctggttcagatctggtagggaaggttgaaatgactgagtggttagttgactttgctgcccagcttcgcaaaggaggcaaccagtga

SEQ ID NO: 147336 - DNA, 489 bp, Enterobacter cloacae
gtgagcgaaattaattaccaggcactgcgtgaggcggcggaacgtgcaattccagcaatggaacgcctgttaatgttgccagctgatgatgatttgttaagtgaacaggaacttaaagattacggtgtggatattgatgcgctcaacgccttcaaatttctggccggaccagaaaccgtgctggcactactggatgaacgggaaaggaaccagcaatacatcaaatcccgcgaccaggagaacgaggaaattgcgctaacggtagggaagctgcgcgttgagcttgaggcagaaaaacagcgggcaaaggatctgtttatggaaaatgctcggcttaagtcaggtatagccggtctgatacacctcggtattcgatatgcagatgttgatgtcatgaaaattgctggagatgcccagctttctaccccatgcactgacagcatcataaacagcattgcaacaggcattcgcatcaacggaggtgagtag

SEQ ID NO: 147337 - DNA, 189 bp, Enterobacter cloacae
atgaaaaaccgtaaggcaaagattctgttagttcgtagaaacgctcctggcgtctggcagtgggtgagactcagcaaccgacggatggggttgatgaaatattacgggatgatggattgtggtttttgcaaaaagcccagcgcggcgcaaaaccgctggaaaaaccacttgcgcactaaaggagagtga

SEQ ID NO: 147338 - DNA, 657 bp, Enterobacter cloacae
atggttaagcaacaattagatgcagatatgatttcactagagtctatgattgccgctaaagattcagcacagtatgcccttagaaccatgcttgctactgaagaggcttctaattgggctttctggatgcttgtgatgacatcattaggtttagtattttcaatcgtaactctttattgcgctttcagagcgctaagcacttggcgagaacaagagcagttgaaagtgaaagttgaatttaaaaaatctttaataaaaatgcacgacattttggttgaaatgccagagagaaatttgacgttccaatccaatattggaaggaatattaaagcttcgacatttggctcaaatgtagaaccaaatgcaaaggaactaaaatcgttttatcaaaaaaaagcacttgaagaagagtttgctaaagcggagcataactgggcgattagcgaagagttgtttattggcagtaaaacttatgtagactggtctgaattcaaacagcttatcttcaattatacaaaacttaatgcatctaaaggcgggttatgtgagcttttagatactatgaaatcagaattggttatatttaggccaaggaaaagcttcttacgtgtatcgaataaatggctaaaaaaagataaagctagttgcggtttatag

SEQ ID NO: 147339 - DNA, 549 bp, Enterobacter cloacae
atggctaacgaaatggtaactacggcttcacagttcccttgggcttcagttgtcacagcggcggtagggattattggtgcatttggcggtgcattattgacaaactttttttccgaaaaacgctgggataaacaggtaaaacacgaacaaagtaaagagaagcttaaatttttacaaacgaaaggggaggagacattccaaacttttaaaaagtgggaaaatgaactatttttctacaatgcctctagaataggttatttgcagggcgcggttactaaagaatatatgatggaaaccattggtgtgaatgtgacgcctgaaacgcatataaaattaaacacactgatttcgttgtattttgatgagctttttggtgattatgatttgattcgaaaacaagttgcacttgtgaatgaattattccagaaaagctcacagtgtcttcccaatattgcaggcgcgaaccgtatgatacatgaggcacaggtttaccaaaggcaatttgaacatttcgagagaaggcttaaattagcaatcaagattagctaa

SEQ ID NO: 147340 - DNA, 318 bp, Enterobacter cloacae
atgatgatgaaacccataaaatgcaaaaaactagccgtttcccgcgtgtcctcgccccctcggtgttcagcgtcgaaaggagtaccttttgaaatgataatcgatctcaaatttctatccctaccaagggataatgacagctttaaccttgtgaggttgaaactcatcttcgcccgtgttcgttttgccggatgtcagaaaaattgtgtgatcatgtccaatgacggacaactccggcttaatcaaaaaaatggcatggcaagtcgtcatggcacagtaattaatcacactttgatcggctttttcaactctgcataa

SEQ ID NO: 147341 - DNA, 1101 bp, Enterobacter cloacae
atgagaacgtcattagtcacccgtgaagagatgatcgaggcaattgaacagcacactgcctgtatcaataccagggatataccgggcgttattgccaactacttcatgatcaccaaacaactttaccggagaaaggacaaacacgcggttcaccgcattctgctaaccgatatccgtgaatacctgctcgaacagggtcatctgaattacgcaaccgtcgcagccgaagcacgcaaggaggcacacagaatgaaagcaactaacgttaaatcagaaaaaatttttcaggaatcggaactggtggttgttcagaatcagccggatgaaattcccgttctggaatggcagggagtacgtgtcgtgacaaccgaaactcttgctagagggtatggggtcgatgaagccaatattcgcaacaatttgtctcgcaaccttgaccgctttgaagaaggtaagcattactttcttctaactggtttaaaattaagagaatttaagaacagagtaaccggaagttactctgttggtaagaacgccagaagccttacactctggacagagcgcggcgctgcacgcatgtctaagatcgtggacacaaatgaagcatgggcattctttgaaaaactggaagacagctacttccggcaaaaagaacagcaaccggttgcaatcccccagacgcttccagaagctctgcgcctggctgccgaactggctgaacaaaagcagcttctggaacagaaagcccaccagctaaatcagcagctggtggccgccgctcctaaagtcgattttgccgaccgggtatcagtagctaaagggatcctgattgggaattttgcaaaggttgttggacttaagcaaaacgcgctgtttgcctggttacgggagaacggcatcctgatagcgtccggtggacgtaaaaatgtgccgttccagcagtacatcaatgcggggtatttcacggtgaaagaagtggtgctggatgatgaagatggctaccagatacggttgacgcctcaattaacgggtaaaggccagcagtggttgacgcgtaaactgctcgatgctggcttgttaaaaccggtggcggctgaataa

SEQ ID NO: 147342 - DNA, 495 bp, Enterobacter cloacae
atgaacagggaccagccaggggtattttgctcttacttcagccggtgcagcatgctggtggtgccatctacaaaggggcaattgctttttgtgacaacccggcgcggtacgaccggagatatggtgcagagacacctcttcagatattactccatgcatgtagcaggcaatgcaggggagagtgccaagagcattggcgatggtccgttcctccgccgtcggtgttcgccccttcaagccacgagattttatttttaccgcacttttccgcgttttgctggctggtgggcgctctttctgtttagcgatacggcggtcgatagaatcccgcattttctgatattgcgattctcgccaggcggggtcagccaacttttcccgttgccgagcgatcgctcgttctctggctgccttctgccactcgcggcgctgttcaagtttttgttcgattgttttcatatggcaaaaaaaaggcggcctaatggccgccaatga

SEQ ID NO: 147343 - DNA, 1113 bp, Enterobacter cloacae
atgagaacgtcattagtcacccgtgaagagatgatcgaggcaattgaacagcataccgcctgtatcagtaccagggatataccaggcgttatagccaactacttcatgatcaccaaacaactttaccggagaaaggacaagaacgctgttcaccgcattctgctaaccgatatccgtgaatacctgctcgaacaggggcatctgaattacgcaaccgtcgcagccgaagcacgcaaggaggcacacagaatgaaagcaactaacgttaaatcagaaaaaattcatgcaccttcagttcaggaatcggagctggtggttgttcagaatcagccggatgaaattcccgttctggagtggcagggggtgcgtgtagtgacaaccgagactcttgctagagggtatgggaccgaaactaataacatcaaagttaactatacgcgtaatgctgatcgctttgaggaaggtaaacattactttctactaactggttcaaaattaaaagaattgaaggacaaggttactcaaagtaacttagtcgcaccgcgagcaaagcacctcactctctggacggagcgcggcgcagcccgccacgctaaaatgctcgaaaccgatcaggcatgggcattctttgaaaaactggaagacagctacttccgacaaaaagaacagcaaccgatcgcaatcccccagacgcttccagaagccctgcgtctggctgccgaactggctgaacaaaagcaacttctggaacagaaagcccaccagctaaatcagcagctggtggccgcagcccccaaagtcgattttgccgaccgggtatcagtggccaaggggatcctgattgggaattttgcaaaggttattggacttaagcaaaacgcgctgtttgcctggttacgggagaacggcatcctgatagcgtccggtggacgtaaaaatgtgccgttccagcagtacatcaatgcggggtatttcacggtgaaagaagtggtgctggatgatgaagatggctaccagatacggttgacgcctcaattaacgggtaaaggccagcagtggttgacgcgtaaactgctcgatgctggcttgttaaaaccggtggcggctgaataa

SEQ ID NO: 147344 - DNA, 678 bp, Enterobacter cloacae; identical to SEQ ID NO: 23034

SEQ ID NO: 147345 - DNA, 840 bp, Enterobacter cloacae
atggaagaagagactaagagcgacaactggttaggtgagatgctagctaaggcactcatcgttaaggggataccaaagcagaagcatatcgcccacataggtagagttcttgagttaacaacagccgccgcccataaaaaacttacaggttctacaaaatgggaagtatcgcagctggtaaaagtagtccattcaatcgggatggaaatgagcgagttttttgagctatatagcccatcgcacacagaaactcacgaagcattatggagcgaaggtaataaaacgctaaaatgcaaaatctacctttcacctgaaacctccgatgaaaagacagaatattcagcagtgaaaatcaatgacgaatggtgcgtaattcacaccgatgatattcgagatgaatacttagttgaatctaagagaaacatagaaagcattgttattcatcccagaaaaatcgaaatagggaaaagtagcatagctattctggatgatgataaaaacattgttgatagtatcaaagaaattattaacgatggccgttttatagttgatggattctactctattgatgaactatcacgagcaatagataaatctgcttatgatgcttatattttggattgggttgtaggagataaaaccgtattcgatactattaagaaaatcagacattctcagaaaagaaactcgatgatcttagtactgacaggacaattagaggggattattgatgaagaaatttcaatatctataaatgattacgatatcgtcggcccatttgaaaagccgattaaaggaagcttaataaaatccaatatcgataaattttttcctaagtag

SEQ ID NO: 147346 - DNA, 987 bp, Enterobacter cloacae
atgaacaaacaacttttagagtttactggtagccttttacttgacagtaagtatattgtctcaccgtatggtatcagtaaaaagctacccaaaggagaaataacccctctaaattatgaggtaatacataacaattcaataagtaatatcactatagattacactacagtaaagaatcttactatagtgaatgggatgggtgttaccctaggtgactcaattattggcatatctgcattacataatataaagaaaataaatccagaaataaaaatacgggtaatcagaccagaaaattgcccggcatatgttaatgagttatatcacatagctaaaagtgtaatagatgagatttattacatgccatatgatatatctcatttaaaagattctgatgtaatcattgatatgggaaaccaggtgtattgggaagatttcaatcgcttagaaatgcatgatttcttccttaaaagccttggcctcaactacaactacttttcaccagaggaaaagagaaaccgttggcttcaggattgcaatgttgaggaattagaccttggcgaatatgttttgtattgccctaatgcaagtacaaaaataagaagcattccagcaaaatttcatcacaaaacaatctcccagcttacccaagcatacgggaaaaaagtatttggcttcattgatataaatcataaaaactatactaacattgcagcaagatctaaaaatacagctgctttcatttcaataattaaaaattctaagtacatgtatacctgtgattcttcagctttgcatattgccgcaggttttaatgtaccttccacttgtatttttaccacagtaaaaccagaactgcgcagcatttattataaagactgccattctatttatataggaaacaatttaaccgaaggaattcataacagtgaagatgaattcctcattaagctcattgaaaaagaatttgaggtttattatgcgtaa

SEQ ID NO: 147347 - DNA, 549 bp, Enterobacter cloacae
gtgaagatgaattcctcattaagctcattgaaaaagaatttgaggtttattatgcgtaaatttaaatatttccttctggcttttgttttatcttttgcaaccctatcaaatgccaatgcaaaagtaggtgatatttacattaatggaaagatagctaccacaaatacaagaaatggttacatccttaccagtcaaaaatttaacgaacttcctaaaaccacaataaaaacaacaacatcatggacagctaaagatcacccagttaactttgaaggtgtaaaaataaaagatatattacatctggtaagtgccaaaggaaacacactaagaatgcatgccctgaatgactactgggttgatattcctatttctgatgtagaagactttaatataatccttgcaaataaaatggatggaaaacccttagaagttaggaactttggaccatattttgtaatttacccattagacagtaatccaactaaactcaactcacctatttatttatctcgttttatctggcaagtagacaaaatcacggtgctataa

SEQ ID NO: 147348 - DNA, 1665 bp, Enterobacter cloacae
ttggcattagcctttgctatctcaacaattgtaaaatacaacacattactttctgataaatctttatatgcaattacaggaacacaagagaattacgcatgggcaactgcaaaattttcgattcagttagcagatttttacgctttagttagaagcaatgataaagaccttgagcaaatacgcttgaagttagacattttattctcacgagtttctgttattaaaaacgaaagtgaatcaactattcctctgtataaagaaaaggactataaagaaacaatcgacaatatatataaaaaactagaaattgttgatcactatataaaacaaccgtccccagatatgagtaaaatagtttctctggttaatgatatagagccagattctaagttattagttaacattgcagatcacgcagaagttcgccagcgtacaaatgcaaatgtcgatttcaaagaaacaaaaagacagatacttatacttttatatataacgggaatcttaacaataacactaggtatttttatttgtgtttttttatggaagttaaataagttattggactcagaaaaaaaagcatttaataataaaaatgcttttttgggtattgttggtcatgagttacgaacgtccctacaagcaatcatctccactattgatgctatttcgcaaaaatataacaaaaatcatgatgatccccaatttataagattagaaagtgctgttactaaaattgaaatgcaaatgaaagacctatctgaatttgcaaggatagataatggcaatatacaaataaacgcagcacagtttaatttaaaaaaaattattgatcttaccgttgacgattgcataagtgcattaaagaaagaaaacgtaaaaatcatcacagataaaatccaagacattaatataataggtgactcgtcgagaataatgcaaatcgttgagaatcttgttactaatgctattaaatacacccaaaaaggtaatgtggatgttatagctgggttggattctaaaacaaaccttgtaataaaagttgaagatacagggcaaggaattccaaaagacaagattaaatcaatatttagcccttttgagagacttaaaggaaatgaaaatggtgttcctggctttgggatgggattggcaattgttaatggtttggttaaggcaatgaaaggccaaattattgttaaaagtgaagttggcgagggaagttcatttacggtaaaaatccccgtatctttaggctccggctcgcatgaattagaaaatatagacaattcaatatatgagcctcattataatcatcttagtatcttattagttgatgataatgaaatgtcatgctcttcattagtctctatactagaaagtgctgattataatgttgaattcacaaactcacctgttcgtgcattcgagaaattgcaacgtaaaccttatgatcttgttcttagtgatctccaaatgccaataatgactggggatgagttatttcagaaaataaaatctatagaaagtccgaacaaagaaacgcctttcatttttattagcgcttatgctaatgaaagcccgataccatcaataacaatgctgactaagccagtaagaatcaaggatataaataaagcaatcaatagtgtaatggaatcaaaataa

SEQ ID NO: 147349 - DNA, 3012 bp, Enterobacter cloacae
atgttgattagagtcagtggctataataatggtggtaaagagtatttggaagaggggcgaaaaaacggcagggagttaagccgtgatgaattagatgaaagggttattcttgatggtgatttgggattaacacaaatggtatatcaacaaattcctgataagggacaagagcgttatgctacctttactttatcatttcgtgaggatgaaatcccaaatgaaacattgcttgaaatcacgaaggaatttaaacagtttttaatgtacgcatatgaagaagatgagtataatttctatgcggaggcacatctcccaaaaataaaagaaactattgataaaaaaactggtgaaaagattgaaagaaaacctcacgttcacatttttgttccgcgaaaaaatttactgacgggtaaagaaatgaatccccgaggaatgtttgactcgaatgtaaaatactttgaagctttccaggaatacattaatcagaagtataaccttgcttcacctcgcgaacatgttcgagtagaccctaccaatgttgctgatgttttgtctcgttataaaggcgatgacttcagaactaaaaaccaagattttaaaaagcagttagtcgcagatgttattgaaaaagatattactactcgcgagggattttatgctcatgtatccacttttggcgaaaccaagattaggaataaagggaaagctaatgagtacatagctgttaagctcccagaagataaaaagtttacgaatctcaaagagacaatatttcatgatgattttatcgttaatcgtgaaataaaaaaaccaccattggataaagctgttatcagtgcgcggtttgcagaatggcctcagcgtgcaaaagaaattaagtatgttagtaaagctacaccaaaattcaggcagctttataaagatgctaatgctgaacaaaagataacgatgttggcacaaagacaaaatgaattttatgaaaaaaatagggggcgatatgagttacaccctgccaaatggcaaagaagtaatcagcgaagtgctgatgaagctggacgaatcggatttaccaaatctcccgatggcttgcaaagtttgtccggcggcgatgtggcaactgacagggactatcgagaagccgagcgttcggtgctactgccgggcgatgcacacattcacatgggacaacaaaactcaggaagagattctcgattgcgacatgatctatcaggaagaagaggaagacgaaacactggcgaatacgacttcgacaagcatgcccgcgttcatggcatcccaagcctcaccagtttcgcccaacgacgcggataccgactacgaggaggtttcggaggattagacgctgagtcgatcaatttacctcctcatgcccttaatcccaaaaaaatagcaagtgttgaagacattcaaaaaagagctgtaaggctttttggtaaatcgaatgtaaaagactctacaaatagagtgagtcctattcgtagagttatgcctaaaaaagataaaaatgcttcttttgttgctgcttattttttaagaaaaatggaggagaattcaatacaaccagcgttacgccgtgaaatacgcgaaattgataaaaagttttataatacacgtcgatttattgcgactgatgaaaggttaacgagaactgagaaaaaacaaatcatctcagtattaacgtttgaacgcatgaaagcacatcatgcgctcaaacatcccaatgaatatttcgagttggagaatgatactatgggtagtgaagatattcgtaaattagtcaaaggaaaacgtattcccgataattctatcactaagggtgaagccgcagctgaaccgcaaaacgcaaaagctcgtttcgctcgcattatcaagaacgttaatgagcatgttgcagagcaacgcgctcgtgagcggcagagaacaatcacggctaatgatctgtataccaaacgagctaaacttagccagaatattcactatctcgataagaagactgaccggacgatgtttgtcgatacaggccgggctattgctttacgcaaaagtggtatgactgcctcagctgtagtggttgctcttgaattagcaaaagaaaaatttggtagcacgctaactattaatggtagtaagcagtttaaagagcaggtgatagaggctgtcgcaaaaaacaatctggatattcattttaccgataaagctatgaacaaacgtctggctgaaaggaaggaagaactagcaattgagcaaagcggcaatagtgttgaaatgccagagcctacgattaacgcggtacgtgagataaaggatatcagcccggaagcagtatcttccgtcaatgtaagcatattgcaggattcgcttcctggtacagctggtgttaagcatgatgctgaaacaaaccagtatgaagtgttagtcgcgtctaaagaggaaggggaggttttccgttttgctatgtcaccaagcgaagaagctgccacccggattgcaactttaatcaacgatcatgacccggagcatttagcttcagcaatgcgtaatgaactttcgcaggaattggaatcagggacggccacacagccagttcaaacctctcagcctgaaaaatcctcagaatccatctatgaaggtgaattagtggaacatggtgccgcgccatataaatttaaacccgacatggctaaacctgaaggagagcgtaatgatagttactacgttactctacgtcacgctgatggtagtgagcgtaccttgtggggcgttgggcttgaagatgccgtacagcaattcaatgttggcgagaagatcaagcttgaagacaagggggtcgtgcctgttaaatggactgagactcttaaagatggttccactgtggaaaaatctggtcagcgccggacttgggaaggttcaccagttggacgagaacgcgaccaaaatgacagcgtgaaccatcaaaatcatgaagattatgatggcccaggagttgcctga

SEQ ID NO: 147350 - DNA, 351 bp, Enterobacter cloacae
atggcagaaaagaaaaacaaggataaggtcgtcgcctttaggttatcccaggaagacttcgtacaatttgaagaaaagctggcctcttcaaatatgaaaaagtctgagttttttcgtgaagtttttctaaacgccaacgttaatattacattaaaagcagctccatctaaagatctcgaacgccttactttcttgtttaataaggcgagtaataatctaaatcaattagcgcatcaagttaatgccgctcacctcgaagggaaagtatctgagcgactttataaatccattaataactctcttgttgatatccgacatttattaatgacgggggtgtctgatgttgattag

SEQ ID NO: 147351 - DNA, 489 bp, Enterobacter cloacae
atgatagagttcagccaatctaacaatgaggctttgatcatgtcagactggcgaaacaaccctagaacggggaaaagcacattcatgccgctgctgaatgatatcgatgcgcggttaaagctgggcgaaacactcaagcaaatatacgagtctttcaaagacagtaaggcgcttgaaatgagttaccctcaattcacacggtatgtaaaaaaatattgtaatggaggccagaatgtcccaactccgaaacctaaagaaaaattaaaagtcaatacacaggtaaacgcttcagaggatacaccagatgaaaacccccatcagattacagatgatctactgagtcagtatatggaggtttgttatcgtcaggaaaggatagccaaaagagctatcgaaaaaggtgtacctcttgagcaaattaaagaatggaacgcgcctaataaggttagattaggcaccctaattacaaattatgaagttaaaaactaa

SEQ ID NO: 147352 - DNA, 702 bp, Enterobacter cloacae
atgtacctgaaaattgcagttctcaacaatagcggtaatgttggtaaatctactatctgccagactgttcttaaacctcgacttccagagtctgagatcatcagagtagagaccatcaatagtgatggcacaaatgatgagagattatcagcgaaagattatgatgaaataattaaacgtatcgatgatgtagattgcacaatcattgacgtaggctcatctaacattgagcaatttatggttcagatgcaagaataccaaggaagtcatgatttgattgattacttcattgttcctgttaccgttcaagacaaacagcaaagggattctattgcaacaataaacaatctattagatatgggtgtagacgaggatagaattaaagtaatttacaacttcgctgataaagacacatctattgaaaaacaatactccatatttttatcagataagaccagcaaaaaaatagcggggaaaaatcctgccgttgtttataacagcaatatatttaatcttttaacaaaatctggattaaaatatgatgatgtatatagcgacgatcgcgatttccgtagcttaatccgagccgctgcgtcgaaggaagaaagacaggaactctctaatctgcgagcagtcaaaatgttgatgaatggattcaattcagatcttgatatcgcatttgataatttaaaactggcataa

SEQ ID NO: 147353 - DNA, 480 bp, Enterobacter cloacae
atggctaaatcattgtctgaagaattaaaagacctgaaaattcaggcattacttgaagactatgtgaaccttgaagaaaaaatcaaggaaattcctgatattttgagtgaacatcttcaggaagttagaaaagcaattaaagatatgcctggtgaactggaagttggcatcgaaaaactcgctactgcggtagaagaagctgaatcgagctataaatacatcgctgaaaaacatagggctgtattaaataatcaacttgacgaagccaagcttgaattaagacagcatattagcgcggcaatatctgataatatcaatgatgtaaatagcaaattaaaccagttatctaataaggtagaaaacataaaagggaacagtacatttatcagtcaaaagagcttaatcgcaatgatcctcatgtctgggattacatttctttccctaattgtctgcatagtgcagataatgactcgaatttaa

SEQ ID NO: 147354 - DNA, 321 bp, Enterobacter cloacae
atgagtaaacgaactacaaagctgaaggtcagtccggcgctgaggaatatcgatgaacacaaaacgttgcgtgagttggttagtgaaaccagtcaccgtccgacatcgggcagcgtgatcacccgcgtcaattttccgttactggaagaggatattgcaaagtttgaccagtacagtgaggagaatcatgcgatgcgtgtcagtgtgctcagggcaggattaagggcgctggaaatgctgggagaggaacaacggtctgatcttatccgggaagccgagtttaaccgacctaagaccggacgtaaaccggttaaaaaataa

SEQ ID NO: 147355 - DNA, 666 bp, Enterobacter cloacae
atgatcattctcgttggaagccataagggcggtgtaggaaaatccactatctacatccatatactgatgtgcctgattcttcgcagtggtaagcgcgttgctgcactggagtgtgatgatcagcatagtgtaaaagactggcttgaagaccgcagggcgcaaggaatacaaccggatgtggattactacgagtgttaccatgatatcccggcgatggctcggaagcttgataaaaaatatgacattgtactgctcgatgcaccggggcgtagatcgccggagttcagtaaatgccttgcggtggctgatctgtttatctctctggttaacccttcagctcagattgaaatcaacacgctcggcctgatggttgccgatgtgttccagtatcaggcatcggtcaacaaaggtctgaaagcggtactggttatgaacaagtgcgatactcatccgtcagatattgatgcttctagtttccgtaaagatatcgaggccgatcaggagaactggattcccgttgcccggcagcgtctttatcaacgtaaatcctattatcgttcctacaatgaagggttatctgtacatgagttcaatgaccgcaaagggaaccaggcgcggggggaaattgagatgttactgagagagcttgaattgctggccgcttaa

SEQ ID NO: 147356 - DNA, 765 bp, Enterobacter cloacae
ttgagcactcatcccgccgaactgagccagatttcacacagcgcgatcagccgcatcgccaccccccggattgattttgcgctggcgcttgccgttcgccagctggcgaaccgtcaggccgacaaaccaaagtacctgctggagccggaaatcaccgttctgctcgcccagggctttagcgatctgcgtaaacgaatgttctttgatgtgttgtggaataccggcgctcgactgagtgaagcgctggccgtcaccccggacaatattcacaccggggagcgctggccgtcgcgcccgttcgtgtcgctcatgaccctcaagcaacagggtaaacccggacggccaccgaaggacagttaccgcgatgtgccactgtttgatgaaggttttacgctgcggcttcgcgatcacctggacacgttctgtagattcaggactaagcgcgtctggcaggtcacggacgacacgatccgtaactggctgagtgacgcggtcacgcgctgtgaaagtgagggaatacggttttctgtccccgtcactccgcacacgttccggcacagctacgcgatgcacctgctttactgcggtatcgagccgctgacactgaagaaactgctcggccaccggagttttaaaagcacgcaggtgtaccttgatgtgctggcactggaggccgatgttgccgggcgctatgctgtccgtttcggcatggacagggaagaagccgcagccctgctttataatgcgaaaaatattggtgtgtaa

SEQ ID NO: 147357 - DNA, 459 bp, Enterobacter cloacae
atgagcgtcatgtttaaaatgaaaaacccaatatttaacgcacatgatctgtatgtcatggtgcgcctgagcatgattaaatattttccctatgaggccaccaatattaaaccgtgggaagtcctgactatttatctgcaaaaagcgcaggggctggattttgaaattgataacgagccggacgtcagggggctgacgttccgggggaaaagctacgatatgtataaagatttggagaaagaagaagaggggccgtttcactcggcggcctggtatgcctcgcaggtggcaaaatggaatcagcaggatttaggtgagctggacgttgatctgaatctgatgcgaagctggctgaaactgaatgattacgtaaaagaaaatctgccaacggataaatttttacagcaggaatttttgataattgccgatgtggcagcggagagaagaaatagccgttaa

SEQ ID NO: 147358 - DNA, 126 bp, Enterobacter cloacae
atgatggattttaacgataaagagttgggctgggtgcttgcgctggggagtgtttgtgtcgttctgtgtgtgctgttagggctggtcatgctcgcacaacagctatttcccggagtcttcgggtga

SEQ ID NO: 147359 - DNA, 198 bp, Enterobacter cloacae
atgaatgctaatgaaaaagtgactttaacactggagttagacacagaagtagcttgggcgctggcgcagttctgcaagcgtacagcgcattcggattgtgctgtacgctccacctcagaagatgaggcgtatctgatgatggatggtgtgaacgccatcatgcacggactggcagaatcggggattaatccccgctag

SEQ ID NO: 147360 - DNA, 255 bp, Enterobacter cloacae
atggtaggcgaaggaattaatactgttcgtgtgaatggtgaagtgaaacatatttctgaattagacccggcaacattaagcattgagtggtctaagttgaaaaacgaaaactccgaactttatcgatgtatcaaagaagctaattcaggttggcgcggtttcattcttcgattaattggtgtcaggctacctgatggaaaaactatttgcatccgtggcattaattccagaaacgattcaatttacccggaatga

SEQ ID NO: 147361 - DNA, 240 bp, Enterobacter cloacae
atgcttgcacaccttaatactcgcttggttatgcctttaacgcagaaagccaactctaattcgcaggtaaaagcgttaacgccagttattacaatcgagcagatcgattatgtagtgctggctaccatgataacgacaacggatgtaaaaaatctgaaagctgaagatgcaattatggatgcttcacatttacgcgatcaattggtttctgctattgatatgatgattttaggtatttaa

SEQ ID NO: 147362 - DNA, 246 bp, Enterobacter cloacae
atgagaacgaatgtagccgagaaaaaacgtagtacaaacgtgtacttaaatgctggtctacttgaagaggctaaagagctggacttgaacgtttccgcgatatctaaccaggcgctggaaactgctgtcagagaacgcaagcgtgaacgttggatcgaggaaaaccgcgcgggtatcgaggcgttaaacagctttgtggaagaggtgggtattttttctgatgatgaaaatttcggggtgatttag

SEQ ID NO: 147363 - DNA, 174 bp, Enterobacter cloacae
atggaattaacagcgcttgcctcgttgaaacgtaatgttaagttttggattgaacaatgtggttgtaatgaaaaacaaatcattgcaaatattaaaggttggtataatttcgcttattcaccaagcgaacaagagaaagcaaaggaggagattctaaaaattttcatgaaataa

SEQ ID NO: 147364 - DNA, 189 bp, Enterobacter cloacae
atgaactcttttgaataccttcgcctctctcgtttcgatgttgtatttcttgccaaaaattgcaataacgaaactattcagtgtcatttccatacgaatgctcttaatgagtgtgatgctgcttttatatttggtcagcataaccaaaacaatgattatgcaattcttcgggttgagcaactcaattaa

SEQ ID NO: 147365 - DNA, 504 bp, Enterobacter cloacae
atggatctgaaagctgattacagaggcgaactggcgcagcgtgcgcgggtgtttctgaactacacacaaaaggaaatggctgctttgttcgggctatcccttcgatcctggcaggataaagaacagaatactaatcgcgtgtcagtcagtgaaacatatatgcttttactgctactgaatgagcatcctgactatcaattgttgcctcgtatcgatgatgttaagacccctgctcagcatgcagcaaaaattgccgttgagctggcgcaatgtctgactgagcgtgtaccacttccaactaaagtagtagagctggaaaatgctctgaatgcggcaatcctggcgtttagggaggattttgtagccgatatggataaaggacaaggtgacttatctccgctggccgtgttgtctaaagaacttgaaaaggccagaaatcaaatcatttctctggagtcagataacagcaaactgcgggctgaactgtctaaaaaagcttgttaa

SEQ ID NO: 147366 - DNA, 297 bp, Enterobacter cloacae
atgaaagatctgttttttgttaggcgtcggggcgaaacgtcccggattacgcagtcgctggcggtgcaaagtgacggtattaagtaccgacttcaatatctggtgcttgatcggacgaacccgacgaaagcagaacgagcatctggggctaaagaggaacgtatcgaggtacttaatcaggagtttttccttaatgttggcgactttatccgggtaagcgactttccgttaccaaaactaacacgagaatttattcgttttctaaaggagtctcaggaacatggatctgaaagctga

SEQ ID NO: 147367 - DNA, 369 bp, Enterobacter cloacae
gtgcgtagttctggcggttactccgcttgtacggtgtcccccatgcgcgaaccttggggaattgctcaggatatccgccgtaaaattttgcctgatgctgaaaagcaaatcgcgtatttcgaagctgaccgcgccggggcgcaaaaagttaaggatgaacggcagattttaatcaacctggtcgggcagctggtcgaggtgcaaaactatggtggttactatgatgtgctgtgccatatcaaaacccccggagggattacaggggatgtgtgtgagatgtacggcgaagcatataggcttaagctgagcgatctcagcaaagaccagttaatcaaagtgattggatttttatcaacactggagcgttga

SEQ ID NO: 147368 - DNA, 525 bp, Enterobacter cloacae
atgaatattcaggaagcattaaatgtatttggtttatccggtgaattaaccaaaaaagaaattaagaaagcctacaaaaaagcctcgctgaaacatcacccggatcggaacaaagataatccgattgctgcggaaatcatgaaagcaattaatgcagcatttgattttttgatggctaatttcgaaaaggttaatcaataccagtcaactgatgataatgcacgttatgactatggcgaggagttggaacgagtattaacagaattaaataatcttccagatattatttttgaggttattggtaactgggtttggatctctggcgataccaaaacgcataaagaagcattaaaagcgttagggtgtaaatgggcgtcgcagaaaaagcagtggttttatcgcccggaagaacataaatccatccgcaaccgtaaagagcattcaatggatgaaatccgtgaaatgtatggcacttatggccagcgtaaagctgatgggcgcaaatctgtagagcgccgcgcctga

SEQ ID NO: 147369 - DNA, 216 bp, Enterobacter cloacae
atgtctgttaattctttcgtcccagctattgaaattaaatatcatcgccgccgctggcgtattatggttgggtgttcctgcctaggctcatttcgttctgaagaggctgcacaagagagcctggagaaaaacagagcattttatgaatactggtcagggtctgcctcggttcaggcagaaaacaccgctccagtggtcgtggaggttaaatattag

SEQ ID NO: 147370 - DNA, 330 bp, Enterobacter cloacae
atgtcttctctgcaatttactaacggttccgtttctgtgggggatattttcgcttcctcttggggatatgagcagacaaacgttagtttttaccaagtggttagcattcatgggaaagctacggtttgtgttcgcccagtggattctgaagtaacatatattaatatgcaggggtatgttatacctaagccaaatatttttgttggcgaagatattataaaacgaagaattaaagattatgcttcctgcccattaattgtaattgaagaatacgagcgggcttataaaactgatccaacagaaaaacatgagttttcatcttattgctga

SEQ ID NO: 147371 - DNA, 2328 bp, Enterobacter cloacae
atgagagtttttattgctgaaaagccctccctagcgaaagctatttttgaagggctgggcggaaatccaaatactgaaaagaaaaacggctattttgaacacggttctgatatcgttacctggtgttatggtcatatgctggagctgtacgacccgcaggattatgacgacaaatattccaactggcgttttagtgatttacccattaaatcggtttatccgccaaaatataaaatcaagcctgaatctgaagcacagacccgcatcatcctatctcttatcgataaagcagacagtatcgttcattctggcgaccccgatgatgaaggatgtttgctggtcgatgagattctaggttatgccgcaaacaagaaacccgtccagcggctgcttgttgccgacctcaaccttgcgccagtgcaaaaatcgctggcgaatttacagcctaacgataaatttcgcggtatgtcgttaagcgccctggcgcgttccctgtgcgatcagggttttggctataacatgacgcgaggatgtacattaaaaggccgtgagaagggctatgacggcgttctgaatgttggccgggtacaaagtgccgttcttggcctggtgaacatgcgcacgctggcgaaccagaaccacacagaaagtttttattacgatgtgttcgccagtttgtcgatgagcgggcatcagattaaggcgaaatatcagacaacagacgacgatcagacagacgagaaaaaacgcctgatttccgaagctcaggccgcgcatattgccgggcgggttacgggtaaggacgctattgttactatcgcgacgacaaagccggaaaataccaaacctccgctgccgcttaatctttccacgcttcagcagctatgcgcaaagcgattcggttattctgcgaaagatacactcgatgtgatgcaggggctgtatgaaactcacaagcttctgacctatccacgttctgacaatcgctatctttcagatgagcattattaccaggccggagatattgccaccgcgatagcggccacagtacccgaactggcgtctgcgatcgcagatatggataaaggccagaaacacaaagcctttaatgccagtaagattgaggcgcaccatgctattatccctacgacaaaaagcggagccggtattcagcttaatgaaaaagagcggaacgtttataacttggtgtccgtctactttatcgggctattttacccggatgcgatccgcaacaagacgaaaatacactttgatatcaagggggatacctttacggccacacagagcgttctggtacaaaagggctgggaagcgctgggtaaggatagtgatgatgaagacgaaaccgaagatgccggaacggacggttttgacctttcatcgctgaaatttaatgacagcggcctgtgtgaatcggcagatgtggacaagaaaaagactacaccacctcgctatttcacagagtcaacattactggccgccatgacgagcgcggcaaaattcattgatgatccggctctcagaaaagcgctggaagcgaaagacgagggcagcagtgatcgtggcagtatcggaacggaagccacccgcgcgggcatccttgataaactggccgctaataccgggcttatctctatcgaaaaagaaaaggggtattcggagctggtatggaaaaccacaaaacaaggccaggaattctgcgccgctctgcctcctgaaatcactaaaccagatatctccgctctgtgggctgaaaagcagtctcagatcaaagctggagagctaacggttgaggagtttattaaggcaaatgatgagtatgtccaggggctgattgacgagctggacaggaacgggatttctatttcctcaaatgccatgccctgcccggtctgtaacaacggtttcctgcgtaaacgtaaggggcaaaatggctttttctggggatgctcctgctaccctgaatgcaagacagcattcccggacaaagacggcaagccggatatggaagcaaaatctagatcagaaggttctataccccggctcgaatccccctgcccttcatgcagtaaggaaattcttatccggccaaaaggttttttctgttccgggtgcgagtttaaaatctggtctgaagtatcagggaaaaaactgacaccaaatcaggttgagacgttaatcaaaaaaggtaaaaccggagagattaaaggctttaccagtaataaaaccgggaaaaagtttgacgctgcaattgttttgcaggacaaatctacgggtaaacttgggtttaaattcaagaaaaaataa

SEQ ID NO: 147372 - DNA, 585 bp, Enterobacter cloacae
atgaagcatgatgctgttaaaacagtttacgatttaatgcgttattgccatatgcctatgtggtgtcagcgtgaagtaagagatatgaaagtcggtgacatctattttttgggtaagtacaaagaggtgatgtattctgaggatttaaatgaagatgtagatttcgtaggggaggcgtggattgaaaaggaaagaggtatttacaaattctatgccacctggacaataccaatgaaaccatcccgatcttttattatgacaaatggaggttttaaagtgttgaaagggggcgctgttaattttggaggcgacctttcagcttttcgttcgtttgctctggtttcacgctatctcaatcgattggtgatgaaaatgagcaatgaagagcgaaatgaattttataaagttggatctaagccgctccttcgcggtatttgtatcgataaagactccataagtcgaagacctcactatataaaagaaggcgaatctatccggcgcgtctggttaaattatagcaaccaattaccgacacaccctcttcaggctattgtcacctctgcgatagcgctaaaacaaatttaa

SEQ ID NO: 147373 - DNA, 525 bp, Enterobacter cloacae
atgaattttcgccacatggtgatgcttatcatcgtctgtatagtaggagggatatctcagcctgttctggctggcccatcccaaaatgaatgtgctatttggttatgtatgccagcaggttttccgggtagcgattgcaaatcgcctcataaggcaatgatcaaacgtattaaaaaaggtaagtcgccacttccatcattatcaagttgcatggtcgatggttctgcatcagtaccggggttgcctgattctggtagtcagaatattaaaacaaatgaaggtcgggcgtcatattattacaatcgatatcaatgcaatcgtgaaaatcacgatggtcgctgcattggttataaaaaactaccgaacaaaattgtgatggacaattggtgtaaaaaagagccacaaaaagatgcatataaatcagattgtaaaacaatccgatatatggaagctgttattgatggcaagtcgtatggaacaccactgttttatgatgacaacggtaatacatacgaattgaattaa

SEQ ID NO: 147374 - DNA, 1611 bp, Enterobacter cloacae
atgataattaaaccaaaactccctaaaggctgggaaatgagggatggaaaggcattacaaaagcgaatagaaaaatatccagctatattgatgggtaaagatccttacagtaataactttctcgcgacatatggacaaacttacctcatgctcgcagctccaccgggcagcggtaagggggttggtattgttgttcctaatttattgcagtatccacattcggttgtagtgaatgactgtaaatttgaaaatttccatttgactgctggatttcgtcgagcgtgtggtcaaaaggtaaagcgattctccccggaacttctggaaacgcaccattggaaccctttgcgggttatcaatcaagatccattgtacagactaggtgaggttcgtaccttagcatcatcactatatgtacccgacaacatgaaaaatgccagctggttttcaaaggctgctgacgtttttatagcgatatgtctgtaccttatagaaacaccagaattaccgttctcattacctcagtgctatgaaattgcgtctcagggaactcagttaggcagttgggcgcaacgtgttatcgatgaacgcggaaattcggataacccgctgagcgctgaaacaatacgcgagctgggagtcattgtctcagagtcgaaaggtagagagttttctacattaatgtcctttgtaacaggccgcttaagtctatatggtgagaagcttgtagctttagcattaactgaaagtgatgatgatgacgaaaatatagacttcagtaaattgcgggaggagccaacaagtatttatttttgtgtgactgaaggatcattaaaaaaattcggcccactgatgaacctgtttttctctcaggctattcgagaaaacagcaaagtattaccggagcagggagggtactgtgaggatggttcccttaaacttaaatatcaagtcctctatgtaatggatgaatttgctgtaatggggagaatttcagtaatggaaacagccccagctttaaccaggggagccggattacgttacttgattatttttcagaataaaaatcaggtttgctctgacgaatgttatgggagtgagggtggtcaggctgtaatgaaaccattccatgtcgaagttgtatatgcgccgggcgatattaaagtttctgaggaatatagtaaaagactaggaacgaaaacagttagagtaccatcagataatcatggtgtatcagatggacagagacgttcaaggggtaggacatttacattacaacccagaccactaatgttaccgcaggaagttgatgagttgccgtatggtgaagaattgatcttcatgcagccctctaaacagactccagcaatgaaaattagggctaaaaaaatcttctggtatgaagatgaaatattgaaatcacgtgttgatgataggaggtatccattacctgcaattccaaaaggagatgctgataaagctaaaacacttgttgtgccaatgggacaatctactaaatctgtttcaatggctagccctcatggtgacgctatgagagaagagagtaatcggcgccgagtagatgtgtcaggtgttatcaaaacatcagattaa

SEQ ID NO: 147375 - DNA, 219 bp, Enterobacter cloacae
atgcaaagcatctatatagaccccgacgcgaaaatgcgatgtatcaatgggtacgatctgcctgttgagaagattagctctgcctgggaggccaggagttacagacgtgaaagggcagccctgatagatagcaatgcactgacgttaattttgatgaaaagtaatgatgaagcccattattttttaatagtgggcttctatgagtacttttatacctaa

SEQ ID NO: 147376 - DNA, 690 bp, Enterobacter cloacae
atgttatctgctgctacgttcgtttcgttagctatgcagtgtgctgtttcagttcacccggatacagcactggacgtagcaaaaacggaatcaggttttaatccatatgcaattgcagaaatcatccctaaaaaggagagaggtaaagatggtaaaagcgttattacgcacatgccaaagtctaagtcgagagcagttgaaataattaatagtattgagcagaaaaaacgacgctattcagtcggcttaatgcaaattacgagcactaactttagtctatttaatgttacagctgaagatatgcttgatccatgttctaaccttaaagtgttcgaaaaaataatttcggattgctataagggcgggggggatttacgaagcgctcttagctgttattactcaggagattatcaacgggggaaacggaaggaatcagagtttaataatacgagctatatacagcgaatcggttatacaaccgcttccaatcagtatgtcgtacctagtactaaagaagacagaaatgccgcaaaggagaaccctcaaccccaatacacagcaccacctacttacgaatcatgggatgttttacgcgaattcccgcgcacatctaaccctaaaattcaacaaagtaaaccttcaccagataataaggaactcattgatgaaagctctaaaaatccagcttaa

SEQ ID NO: 147377 - DNA, 363 bp, Enterobacter cloacae
atgaaagctctaaaaatccagcttaatattctgaccaataaacttgcccaaccagctgtatattacgccttcatgttcgctatgttttcgatgttgtcaccagttccggctgaagcggcctggtatgatccaatcgtaacctttgcgaaagattttaaaacgatgattattatcgttggggggatcgcggctgtcgcttcgatggtgtatatcggcgtgtgctggattatctcgcgtatgtccggtgatatgaaagtcactgcaatggactacttcaaccatgccgcagtaattggagccgttggtggtggtgttgctcttgccacctgggcttattcagtatggggaggaagcgtgtcttga

SEQ ID NO: 147378 - DNA, 2511 bp, Enterobacter cloacae
atgcgcggcgagcaatcaaaaaacgtattctcaccggagagtaaaaaggtgccctggttagggcatcatgtacatcctaatgtatgtacattaggtaattctcatttacttgcattacttcgttttaagggagtgccgcacgaaactcgtgataaagaaaccctaaatcgtgagtttaaaagactggatcgctgtatcaaggcattagggaagcaagaaggcaaaaatttgatgcttcaaacgtacacatttaaaacaggtgtacgtctcgatgcgcattataaaatggagatacctatcttacaggattttgttgatgaatatactgcaccgttcaggtgcggggcatatcaacaagtaggatatggtatggggcttattctcaagcatagtgatcttgaggaaggtattgccagtatggtggagttactatccatatgccaggaaatgctcagtgattacagcgttgcggtcatggggatggaagagcgcaaaggtaatttgtatagccagatagggcgattctactcctttatttttaacggtgttgaccaagatgtcccggttacagatacccgacttggtgactcggttatcaatggggaaacaggctttggtgcttacgattatgtagaatgccgcccatataatagtgctcctaggtttgctactacatatgatctgcgtgattacccagatgaaagtgaaccgggaatgtgggatcaggttcttgaggaacaatacgactttacattagttcaaacgttccatttcgaagaccggaacaaaattaaaacaaaaattaatgcacaaaaggtggatttagcatcgactgaaggtgaatcttcacagacagaggaattggaagacgatgttcaagccgttactcaaggaaagagacttttcggtcactatcattcgagcttgatcgtttatggcgaaacaccggaaaaggcggttaataatggtgccagaatgcaggcattatttttagctcttaatacaggatttgttcgctcaacaagcactaatatagattcgtggctgacgctttttcctgcgtataccgatgtgatttaccgataccctaaatcgactgaaaaccttgcatgtgggttttctttgcatgcaacacctacgggtaaggcgacgggaaatcctccgggtgatggaacggctttgatgcctcttaagaccgttcagggcggccttttcttcctgaatgcccatgacagtccaccagggcagaataacacaggccaggcattccctgggcacatggtgaaccatgctcagacgggggctggtaaatcatcttcagcagccttaaaaatgatattttttagtcgatggaatccgatgattttcggtattgactataataactcaatggagaatattcaccgggcactgaacgttaaatattattctattgaaccgggggtttatactggtattcagttattccaactcccagattcaaatgaattgaggcagcttttatttgataccgtaaaacaatgtgctggcggtgctgactctaatgaagaaattatcattaagtcagctattgatgctgtgatgaaacataaagtccatgaggagcgtcgtttctctcttcttatccaatcaatacctgatactggcggtaatggactcagagcaagattatcaaaatggtgtactgtcaacggcaagaaagggcaatatgcatgggtgctcgactccccgcgcaaccttttttatcctgagaagtaccgtcgcttggctttcgattgcacacatattcttaagaaaagttatgttgctaatcatcctttagttgttgaggtaatgcttaatactttttatttccttaaaagtagtatgcatgcaaaagaacctggttgtctgatgattaatcagatctcggaatattgggttcagttagcttttgaaagtacagctgccaaaatcgaagagattttacttgctggtcgtatgcggggggagttgttgttattagatactcaaactcctgaatctgccctaaatacaccgtcagctcctgcaatgattcaacaaattgttacacaggagtggatggcaaatgataaggctaatcttgaaagctacggtaaatttggtgttacagcgagggagttcgaaaaaatatcagagttaaccccatatagtcgccagatgatgattaaacaaggttctggtgctgttatggtttcattagctttaaatggccgtctcgaatattacatcccactactatcagcaacgatgaaaaatctacccgttgccgaacgagtgcggagacaattaggtactgatgatcctgctatatgggttcctcacttccttgatgagatggtcgcttttcaagtacgagaagatcttaaaactgatgatgcgaaggtgtggtatccggcgttccttgcaaagatgaaggagtacgggagagacgtcgtctcatcactagttacccatccaaacgtaaccgaatcagagagcacaatatga

SEQ ID NO: 147379 - DNA, 669 bp, Enterobacter cloacae
atgaaattgaaaacgttaatggcggttagccttgctatggcgatcagtttgcccgtatatgcctccggtattcctacagttgatgtggcgaacatcactcaacttgtagtgaatgcacagcaacaagctaaggaggcgctggcgcagctggataaggcgaaggaagccatatctcaggcaaagagccaatatgaccattacaaaagcatcatgcagggcaatgataaattgggtgattttttgaatgacccattactcaatgaactgctcccggttagcgactggcaggacatctacagccaagctaaagatctacctaatttgcgcactcgctacggactaaccagtagcgacccgaaaattcaggccgcttttgataagcttctgtctcaggctgatacgcttgaaaagcagtatgacgcttcaaataagcgtatcaaaacggctgagggattgcgtagccgcctgaactcggtggagacacctaaagatagggagcagttagggcttcgttaccagcaggaaatgcttgagctacaaaatcaacaagcgcagcttcaaaatacgcgctatttgatggagcagcagaacaagattgatgatgcaaaacgcgcccaggcgtttgaagactatatgcttggtaaaagcaaacagcggcctagctactag

SEQ ID NO: 147380 - DNA, 330 bp, Enterobacter cloacae
atgttaaaaaaaatagctattttgctttgtattgcttttactgcttttactttgtctgcctgtaaaggcgaacagggaaaagctttcatcggtcattggtatcaggttgataaggcaaaatatccagctgatattaatattacatatgatgatggtgtatttcatattgatgaaaacagcgcatcaattggcgtaacttcaatggaatattctattaccaaaagagaagctaaagctgaaagtgatactgtcctcgctggtcagaatttttccatgcggttagaaaatgataaattgcaatataacggccacacttatgtgaaaaaataa

SEQ ID NO: 147381 - DNA, 933 bp, Enterobacter cloacae
atggacgtacaggttgcacaaactctgttcgatgccatcgataatgcagcaaaaacacaaatgaataatgtcacggctgttatggctgtgatgggggttgtttttggcgcattttggatgatatacatcttactacgttcgttggagtggtatttccaggggttaactcaagtcatacaagatgttttactgacgatatttaaagcatcgtgtattttgtttatggcttttagcgtttcttggtatgtcagtacgattgttccaacggtaacgcaattccctgtttggttggggaatacaatggcgggcgtgagtggtgataaaacaaatttggttgatgggctaataagctcgttctttgatgctgttgttaatacaatcgatgctatgaaatttgaaccaataagtaatttcaaagccactgtgttaggtatactcgccttagttttgttgcttgtcggtggtattccttttcttttagtcgcagtaggaacgttgattacgttaaaggcagcgtcaatgttattgctggtagttgggccgatatttatcgcattgtccttattccctgcaactcggcaatatttttggggatgggttggtgtgctgggtggattcactttagctcaggctctttttgctgtcgtaatcggattggaaatgtctttcattaatgcaaatgtggttaaaggtggcgaaatagaaaccgatttaatgagttgccttagtatcctgttatattttggtgcatttaccttacttgctacagagataccaaactatgccgcatctgttatggggggatctccaagcggaggggtaactggtgtcggcggacttcttagcaaaggtacagggttaggggcagcaagtcgaatggggggtagagctgcgcggtatttaatgaaaagaaggggaaaccgaatttcctag

SEQ ID NO: 147382 - DNA, 804 bp, Enterobacter cloacae
atgtttaagaaaaaaataaaagaagctgtagaacaggaaaaacatttgcactataacgatggccctcttcaagggaagcaaaaagaagtgggacaacaaattatggcctatacacaggcggccaaatggtttgaagatcgtgttgcagaggactatcgtaaaaaggcaaagagttcacgtaggctatctattttctttggcctattggcttttatgtctattctggcagtgatgatgttaaccccgttgaaaaccgttgttcctatgattcttcgggtagacaaaagcagtggttatgtagatgtagtaaaaccctctgatggtacggagaaaccagaagttgttgaggataagcattttattcatcaatatattctcgctcgtgagtcatataactggtcgtcacagcgcgcaaattatcgctttgtccaattgacatcaagcccggatgtgttcgagcaatacaaaaactttcagttatccagcaaaggttatgtagcaagattggggcagtcacaacaaattcaatccattgttgaatccattgttcttttgccgagtagcaatgaaagaaaattggaaagtgacacggggattaaaacctatcaggtacgattaactgaatcgcgccttttacctgatggtaaacctgtgccgcagacagtcccggttagctccattattttgatctctattgataataaaaatccagcaatcacagagggcgatcagtggcttaatcccctcggttatggtgtcaaaggttatagcaaaacaatggctattgtagggagtggctcatga

SEQ ID NO: 147383 - DNA, 825 bp, Enterobacter cloacae
atgaaatgcttagtaactgcgttatcgttctgtgttgccgtgtcattcctgccagcggcaaaggctgaggtgtcagggcgtggaaacagctatgattcccgcattcagaccgctttatatagccctgacaatgtatttcgtatatatgcaatgaaaaatcgctcaacagctatccagttggagcctggtgaaacaattaacctcgatgacgggattctgaatgttggtaagcctggagttcaggaatcgcctgaatggatggttggggcaaatcagaatggaagcatgatcattctgaagccaagcatgtatgctgaagagcctgaaaccaatatgattgttaaaaccaatcgtagaacatatatctttgagctgaagcttgcaaaaagcgtctcaaatatgacctatatgttccgattccgttacccacagccacccaaagttggagaaactccatttaaagggcgtagcattaatcaaaacccttgctccggtacgattaatcgagattaccagaagaaaggggatatggtgctttctccatatgaaatttgggacaatggaacatttacgtgtatgcgattccccacaaatgcaccacggcctgtagcatatgaggtgcttcctgatggaactgaaactatggtttcgtcccatcaggttaatgatattttagttcttcatgcagtcagtaaagagtttcgcctacgcttgaatgaattggttttaggattgcggactaaagctaataatacaggctggtataactataatggtactactactggtgaaatccgggaggttaaaaattatggaaaacaataa

SEQ ID NO: 147384 - DNA, 1290 bp, Enterobacter cloacae
atggaaaacaataatcaaacttcgccagagcaggaaaataatgagttcaaaggtcaaggagatttttctttaaaacctgccggaagaaaaaaagatttcgataagcgcatcattgctgttatcggtggcggcgttttcattgttattatagccagtgttctaattggctatatggcaatcaaaagtatgggtgattcagaaacaaaagtggatgaatccaaagtaacggaatcaccacttttacagtctgctggaatcaaggatgattctatggacgaattaatgagcaagtctacaaattctccttctgtatccttggataatgccccctctccagaggccgcttcccaaacacagacagaagttaagaaggatccggtgcaaaaaactgaatcgtccagtaccgaaacccagcaaccacagcgtttagcggaatcattattcactcctattacacgctttgagtcgtctggattgagtggcgggtctggaagtggttcgggttcgtctggggacacctatggaggaactacccagggaactggcgacgatgaacagcgcctacgcgattttgcaaacgccgatcctgctgaacaggtacagaaaatcctgagtggtggcggagggactatcctggaaagaggtaatgggggaagcggaggcagcggtttgttggataacttaaatggtagcagttatccggcgacgaaagcgagacttgctcctaatcctaaatatctgttgaaacgtcgaatgaactttcagtgtgcattatataccgcaattcggactgattatccggggctggtagggtgcaatttgctacgccccctttattcagctgatggaagtgtcattttagccgaagctggcgctcaactcattggagaacagcgcgttgaggttaaagcaggccagagcagcgttgcaactgtctggacagagttagacacgtctccgggggttcgagcatctttaaatggattaggtgttgatcctatgggacgaagtgggacagatgccgaaatggataaccattatggtaagcggtttggcggtgctgtaatgctgtcgctggtacaagatgttttttcatctatcagtaatgcgacgcaaaataataacggtatgactatgaacaattctacgcaaaacgcggaggatatggcgagtaaggcgcttgaaaatagcattaacattcctcctactgcttatgtcaaaccgggcactgtaattaacgtaattgttaatcaggatattgacttctcaagcgtatttacaacgcgctag

SEQ ID NO: 147385 - DNA, 1077 bp, Enterobacter cloacae
atgacagatgatacatataatattgattcaatggttgaagatttgggcgatgatgttttagcacgagggtatctagaacaatctggtgtgactgagcggcttgctcgaccaggagtaacagaggtggctatcaaccgtccatttgagatatggactgaatcatcaaaggaaggatgggtgcgcgaagaggcaccttggctagattttgatttgtgtagccatttagccaatgcactggctgtatataacaaccgcgagctgggagtcaaatcgccaattaaaacagttgaattacctactggcgaacgtgctcaattagttattcctcccgcatgtgagcgcgggactgtttcaatgaccttccgtaaaccatcgcttcagcgatttactttagaagactatgctaatagtgggcgctttgataaaacaaataaagagcaacacaatcagacagagctttttgaatggcaacttgagcttaagcgatatgtaaaacaaagagactatgtgagttttttcaaactggctgtagctaaaaaacttaatatcataatttttggcggcactggttcaggtaagacaacatttgctaagtcagttgtcgatatatatccccataactgccgtctgttaacaattgaggagctgaatgagatgaaattgccttatcatctcaatcatgttcatcttctttatggagattatgtaactccaaaggatttagtttcttgctgtatgcgtatgaaaggggatcacattttgcttgctgagctaactggcgatgaagcatgggattttatggagttactcaataccggacacccaggaacgataaccacagcgcatgctaacggtagcctcgaaggttatgcacgtatagctggcttaattaagcaatcggctgtgggagctggccttgactacgactacattgatagacgtgtcagaacttcatttgatgccgttttatacatggagcatacggaaattctggatgtaacttaccagccagaaacgaaacttgcgcttctaaatggtgtttcaatgaaagaagcgttatccatgtttgaggagtga

SEQ ID NO: 147386 - DNA, 354 bp, Enterobacter cloacae; identical to SEQ ID NO: 19861

SEQ ID NO: 147387 - DNA, 957 bp, Enterobacter cloacae
atgagtgaggctgatcgccagaactactttgccagcgaagaagcccgtcgtgccgtacacatcctgctggtctccaacgtttcacagagctatttcagccagcaactggcgtacgaacaactccgtattgcgcgggaaacgctgaaaaattatgaacagtcctatgctttcgttgagcaacagctcgtgaccgggagtacgaacgttctggcacttgaacaggcgagaggacaaatcgaaagtacccgcgccgaaatagccaaacgagaaggcgatctggctcaggcaaacaatgccctgcaactggtgctgggaacgtaccgcgcacttccgtcagaaaaagggatgaaaggcggggagatcgcaccagtaaaattgccaccaaatctatcttcacaaattttgctgcagcgaccggatattatggaagcggaatatcagctgaaagcggctgatgccaatattggcgcagcgcgagcggcctttttcccctccattaccctgaccagtggtctttccgcaagcagtacggagctgtcaagcctgtttacgtcaggaagtggaatgtggaattttatccctaaaattgaaattcctatttttaatgctggcaggaataaagccaatctgaagctggctgaaattcgccagcaacagtcggtggttaattacgaacaaaaaattcagtcagcctttaaggatgtttccgacacgcttgcgctgcgcgacagctttagccagcaacttgagtcacagcagcgttatcttgattcacttcagataactctccagcgtgccagaggattatatgcaagtggtgctgtcagttacatcgaagtgctggatgcagaacgttccctcttcgctacgcagcaaaccattctcgatcttacctattcccgacaggttaacgaaattaatctgtttaccgcgctgggtggcggttgggtagagtaa

SEQ ID NO: 147388 - DNA, 360 bp, Enterobacter cloacae; identical to SEQ ID NO: 142263

SEQ ID NO: 147389 - DNA, 252 bp, Enterobacter cloacae; identical to SEQ ID NO: 30842

SEQ ID NO: 147390 - DNA, 558 bp, Enterobacter cloacae; identical to SEQ ID NO: 25303

SEQ ID NO: 147391 - DNA, 900 bp, Enterobacter cloacae
gtgcaggcgcgttctgacggtttcgtcgaaaaagtgtatcccctgacgattggcgatcatgtgaagaaaggcactccgcttatcgatatcaccattcctgaatgggttgaggcacaaagtgagttcctgctgttatccggtacaggcggtacgtcaacccagataaaaggggttctggagcgacttcgtctggctggtatgccggaagaggatattcaaaggctgcgttcaacccgcacaatccagacccgttttaccattaaagcacctattgatggtgtcattactgcgtttgacctgcgcaccggaatgaatatttcgaaagataaagtagtggctcagattcaggggatggacccggtctggatcagcgctgcagtgccagaatctatcgcctatctgctgaaagatacgtcgcagtttgaaatttcggtaccggcttatccggataaaacattccatgtcgaaaaatggaacattcttcccagcgtggatcagacaacccgtacgcttcaggtccgtctccaggtttctaataaggatgagtttctcaagccgggcatgaatgcctatctgaaactgaataccaagagccaggagatgctgctgataccaagccaggccgttatcgataccggcaaagaacagcgcgtgattactgttgatgatgaaggcaagtttgtgccgaaacagatccacgttctgcatgaatcacagcaacagtccggcattggctccggcctgaatgaaggcgataccgtggtggtcagtggcctgttcctcattgactccgaagccaatattacgggcgcgctggaacgtatgcgccaccctgaaaaaacagaaaacagtatgccagcaatgtctgagcagcctgtaaatatgcattcagggcactga

SEQ ID NO: 147392 - DNA, 3147 bp, Enterobacter cloacae
atgattgaatggattatccggcgctctgtcgccaaccgtttcctggtcatgatgggcgcactgtttctcagcatctggggcacatggacgataattaacacgccggtcgatgcgctgcctgacctgtcagatgtgcaggtcattattaaaaccagctatcccggacaggccccgcagattgtagaaaaccaggtcacctatccgcttaccaccaccatgctgtccgtacctggcgcaaaaaccgtgcgtggcttttcacagttcggtgattcgtatgtgtatgtcatttttgaagacggcaccgatctgtactgggcccgttcgcgcgtgctggaatacctgaatcaggttcagggcaaactgcctgcgggtgtgagctctgaaatcggcccggacgccacgggagtgggctggatatttgaatatgcccttgtcgatcgcaacggaaaacacgacctttcagaactgcgctctctgcaggactggttcctgaaatttgagctgaaaaccatcccgaacgtggctgaggtcgcttcggttggcggcgtggtgaaacagtaccagattcaggtcaatccggtaaaactgtcccagtacggtatcagcctgcccgaagtgaaacaggcacttgaatcgtctaaccaggaggccggtggctcatccgttgaaatggccgaagcggagtatatggtccgtgccagcggttatcttcagagcattgatgattttaataacatcgtcctgaaaacaggtgagaacggcgtgccggtttatctgcgggatgttgcccgcgtgcagaccgggcccgaaatgaggcgtggtattgccgagctgaacggccagggagaagtcgctggcggcgtggtgatcctgcggtcgggtaaaaatgcgcgcgacgttatcacggcagtgagggataaactggagacgctgaaggccagcctgccggaaggcgttgaaatcgtgaccacctacgatcgcagccagttaatcgaccgggcgattgataacctcagttccaaacttctggaagagtttatcgtggtggccatcgtctgtgctctgttcctgtggcacgtacgttctgccctggtggcgattatctctctgccgcttggcctgtgtatcgcctttatcgtcatgcacttccagggactgaacgccaatatcatgtcgctgggagggatagcgattgccgtcggtgcgatggtggatgccgccattgtgatgattgaaaatgcgcacaaacggcttgaggagtgggatcatcagcatccgggtgagcagattgacaacgccacccgctggaaggtgattaccgacgcctccgtggaagtgggacccgcgttgttcattagcctgctgatcatcaccctgtcctttattcctatctttaccctggaagggcaggaaggtcgtctgtttggcccgctggcattcacgaaaacgtactccatggcgggagcggccgcactggccatcatcgtcattcctattctgatgggattctggatccgggggaaaattcctgccgagacaagtaaccccctgaaccgggtgctgatcaaagcgtatcatcctttgctgctgcgggtcctccactggccaaaaacaaccctgctggttgcggccttgtccattttcacggttatctggccactgagtcaggtgggcggtgaatttctgccgaagattaacgagggcgatctgctgtatatgccgtcgaccttgcctggcgtctctccggcagaagctgcagcgctcctgcagacaacagacaagttaatcaaaagcgttcctgaagtggcttctgtatttggcaagaccggtaaagcagagaccgcaacggattccgcgccgctcgaaatggtggaaaccacgatccagctcaaacctgaggatcagtggcgtcccggcatgacaattgacaagattattgatgaactcgacaggacagtccgtttaccgggtctggcaaacctctgggtgccgcctatccgtaaccgtattgatatgctctcaaccgggatcaaaagcccgataggtatcaaagtgtccgggactgttctgtccgatatcgacgcgacggcgcagagtatcgaggcggtagccaaaaccgtgcctggcgtggtgtctgtcctggctgagcgacttgagggcgggcgctacatcgatatcgatatcaaccgggagaaagcctcccgctacgggatgacggtaggtgatgtccagctgttcgtctcttcagcaatcggaggtgctatggtgggtgagacggttgaaggggtggcccggtaccctattaacattcgctacccgcaggattaccggaacagtccgcaggcgctgaaacagatgccgatcctgaccccgatgaagcagcagatcacgctgggcgatgtcgcggatattaacgtcgtttctggaccaaccatgctgaaaaccgaaaatgcccggccagccagctggatttatgttgatgcccgcggcagggacatggtgtcggtggttaacgacattaagacggccatcagcgagaaagtgaaactgagaccgggaaccagtgtggcattctccggacagtttgaactgcttgagcatgccaacaagaaactgaagctgatggtgccgatgacggtgatgatcattttcatcctgttgtatctggcattccgccgggttgacgaagccctgctgatcctgatgagcctgccgttcgccctggttggcggaatatggttcctgtactggcagggcttccatatgtcagtggcgaccggaaccgggtttatcgccctggccggggtggcagcagagtttggcgtggtcatgctgatgtatctgcgtcatgccattgaagcgcacccggaattgtcccgtaaagagacgttcacaccggaaggtcttgatgaagccctctatcatggtgccgtactgcgtgtccggccgaaagccatgaccgtggcggtgatcattgcgggtctgctgccaatactctggggaaccggcgcaggttcagaagtcatgagccgtattgcggcacccatgattggtgggatgatcacggctccgctgctgtccctgttcattattcctgccgcctacaaattaatctggctgcgcagacataaaaaaagcgtgtcctga

SEQ ID NO: 147393 - DNA, 441 bp, Enterobacter cloacae
atgaaaaaagtggttctaatggcgctggctctcggcctttcactacccgcgatggcgagtgaaaaagtgattgatatgtacaaatctgaaaactgtggctgttgttccctgtggggcaaagcgatggaaaaagacgggttcgaagtgcgaactcacgtcatgaatgatcaggcgctgtcagccctgaaagaaaagcatgctgttcctgcaggactacgaagttgtcataccgcggttgccggtaatttgatcattgaaggccatgtgcctgcgacaacgatacataaggcaatgcagtctggttcgggtatatacggtctcgccacccccggtatgccagcaggaagtcctggaatggagatgggagcccgaaaagaggcttacgatgttatcgcattctcaccggatggaagtaaaaaagtcttccagcgaatcgaatag

SEQ ID NO: 147394 - DNA, 474 bp, Enterobacter cloacae
atgagatcccatttcgagtaccagaaccggaaacgccagcaacaaccccagccagaagcgtcttgtcatgtcgcgaagttcatcactcgtccccgtggatgccgtagctacgagcggctccagtgccattccacagacaggacagcttccgggaccactgcggcgtatctccgggtgcatcggacatgtccacacaccttcagaattctctttttccgcctggttgtgaggctgttttatctgatcagggctgacttcgtgatgatcgtggtgatggtgatgggaatgttcactggcatcttcggtaaaataatgatcgggatgggctttaaatttgctctcacagctggcggagcagaaataaagctgatggtcctggtatcgaatgctgctgtgcgccttgtcaggcaggatgaccatcccgcacacgggatctctcaccttatgcaatacgtggccctcgtccggggataa

SEQ ID NO: 147395 - DNA, 681 bp, Enterobacter cloacae
gtgccgcagcaactgattcttccggataccgtgcgcgaggggattgtcatcaacgtcgccgagatgcggctttactattatcctgctggcagcaatacggttgaggttttacccattgacattggtcaggcgggtagagaaacgccgcgtaactgggtgacggcggtcgaacgtaagcaggaagcaccaagctggacgccgacgccaaatacccgacgtgaatacgccgctcgcggtgaaagcttgccggcttttgttcctgccgggccagaaaatccgatgggcctgtatgcaatttatattggcaggctttatgccattcacgggacaaatgccaatttcggtattggtttgcgggtaagtcaggggtgcatccgtttgcggaatgatgacatcaagcacctgtttgatacggtgcctgtagggacgcgtgtacaattaattgaccgaccggtgaaatacagcgaagagccggacggtagtcgctgggtggaagtacatgagccgctgtcacgaaaccgttcggaatacgagtctgacagaaaggtgcctttgtcagtcactcccgctttgcgcacctttatcagcgggaatgacgtggatgtgagccgcgggagccaggcactggaaaggcgctccggtatgccggtgaacatcagcctggtacagaagcattattaa

SEQ ID NO: 147396 - DNA, 789 bp, Enterobacter cloacae
ttgtggatctccctcaaccaggcagggcatcccgttaaatttgagcataatattgcgttcttcggcccaggcttcgaaaaactcgaagactttcatgacttctgctctgaggtcaaaccgaaccctgtcaggtatcagctgattattgtccgcctgtgccaggaacagcatgtcgctgaccattttggtcatccggttatactcttcaaggctggaatagaggacatcctcaagttccttctgcgtccgatcctgactcagtgcgatttcagtctgtgtcaccagattggtgatgggcgttctgatctcgtgcgcgatatcggcagagaaattggcctggcgggtaaaaacatcctcaatctttccaatcatatgattgaacgagataaccagctgctccagctcaatgggaacgcgtgtcggttccagccgcgcatcaagattctcggaggtgatgcttttaatggcattgctgacattacgaaggggcaggtgcccctgacggacagcaatgcgaatgatcagaacaatcagcaggcttatcacgacggcaatcgcaatcagattttttttcagcgcatcgaggtaatggagatggaaattaatggagaggccagtcagcatgacatagttctgctgtttgccctgaaatgtcgcctggccagaggaggcgataatccggtatgtttccatcttcattccggacccggtatccatcggtcccgcaggatcctccaccgtccagagaaagacatcccgtgcgcggctgtgctcgctaaaatctgctga

SEQ ID NO: 147397 - DNA, 123 bp, Enterobacter cloacae
atgaatgaaatcaatgaagtctctttgcatcttcgttttttgcttaatgtttgcgaccccattagaaccatcgcaatgaaattttatatcttgattgataatcgttttaataatttcttgtag

SEQ ID NO: 147398 - DNA, 714 bp, Enterobacter cloacae; identical to SEQ ID NO: 146996

SEQ ID NO: 147399 - DNA, 558 bp, Enterobacter cloacae; identical to SEQ ID NO: 86000

SEQ ID NO: 147400 - DNA, 1089 bp, Enterobacter cloacae
atgccttccacccaacaggaagtgttgcgtttaagtcgtgacgtagaagcgggccgtgcggtatatctgcaattacttaaccgccagcaggagttgagtatttcgaaatccagtgccattggtaacgtgcggattatcgacccggcagtcactcagccgcagccagtgaaaccgaaaaaagcgttgaatgtggtgcttggttttattcttggcctgtttatttcggtgggtgccgtgctggcgcgtgcgatgttgcgtcgtggtgtagaagccccggaacaactggaagagcacggcatcagcgtttatgccaccatcccgatgtccgagtggctggataaacgtacccgtctgcgtaagaaaaatttattttctaatcagcagcgccatcgtactaaaaatatccccttcctggcggtggataacccggcggattctgctgtggaagccgtacgtgcgctacgaaccagtctgcatttcgctatgatggagactgagaataacattctgatgatcaccggtgcgacgccagacagtggtaaaacatttgtcagttcaactctggcagcggtgatcgcccagtccgatcaaaaagtgttatttattgatgccgacttacgccatggttattcgcataacctgtttaccgtgagtaatgcacatggcttgtcggaatatctggcaggtaaagatgagctcaacaaagtgatccagcattttggcaaaggaggctttgatgtgattactcgcggtcagatgccacctaacccgtctgaactgctgatgcgcgatcggatgcgtcaattactggaatgggcgaacgaccattacgatctggtgattgtcgatacgccgccgatgctggcggtgagcgatgctgcggtcgtggggcgctctgtcggcaccagcctgctggttgcgcgttttggcctgaacaccgccaaagaggtgagcttgtcaatgcagcgtctggaacaggcaggcgtcaatattaaaggcgctatcctcaatggtgtgattaaacgcgccagcaccgcttacagttacggctataactattacggttatagttactccgagaaagagtaa

SEQ ID NO: 147401 - DNA, 552 bp, Enterobacter cloacae
atggaatacaaaatagtagatattgcacttgatagtaagctggtgaaagttgcagcagagattttgttttatactttttctgaaattaataatgaatcttggccaacaattaactctgccactgaggaagtgaaagaatgtatagaagataagaatatttgtattggagttttggtagaagacaagctggtaggttggattggattacgtccaatgtatgaaaatacttgggaattacatccaatggtggttttatcaaaatggcaaggcaaaggattagggaaaatattaatattcgaattagaaaaaagagcaaaagaacaaggaataaacggaattgttttaggaactgacgatgagacatttcgaacatctttatctatgaaagaattggataaaaatgatctatttgaagaaataaaaaacattaaaaatattaatcatcatccgtatgagttttatcagaaatgtggatataaaattattggagtaatcccagatgctaatggtaagaataaaccggatatttggatgtggaagaaaataatgtag

SEQ ID NO: 147402 - DNA, 861 bp, Enterobacter cloacae
  misc_feature (432)..(441): n is a, c, g, or t
ttgaacaactggtcaccagagcacacaaaagacatcaagagttggtttaagattgatacatatcgcaaatttgaagacctctcattgctccagttttaccatgagatatgggctcgtaacttgttctttaaggagtatcgggaagagtttgagagcagaactcttatgggttacttctcaaaaattttcagtggcaatccttttttaattgaagaagggcaactgggatacatgactcctgccaataaactttttcagcctccccatttttttctaacaactcttgatcgccttgctgaaacgagcatcattgctatgcaacgcggaggttttgtttgggatggtgatgacaattattcaataaacagagatcttcgggaagaatcactttcagatattatgccagatcagttttcacgaacagtcatgttnnnnnnnnnnatgttcgagattgatttggcaagtggcacagacgaagagattgcagagtcgcttaaagctgcattaccgcagtggcgtaaaatcaaaggtatcgaaccagatcctttagaatcagttcgctttgggtatggaactatcaagaaactcatcagttatcgtgtgatacctatgctggatatcctggtgtgggcagccgttaaaaaaatccgtgtctctgacgacaggttatccagactgctatatacagacgatgacgaagaaagcgaaatgaggcagtctagccaaatcaaagataccgacaggcctttggctcttaaatcctgcacaactgactttatccgacaattccattacttcatgaacaaaaatagccatttgaagcaaatgaaagtctctgatgtaatgaaactatctgattag

SEQ ID NO: 147403 - DNA, 1026 bp, Enterobacter cloacae; identical to SEQ ID NO: 147085

SEQ ID NO: 147404 - DNA, 1359 bp, Enterobacter cloacae
atgtctaataaggattttttattaaatcccactgttgcaacaacaattgcaaaagctgcgtgttatagaggagttttacctcaaggtagtccatgttctccagtgatatctaatctaatttgtagcattatggatatgcgcttggctaagctagctaaacaatatgggtgttcttatagtagatatgctgatgatataactttttcaactaataaacctagttttccaacagagttagccctcttacaaccagaaggggttatattgggtaagtatttagtaaatgaaattaaaagagctggttttgaaatcaatgatgctaagacaagacttgcttacaaaccttctcgtttggaggttacagggcttactgtaaataaaatagtaaatgtagaacgccgttattcagataagactagggctttagcccacaccctatacactactggggaatataaattaccagatgaaaatggggatgaaatagcaggaagcttagataagctggaaggcatgtttggttttatcgaccagttagacaagtttaataatatacagaagaagaaaagtaagcagccagaaaagtacgcacttgcaccggctaccttgcatagctttaaatcaaaacttaatgcccgggaaaaagcttacggaaaatttatttattataaattttttcatgggaatacatgcccaacgatcgtaacagaggggaaaactgataggatatatttaaaggctgcattgcgtgcgttgtcaaataactacccagagttatatagagaccgaaaagataagaaaggaaaagagatagatcttaatattttaaaagtaaccgataaattaaattatttccttaatatttcaggtggtactgcggatttaaaaaaatttgttgaacgttatagagaacattattcatcatattatggtagtgttgctaagcaaccagtaataatggttcttgataatgataccggtccgagcgaacttctcaactttcttagaaataaagttaaacaatgtccggatgatgtaggggttattagacgtatgaggtacttgcatatttttcataatttatatatggtcctaacgccgctgactgaaggtggtattgagacctcaatggaggatttttttcctgttgaagtgctctcaattgagttaaatgggaaaagattcaataaaaacaatgatggtgattcgaaaactgaatatgggaaacatgttttttccgtgaaaatagttaaggataagaaacgggtaatagactttaatagattttcatacatatttgatatagtaagggagattaaaattcattaccagcaaacattaattaaaaataagcactaa

SEQ ID NO: 147405 - DNA, 1920 bp, Enterobacter cloacae
atgtctattgaattaaaaactttcggcggtgcttatttcccgaaggataaagcattaaaaaaacattcggatttaaaaccgcttgccacagctgttaatgcggccacaaaagccattgctgaagccgttattttcggcaagctggcggctgaatatcctgaacatattgatgattattttaaggtgaaaatctgggaacaccgcgaaggtttaccctgccctgaacttgatattttctcacctgaatttttcgataccgtggctatatggaatgtgaatgcaggtgaaccagctgcggcaccacagccagaatctgaagaaaagacggaatgggacgacaacaaggcagtggaagaaattaaaactgtcgcgcagctcgacgtggcatcccgtgcagcttgcctggcactgttcggcccggtccctggaatcactacagcgcagtacggccagatcgtcgatctgaagaatgatgatgaacccagctttgcccgcgagcttgcagaagcactggcgaaagagacccgcgcgctggcgctggctccggaacggcaggagcagctgctcgcatggatacgtgaaaatacaaaagactctgcacagtggccggatatcaaaaagcagatcgctaaatggattgacactccggtagataagcgcccgcaggcagccagtaccaataatgtaggagcggatgttgttcgcactgactcaggtgctcgcctgtgcaccggcacgcctacagatcgcaatttcaaacacagcaaagatagtctgggtaacgaaatcgctttaggcctgctggcgcgtgaacatgaattcaacatctacacagtagacatgccgttatatcagcaggctgagaagatccgactgtcaggtactgatgaagaattcaacgcatggtaccgcatgttcatttccacaccaggcgggttggacttctcgcgagcaatcaatattgccgtggtaaaaacggctccagaggacctttggaaagacccggttaaacaccgcgagtatttcaaccgcgtcatgaccgaatcagatcactcgaaacctaatccgctgatcgtcgacattgcatgtggccgctcctcttctcctatgcctcaaacgattaaagagaatgtttctcatgatgaaaccaaaccgtctgtaccgggcgaagctctgccaccagcagtttgccctggcaaagctgcgcaactcaacaaagaactcaacgaggcattcgctcagagcccggcaccagaagagcaagcgattgaccaaccacgggtggagaacctgggcggcggagtcttctctgttgatgcactgattaataattccccctcaaatgaggtcgaaaaacaggaagtaccacctgcaccaaatgatcgcgactttgcgattttgcatgcgcttaatgaccttatttctggacgcaccaacatcatggggaaagaagaagcagaagatgtggtggcaggcaccggccagctcgtttctgatgttattccactgctaattgccgatatcaccaccacagaattttgcctgtctcctgagttctccgacgaggagatccacgacgtggcaaccaccatgctggatagctggtctgacgatatcagcgttcgccagaaaatagcgcttgatgcaatcgtggaataccgccgcccggcaccaccaaaatctgtcgtgctcgatccaccggccgttaatgcaaagccgaaaaccaagcccgaacctgcacctgaaacaaacgcgccgctttcgtctgttacctacctgcaacagctgaccattgcagcgctgcagggcttatgttctaacccggccttttgcaaccaatatgaagaattaccggctatggccaccgggcttgcccgcagcgtgatcaaccatcaggaaggatcctgtgcgtctgattaa

SEQ ID NO: 147406 - DNA, 504 bp, Enterobacter cloacae
atgtctggttgggaaaacggtatagatgcagtttctgcgattgcagctatcgcatctgcggcagcaacttatttagcttggcgatcctcagaagctagcagggccacatctgaaaaagctttgcagttgcaaggaaagcagtatttgtacgagacattaaaagcttgcgctgagagagctaattcatactcaaaaggtaagaaaggggctgaatggagctttcatgacgcagccaatattgttcgatgtttgaacttggcaatggggagcataataaattactcatataccaacaatcaggatgcaatgaaaggtctgaagcaattcttcattagccaattaaacatggagctttttgaagagctcaactatgaggttgggcctgatgccttctttcacggagaggaactaaccagcatgacgagcgatatttactcgcagtggttaaacattatttcattctttaacctcatgattgtcacagatgatgacctcgccgattaa

SEQ ID NO: 147407 - DNA, 219 bp, Enterobacter cloacae
atgaaattgaatgaatttgctaacggtctcaccaaagacggactgcttgttttatgtcttagcgatggtgaaatcaccgactacctggtgaccagcaatgccttgcgcacactgattcgccgggaaggtgacagactttcatcccaggttctgggtgatgaagaccgggttgtaaacctaaactccttgcgaaatgaccttaaggttttcaagccgtaa

SEQ ID NO: 147408 - DNA, 1179 bp, Enterobacter cloacae
atgagcagtaataatcagagaaccttcaaagacttagtaagcatatacaaagctgctacctttgtaggtaacacatctgaagcctctataatgctcgacaaggaagagctacgtgagattctgcatgatatcacgcagcatcctgatgactttggggtaacgattgagtctggcaatttagagctcggagagaccctaaccttacatgtagcccaaccgaaacttcgaattgggcaacttcacttttcatttgaagaatatcttaaaaattctaaaaacaggataaaagaaccaaataatttttttattgtcgaccttaacttttacaataaagaacgtgaggcattgccaattatatccagataccgcaatgtattacaattaattactttatttaaagaatgctctgcatatctcgacgagacgaatgctgaacttgttttcgtagataataatgttcttaaaatacccgtaaactattctgctgaagacctggtcgattctaatgacagtctcattcaaagcttgattgcaaattttgcagaagatactcacaaagagcaaaaactaaccatacttgctagcagcataaaatcattatgcgaatctaaaagcaaagaatcttccttctcgtctatgttgagggatttgaaactactaaatgaaagttttcaaaaaggatataaagtatttgtatctggattctcatacgaaaaaatactcgatcaacttcgtgtagctaaaatagaagagatgggaaaaatacataaagttttcagtgacatacagaatcagattcttggtatacctgtcgcaacaatcatagttgcgacacaaatgaaacaggctaatggatgggatgctcaagcattaataaatacagcgattgtaatgggcgcattatttttcaccctcatgattctttttgtgctttttaaccaatggcagactctcacagctattagtgaggaactcacccataaaaaagaacaagctgagaataattacacagcaatatacgctgatataaaaaacacatttaacagtttaacattaaggttgcgcgtccaaaaacttgtttttgttgttttagcgctcattgtagctatcggattatattttacatataaattctatgtattcctaaccccatcaccttttaaatatttattttgctga

SEQ ID NO: 147409 - DNA, 1035 bp, Enterobacter cloacae
atgactgcagtagcagaccaggtgattacaacacatagattcatcgttcatattatggacaaagagcaacaaggagtagctactcttcacccttgcccagctgaaaggcctgtacagcaagcatcacaagaccttgtgaatgcacttactaaaaggtattccgggcgagcaggtaaaggttatggaaaatttgaagacgatcgcgatagctatcctatgggaaatatcgttgatgattactttgtgaacacgactcattccttctatgacacaagtattcgcatgctcaaccatcttcaagcacgagctgatgatgaagtaatgtctaccggtggctatgtaataattgctcataatgaggttaacagtaaccattatttaatggttgctatccttacatccgcttctggttcaacagtacaagatttcgacatacaagaaagtgagtatttagacatagcaaaacttcgcgttgccggtcgaattgaccttactggtaaagtagaaggtaaagagcgttatattagtttcctgaagggacagaactctgtcgccggctacttcaaaaaatttcttggttgtaatgacattttaattgctaagcaggaaacgactaaattacgtaacgctctcttggaatttgccactgaaagaggttttgagcctgaggctcgagaagaatttcttaatcgtgctcatgaacaattgaaaagtctcaatcgttctggggaaactttcgacactcaaatatttgccaacgaactgtggcctgccgatcccgatcttctagttgcaaaactgacaaatgaagagcttgaattctcagacggttttgttcctgatggcacggtaatcagggggctaatcagtttcaaaggtaaatcacgacactggtctttaaaattcgaacgtgccgccttgcatgatggaagcgttcagtatgattcagataacgataaattgatacttaccgagattccagatacccttagggatgaaatcttatcagaattgggtgaagaggatgagcagtaa

SEQ ID NO: 147410 - DNA, 279 bp, Enterobacter cloacae
atgagcatcatcgaaatgattttgggcggtattgctgcgctggtggccgtcgcattcagcgggtttgttgctggcaatattcgtggcagcggaaaggcagaggcaaaagtcaggcagcagcgcaccgaagagaatgcagcagcaaccgtcgcagcagcagaacgccgggtagagacaacgaaaggggccagcaatgtacaacagactgttaaccacatgcctgatgacgatgttgatcgcgagctgcgtgacacgtggaagcgtcccggtggtggttga

SEQ ID NO: 147411 - DNA, 471 bp, Enterobacter cloacae
atgtattgccctaatttacttcaattactatatctatcggtcagcgccatcgtcttttttttaggtctttttctccttaacttaagtcgtaaagggactggcaagacagacatgatgctctacaaatatacattcagaccaaatctatctttacatatgcgatggggacaatccccaacaggccgcaatgcctataaagaacttgagcaacattcgagaaatgtcttacttgatttaagaaacgcaggatataaaacagtgagatttacatctcatctgataagaaaaggaagcgagagtaagcttcgtgaatttctttccaccgagaaaatgtctattattgaactaaactacatcccaacaccgttaccacattacgcgattattcaattggaaatgttaattacaagaaagagaaaaataaaagttaacaaagtgagcggaagaataataataaaactcaacgattag

SEQ ID NO: 147412 - DNA, 1761 bp, Enterobacter cloacae
atggctgataaatattacagtattctgaccaacagaggtaaagagctggaggcgcagtcttctgcgaccgggaaacccgtcattattaaagattttgtggtgggtgacggtaatggtcagcccgttacgcctgatccggcaaaaacaacactgaaccacgaagtgtatcgggcggggatttcagcgttgcaggtctcaccggaccaggcgaatcagtttattgcgcagctggtactgcctcccgatattgggggctttgttgttcgtgaggtcgggctgttaaccgatgccggagaactgtatgccgtggcgaactgtgcagcaatcgagaagccggtaagtggcatcagtgtaatgctccagtttcgcctcgccgtgtcagaaacggcggatattgagcttaaggtggctaccggggacggcctgttccttcgacaggatgcaaacctgcgcgatgtgaaggatgccagtgaatcccggaaaaatattgggctgaaaggtgctgctgtactggatgttggtacaacggcgaatacagtcgccgccggggatgaccatcgtatcgttaatgccctgcagaaagaaaataatctttctgatgttgtcgataaaaggcaggcacgcttaaatctggaactgaagtccgcagctaccgccgacgttcagacatccagagatgacgtaaccgcggggcgtctggtcgcaaatggcggcgcactggcgcttaggacagttgctgcaaaagcaggcaccgccattgctgatgccagcgccctcccggctaactctgtgagcttctgttatgccgatgcagcatattcaccgggttatgaggcgacgattcttgatgtgggtgggctcggtggcgatggctatcgtgtgcagtatgccgcgtcctatagcgacggcggtaagcggctaaagttccgcaccttaaatgctgataatggctattggggaagctggactaacgttctgacgaattatggaggtgacgttgaccatcttagtaacgcgagctattaccatataaacccggctgcatggcccggtgttggcgcatttgcagcccaatacagcaacccggtagcgcctttcatcatcccctttggccgcgtaacaccgaagggacaatctcagtatttacctatcatcaaaggtctttctgcaaccgaaggatacggctttggtgccgccgttagctttggcatcctgcgctcagggaataatgattttggtaaagccgttattcatatcattggggataatggcaaaagtgccatgctttcgtttgatacagacggcttatttgccgtacccgcccagctttatagcggcggaacgattgcttctgagggtgatataactgcgaaagggggaaatattcacgccgctgggcagcttgactgtggtgggaatattgttgccggtcagggtctgtatgagtcaggcggtttagtcagggtttattcaagtaacaacccgccgcctcagcaggatttgagcccttatgcaactaccgcatgggttaacgggaacttttcaacacaagcctggacagtagctaattttttgcaagggggaatcaggctggcctctttaggaactgcaaacaacggtaataacgacaatgaattcgcatatgcgccgaatggtgcggtcgttactgctgtacagcaaaggacaaactacacagcggtgcaatatcgctatgtacagtacaatattggtggaaactggtatacagcatgggtggcgtaa

SEQ ID NO: 147413 - DNA, 576 bp, Enterobacter cloacae
atggatttagaaacaccccgtttaaagcttgaaccctatgatgactctcattacgaaggtttgagggtaatggatagtgatgccggtgtgatgcgttatatcaccggaggtatcgttaaaacgcccgaagaaacctgggaaggtatcagaagagtccaggctcgttgggataagtacaacttctcatggtgggctatcaaagagaagtcctttggcgtgatcgttggtgcagcatgcctccagcacctggcaaacgtggatggcgcaccattagagattggctggcgtctcgtcccggaacataacggcaagggctatgcaacagaggcagctcaagcgattgttgattacgcggcggaacaggtaggagcaacttatctggttgctgttgccgatcctgaaaatatcccctcgcagcgtgtgatgcaaaggttaggtatgacttacaaagcaatagagcagcattacgatgtgccatgtgtggtgtatgagcttaagatacgcaggcctgcttcccgtgcaaacgagggtagcgttaaagaagttatgccctggactacaaacaaccggaactag

SEQ ID NO: 147414 - DNA, 801 bp, Enterobacter cloacae
atgtccataaccatcagcgtcctgctggaaaaccgacttaagcccggctcaaaaaatttgctgcgtgctaaagccggacttagtctgttgatacaggatgaaaatgattcaattctgtttgataccggccctgatgatagcttcatgcataacgcaggtttaatgggagtcgatttgacaaacctgaccgcgactgtactttcccatggtcactatgaccattgtggcggtgttccgtggatacctgatacatgtcggatagtatgccatccattggtggcggatgagcgctactcggcagtaaggtttccaagctataccgccagaataaaaaaattgtcgataaataatgatttttcacgttttcgcatggagtacagcagtaccccactacatatcggagaacgttttatgtggtcaggagagatccctgtggccagaccgcgtgcttacggtgttatcggtcataagaatacgaaagcggattatgtaaaagatgagggggttttaatttataaatccgactttgggctgatcatttttatcggttgtggtcatcctgggttgattgatatcgtacgtcactgccagaatataactgggataaatcatattcatgccattttcggtggttttcatctgcgctgtgagtccccccttaggctctggaagttaaggcaatatctacaccttcacaaaccagataaaataatgggttgtcattgtactggtaaatggggccacttgtggttgccgggagcaatctctccggcaacaggtgatgtttatattcttgggtag

SEQ ID NO: 147415 - DNA, 453 bp, Enterobacter cloacae
atgaagattattgaaagcggcattcgtaacgtaaggcaaggtgaaaatgtgaaagtaatcatgccggtaaacatctatgagtgtgaactgggcgatgatgtttttgtagggccatttgtagagatacaaaagggatgcgttataggtgacagaaccagagtacagtctcacacttttatctgtgagaacgttaccttgggtaaagactgttttataggccatggcgtaacctttgctaacgacctgttcaagaatggcggtcctgatgcttctgcagaaagctggatacatatcgtattaggtaacgcggtaaccgtggggagcggagcaactattttaacaacggacatttgcagcggtgcggtgattggtgcaggtagcgtggttacaaagcctgtgttaattaaaggggtgtatgctggcaatccagccagactgttaagagagctctaa

SEQ ID NO: 147416 - DNA, 621 bp, Enterobacter cloacae
atgtctgctaccgattcacttctcgctttctccttcgctgcattattgctcaccctcacgcctggactcgacacggcgctcattcttcgaacagcctgtgctgaaggtgggaaaaaagcttttcaggctgcacttggcattgatgccggttgttttatatggggggctctggtcgcgttggggcttggggcgctaatggcagtttcagaactggcttacactgtgctgaaaatttgtggtgctgcttacctgagctggctgggcttgcagttgctgatacgcccccgctcatctttcagccaaaacgatggcagcgccgcgactcaagaaaactggtttatcaggggaatgctcgggaatgtgcttaatcccaaaatgggcatcttctatgtctcttttttgcctcaattcgtacctgctgaacactcccctttaatatggacatttgtgcttgttagcatccacgtaacaatcggaacgatgtggtcagtcacactcattttatccacgcattttgcttcagccgttttgaagaaaagtagcgttataaaagttatggacagagcaacgggaggcttatttttatgcttcgcggctaagcttgctttcagtacgagataa

SEQ ID NO: 147417 - DNA, 216 bp, Enterobacter cloacae
atgaagctatccatcttattggtggtgttgctcgttgttctgaagacgctcgttgcctctaaaggcccggggattaatttctccggaaatagctttcaggtcaacgtgattcccggcaaatggatggctctggcgacaaaaacactcaccttcccagtgccgcaacaattgccccctccattttctctggcgtcgtcatcggtgcaaaacgcttga

SEQ ID NO: 147418 - DNA, 453 bp, Enterobacter cloacae
atgggcgcgttaggtgaacagggcgggacatacaattatcacggtaacgagaacttaacccatcatgagctcttcatgctaatcttcgctgaatgtctggcagaccatacgggaatatcggtggagacagctgctacgatcctcgcaggacagcctattattcccaagcgtaaggtgctgggggctacaggctcgcgtacaagcatagcctccaaagtagctcgtcgtattttgaagggcgtgcgtttctcttcaggggtgagggtcgagaccattatcggtatgggtaaagtacgatacacaaacagcgtaggggcggtagtaggaagagccgttccgtatattggttatgctcaggcagtgattgtctttgccattgttgccagagaaacccggaacaagtacaacctcatagcacgaccggaacatcggatcgcctggacatatttctaa

SEQ ID NO: 147419 - DNA, 270 bp, Enterobacter cloacae
gtggtaatgccggtgcttgtccgcagagccgtgaagacggtctactttatcgcgttattcctccctgtagggcgcgcgctggggcccgctgacgggtggtttagctatgtctgggctaaccgtattggcgagatgttgtatgggcccgacgagataggcctggacagtttatacgagatctatacctacatcggaatgatgaccattcttctcattacgacagttatatatctcctgacaatgacgttattcaacgagataaggaaatag

SEQ ID NO: 147420 - DNA, 240 bp, Enterobacter cloacae
atgggtggcttccctgttcttcagacccgattcgtcgcctatccggaaatgggcggtacatatggcttatacaacctttatacgtacgataacggccagcccgccgttcttacctcagagtggctcaatgccgatgaccaaccgatgagaccaatacgctcttacgaatgttcgaatccagtcgagaagatacagaccatgccgaacatccagtccaatggtgagatgaacggtcggtaa

SEQ ID NO: 147421 - DNA, 480 bp, Enterobacter cloacae
atgttacgaaacatgatgaataaaactgaagcggattattttcaaatggggggggagcgaggtagtttgcacacctcagtcagcagtttcaaaaatgacttccgtggcggttgcattgatggcgtcagatatatcaaatgcccgctttctatgtcgccaataatcgttggaaccactaagtactctgtaagcgacgctaaggattgtgtgactgcagatgcaatagcccttgttaagatgggaaaatgcccgcgttcaatccttgataccttaacgttagacaaaccttcagctgcccagtcaagaactctttgtatcttgtccaggttaatacgttcggtgttgccatcgcgttttgtcactaacaaaaagtggttcaatcacaaatccttttctaccctgacagaagccataactgccaatggcttttgtttgaatagaggaagctggtggtgcttcccctatgttgacagaggttag

SEQ ID NO: 147422 - DNA, 231 bp, Enterobacter cloacae
atgtttctgctcataccatgcgctcttgcaatcctcatgtttgccaacacaagagcgattccttctttgggtaacaaaggtataacagccatattaaccacctatttcatgtgggtatatggccgcatatcgtacacctttgcgatggtaaaaaagatatctgtttccagagaaatgacggaaaaatatccgactaaggtattaaccgcattaaaaatccaaaaaatttag

SEQ ID NO: 147423 - DNA, 675 bp, Enterobacter cloacae
atgttaaacttagtattatttttagtagcattattacttgtcatcgtgattgttaagctccttaagccagggaaaagagttgcgaagatttttgcaagcataattatagccatattggttttatgtggggtaggttatagcatcttgatatataatgagaaccaagacaaggcagcttatatcgagaagttgaaagtctattcttcgaaaatcgatgaatatgcaaaaacacacagttacactgttggtgatatacttgcagataaatctggtaaatttgacgaagaaacaaaaaactattttagaactcaagtaaaagcgattgagcctactaagaagctaactatgatagctgatgttgtagctttcgccaataactatcgtagtgcaaatggcattagcaccggccaaacatatagtgattattattcaagagggaaaaccacattgcatctaaatgagcctttgaaaggtcaggtagatgtggtgattgttttctataattactttatagactcctgggatgctgttaaacttgttgaaaatggtatgtacgaagggtggttatttaaaatttataatttagatggcaccgagacatatagtttgaaaaaaggatggtctccttcaactagccatgattatgagatgtttggagatgcaaagggtcgttga

SEQ ID NO: 147424 - DNA, 174 bp, Enterobacter cloacae
atgaattctgataacatcaagagtgaaatcgaaaaagagatttcgtctttcatctcaaaaaaaatggttgagttgagaaaaaaaacagggaaggaagtctctgatgttgagtttattcctatagaaactatgtctggcctccagggttatagtataaaaatcaagcttatataa

SEQ ID NO: 147425 - DNA, 249 bp, Enterobacter cloacae
atgttcactaaatccgcagataaaaaccaagagaaacttggtgatatggaaggcagttttggtggagcaattaatccatcagaacatcctgtaatagaaaccgcaaaaaaatacgcaacacaaaccaacgatgccatacgaagccactctgacgatataaaatcaaaaataaaatcaaaccctcgaacatgcattgcaatattaaccagcgcagcttttgcattaggttttttattggggcgtagataa

SEQ ID NO: 147426 - DNA, 132 bp, Enterobacter cloacae
atgaaagctaaacatatgaacatctctaatgagcggtcccaggacaggaataatgggaaagaaaatgaaaaagggaaagatcgaaacaatgatgagcaggataaaaaatcggccaaaagagatcggaaataa

SEQ ID NO: 147427 - DNA, 276 bp, Enterobacter cloacae
atgatgaaagataaaaaatctgttttcattgaaggagatatactttcgaacagctgtcatggacagatcggtcaacatttctatatccacagagtgaaatttagcaatggcaaatatgcaattgttcgggaagcatcagggatatgtttcaaaccaggcgaagttattcaacgaaatgattgcaattggttttataacttaatcccaattcgtcttctatcttttgagtatgttggggaggatgaatccagaaggcaattcctcgaatatcattaa

SEQ ID NO: 147428 - DNA, 909 bp, Enterobacter cloacae
atgtcacaactctttacatacaaattacttcatccccgccactggttttcctgggcaggcttggcacttctgtgggttatagtcctacttccttatccggttttatatactcttggttccggtcttggaaaaatctccaggccctttttaaaacgtagagaaagtatagcagttaggaatattgaactctgttttcccgatatgactccgattgcccgaagccagatgataaataataactttgtttctctcgggctgggactgatggaaactggcatggcctggttctggagcgatgcgagagtcaaaaagtggtttgacgtagaagggattgaaaacttggctaacgcaaccggaggggtaatggttgtcgggattcatttcatgtcccttgaactatgcggaagagtaatggggttatgccatccaatgatggcaacgtatcggccgcacaacaatccattgatggaatgggttcagacaaaaggacgtatgcgttcaaataaagctatgattgatcgacgtaatctatctcgattagttcatgcactcaaggcgggtgaagctgtgtggtttgcaccagatcaggattacgggcctaaggggagcgttttcgcaccctttttctcggtaaaaaaagcagccacaacgaacggaacgtacgcactttcaaaactcgctggagcaaatttgatcacacttagcatgattcgacggagcgataaaaaaggttatcatatgtatatcagtaatccattgttaggatatcctgaggacgataatatcgctgcagctgcttatatgaataaaatcatcgagcgtgaaatcctccgcgcccctgaacaatacctgtggatgcatcgaaggttcaaaacgcgcccagaaggagaagactctttatacaaatga

SEQ ID NO: 147429 - DNA, 519 bp, Enterobacter cloacae
atgaatatcaataaagatgacgaactccttgtgatagttaagtatgaaggaagatattattggttcgttgcgttcaaggaaatgtgggtcttagacagagttaaatgggtagaggattttgtgaaaagtggggtggaaataaacctacagaatatccataaggaaagatatgacttaccagtagtaaatgaagaaaacgcgcagatattcattaattatttaattaaagatggttattcatacgataaggatgccatagctgatgagttttacaataggctttcgcaaaatacaacctggtgggatatatatgatcttatgccggatttgtttatagactttgataataaaagattatatttggaatatgttgagagtatgcattgtcaagattatgttcctgatggttggcaaggtgaacttgttgatttttatagtaatggatcgttacctcaagatgaaatgttctggataaaaaatgaaactgatcatagagccattgtgatcgctaaaggataa

SEQ ID NO: 147430 - DNA, 3678 bp, Enterobacter cloacae
atgcgcaaaattttacttaccattgacaggttcgaacactacggtcaacacgagagtatattttttgatttgatagaatattttcatcgtcataactggcaggtcgatgttgttgccaaaacaacgggtcggtattggctcaacaatttaaatgtcataaatgaaaataaaaacattcggttattggaacaacccaatggtaagttgcatgcttcctacgacctgatgtggatatttaacggctatatcccggccgtactgaatacgacttttatgcgaggagattgtgtttccagggtcttctttcatcatttttacagctatgctgactatgatttaccctatggcgcagatgctgaaaatgcgctttctagcaccagttttgcctgctcaaccgccagctatgtccgcttagttgaaaagggcattaaacaaccgcggatcaagatttttccgcttaccattaataatcaattttcttctgccggaagggtcttcacagataaactcgaaaaagcactgctgatttctactggttataataagaatttagtggagcttattgagttattcaagaccaaaaatattgaactagattattataatctggactctgcgcctggccccgtaaccccagaattgctgtcacaatatcagctaattattggcgatgaagcgcgcgctgtatatgccatgagtatggggttgccggttgtgatatcagacggtatttcctcgcatggttatctaacagaagcaaatctgttggaacgaactgattatcattttgcactgacaggtgcttccaaaattgttaaccaaaaccgctgggtcaaagaaatccttgacggttacccgcaggcagcctgctgggcctgggaataccgggctgaagcaaacgcgcaattttctttagacacctgcgtaggcaagatactggatcgtttacctgcgccgaaaaaactacaaatttcgcaggaacagcacagtaaccttgaatttcatcgtaaggttatggacagttttggggaagaaacaacgcgatcggtgagtagttggataaatgaaagaaaaccaactccgctgcgttccgctattatagggactttgcttcactctttccctacctgtgccagtattactgtcataattattgatcgcgaaggcgatcgaaataagctgcgtgcgagtttgctttctgttaataaccaaacactaagtgccgacgcaatcatcgtagtaggaaaactgccatcatttgatattaacgattgcccgacaatacgcttcgtggataatctcaaccgggcggtggatgaaatcacgtcaactaatctgctcattatggactcgggcaatactctggaagagcatgcgctacttacctgtgccgagtttacgatgcgtgatccccggcgggaactttggtattttgacgagctcgttatacgtaatgatgatgaagatggcttaattctgaagccggaatgtgatatagatatgctgcgtgcacatccttacatcggttccagtgtctttgtttcaaaagatgcagtaagtcgccacaatgactttaatactgactatcagtatttgagtcatatcgatatttgttggaaattaattgaagaaaaaggtcctctcgtaatcggccatattcctgaggcgttgatctccgggaccatcagcattagtgagtggtgtaaaaatcccgccatcatggatgaaatgaaaatcatcactgccgcgcatctttcacgctgtggcatacatgcaaagatcgtagctggcgaagagcctggcgttcagttcgtgatgtatcaacttccagccatcgcaaaggtgtcggtgattattccaacacgggaccgtctggtgttactccagcggtgtatagactctctgatggagaaaacggcgtaccatctgtatgaaattattattgttgataatggttctactgatgaagatgcgagaaagtacttggaccagcttgagtccatgcagttggcgcaaattaaagttctgcgctgggatgcggcgtttaactttgcctctatcaacaactatgccagccgttatgcaacaggtgaatacctgttgtttatgaataatgatattgaaattaatgaaggcaactggatgggggcattgctcgaactcgctcaacgcccggaagtcggtatagtaggtagtaaacttgtctatcctgatggcacgctggagcatggtgggtatatcacgggcatcaatgacggcgtgactgtctgtgggagaggaagctctcaggaagaaagcggctttcttagccggttgaagatccctcggggcgctcatgcagtaagtgcggcctgcatgatgatgcgtaaagaagtatttgatgagcttggcggattcgatgaagagaatttcccgatctactacgctgacgttgatttggcattaaaagcaaaagcgcaaggttatatcaccttgtggacaccttttagcagcgttaagcaccttggcggagcttcgcgtttgttcccagaaaaattttcagtcgctactcatgcggatgaagcatgtcatgatgcgctacttgataaatggggagcagaactggcacgtgatccttattataattctaatatgaaccgtctcgggtcgacattcagcctaaatacacgtatgtcgcgcttaccgaatgcgctgccaggaaggccgttacctgtgatcatggggacccacattaactggacaggatgtggtaattatcgcgtcattaaacctcttcatgcacttcagcaagagctgaaagctgatggtggattgatcttgggactgccaacggtgatggaagtggcccaattccagcccgatcgactgattcttgaagtacctattgctgatgatattcctcagacagtaaaacgctatcgtcaggtctgtaatgccaaaattattatggaatttgatgattactatttagacgtcccggagaaaaatattttcagggagaatgtgccaaaagacattcagaatcgcctgagttcagcccttgctctggccgactgggttgttgtttcgactgagccgctggctgaagcttattctcgtttccattcggatatccgtgtggcaaaaaatcgtctggatatggaactgtggggaaccctcaagtctgctaaacgttgtggcaaaaaacctcgtgtaggctgggcaggaggctcgagccatacgggcgatcttgaaatattgttacctatcattcatgaattacaggatgaagtggaatgggtgtttatggggatgaaacctgcaggtgtcaattgtgaattccatttacctgtaccttttgaacattatccgcaaaagttgagtgaacttgatcttgatctggcattggtcccgcttgaacagaatcggttcaatgaatgtaaaagtaatcttcgtctcttagaactgggaagttgtggattccccattatctgcaccgatatcgaaccctatcgctgtggcctgcccgttcatcgggtaaaaaatacccccagtgcgtggatttctgctgttcgtgagcatatttacgacaggaatgcacttaataaggctggggaacaactgcgcaacgcagtacaccgagactggatgctaagagagagtggtctggatgattggcaacgtgcctggataggctaa

SEQ ID NO: 147431 - DNA, 375 bp, Enterobacter cloacae
atgaacaaccccaactctgctcttagcgcctggcaggcgctacatgatctcagcctttcaatgctcaagctggctaaagcaggccagtgggacgatctcatcacgcaagaaatcacttatgttcaacttattgaaaatatttcgcttaatccaatagcatcagcaccacggccccatatcgaacaggccagattcttgcttgaaaacgtgctcaaaaatgaaagtcaactcaaagagttactggcaattcgaatggatgagcttaggcatctcatcgatcaaaccggcaaacagcaatccatcacctctacctatggaaagctgtcagggaatattctttatccagaaagtgttacccgcgacacacaattatga

SEQ ID NO: 147432 - DNA, 1701 bp, Enterobacter cloacae
gtgcagcgcgatacctttgttgtaagacgatcttttctgcaatggctgcataagcgtagcaatccgggtttgattgttaacctctgttttatcactgttctggtgttttcaaccctcctgacctggcgtgaagtagtggtcctcgaagaggcgtatatctccagccagcgcaaccacctggaaaccgtggccagctcgctggacaggcagctgcagtacagcgtggataaaatgctgttatttcgccagagcatgcgcgatgcgctacagacgccgctggccttcaatgttttgcacgatgcagtatcgcactttaacgcattacgcatgcgtcccacctggcagctcctcgttgatagaaatcgcacacttccgattaacggcgtctcggatgcgtttgttgaaaaaacgtcgattctgaaccgggacgctgaacgcatcagcaatgaaatttcagccgcgcttgaggtgggttatctgctcaggctggcgacgtcaagcaggcatagtgaatcgcgggtgatctacgtttcacgcgccgggttttatctttcgacggatacgctaacagaggcgagcgatattatcccccgctattatcacctggtcacgcagtcctggtttacccagcagtcggaacgtaacaatcgctcccgcgcggtgcgctggtttatctccacgccgtcatcctggaccggtgacgagcgaacgatcactgccagcgtccccatctatttcaatcgctactggtatggcgtggtggcgatggatttttcgctgaatacgatgcaacgcctgctggcagaggcgacggacgaccgtacggagggggagtatcagctgtacgactcccggctcaatatgattgcctcctctgaaaagacagataaacaggtgaaccatttcgatgaacgcgaactcgcgcagatagcgcaggcgatcgagcacgatactggtggtggcatccgcctcggcagccgtttcatcagctggcagcggctcgatcattttgatggcctggttttgcgtgtccatactctgcaggaaggggtacagggcgacttcggcagcatcagtatcgtactggcattactgtgggcgctctttaccgcgatgctgctgatttcgtggctggtgatccgccggatggtcagcaatatgtatacgctgcagcactcgctcaagtggcaggcctggcacgacccgctaacccgcctgaataatcgcggcgcgctgttcgaacgcgcgaaactgctggcgaagaagtgtcatcaacagtcgttgccgttctcggtcattcagttagacctcgaccattttaaaagcgtcaacgatcggttcggtcaccaggccggtgataaggtgctttcccactcggcagggctgatttccagcgcattgcgtaaaaacgacgtggcaggacgcgtgggcggggaagagttttgtatcgtcctgccggggctcggtcttgaggaggcgagaggcgtcgcggagcgtattcgctgccgaatcaacagcaaggagattctggtgaagaagagtacgaccctgcgcatcagcgcgtcattcggcgtcagcagcgcccgggaaaacgaaaattacgatttcgaacagctgcagtccgtggcggatgcccggttatataaagctaaacaggacggacgtaaccgggttgtctggcacgatcatgacaaaaagtga

SEQ ID NO: 147433 - DNA, 447 bp, Enterobacter cloacae
atggtgaaaaccggagagctaacggggaagcttgaagcgtgctgccgagagcttgcagagcagcaaaaagcgcagcagctcagcgcgaaggtgaaaaaagcgctgcgctacccggcgatcgtcctgacgctggccgtgctcgtcgtgctggcaatggtcaccctggttttgcccgaatttgccgcgatctacaaaacctttaataccccgcttccggcgctgacgcgaattgttatggggatagccgcgtttatgcagtcatatgcccttgcgctgttcgcgatgctgcttgttcccgtaaccgcagcctggcctctgcgacaccatcctcgctggcagcgtattctgctgagttttcccgtaatgggcgcgctggcgaaagggcaaaaactggggcagatcttcaccgtgctgtcgctcacgcagcaggcgggcattgcattctga

SEQ ID NO: 147434 - DNA, 1899 bp, Enterobacter cloacae
atggttcaggatcgcaccgcgttagcccccttctttaatgagcatatcaataacaacagccgatacagccctaaatgggggccagcctatcaccagatggtcaaccgcgtagcgacagagcggcccgagtttcgtgatcaaagccttatcaaggcactttggtatgaacgctccaacggcgtcgccagcattaaacagggtggaatgtcgcagaacgaatacaatgcggcccagattcacctgcgggaaatcacaaccctgatggcacagggctgcaccccggccgtatatgaaaaggtggtcaacaagctacaggcgcttaaggccaaatccattctcaagaaacagtactgggcgttgtgtcaccgggcttttgccacgctgtaccctgagcgggtttcgaacgtggtaaataccaaaatgttttcccgcatttataactactgtaataaccgcttcgggcttgggctcgccgggaaagggacgtggtttgaaaaaaacctggagctgaaggcggctctgaaccgcgagctgggcggccatgtagaccctgtcgaactcaatatgtcgctgtggcatctctacacgcatttcatcaaagataagagtgatatcggcctggtaggtagcgagtcctgggccgaagacgacgatcaggatacggatgagagcgtggcggatgttccactgaacgtcattctctatggccctccggggacaggtaaaacctattccaccgttgagcatgccgtccgcgcctgtgaacccgctgagtattcccgcctgctggatggccttcagggcagtgattaccggaacgcacttaaagcgctttatgaccggctggtctccgaacagcgcatccgctttgtcactttccaccaaagctttggttatgaagagtttattgaagggctacgcgccgataccacccgtgacggtaacgttcgctatgacattaaatccggcgtctttaagcaaatctgtgaggatgcagcgtttggttacgcaggtgaacagctggcgctgaacgaggcgctatcaaagtttcaaaaagaactgctgaatggcgaagccgccacgctcaaaacgacatcaggtaaaccgttcggcgtcacctataaaagtgaaacgaacttcggcatcttccctttaaatagcaaaaaaggggatctggggaatgaatacaacgcctacgtgaaggacatcaaagcctggtatcagaacaacgggattgatatccacaacgagtcgtatgtccggggtatcctcaactatcttcatgataattataatcttcccgtcacaccgaaaaaaaatgcaccggcaaaacgccagaactacgtgctgattgttgacgagattaaccgtggcaatatctccaaaattttcggagagctcatcaccttaattgagaaatccaagcgcatgggtgaacccgaggctctgagcgtgacgctaccctattcgggcgaaaaattcagcgtgccaaacaacctgttcctggtcggcaccatgaataccgcggaccgttccctgaccgctctggacaccgccctgcgccgccgcttcgagtttaaggccatgctgccgaaagcctccattctggaaggccacgtcatcaaaggtatcgatctcaaacggctactgcagatgctcaatgaacgcattgaggcgctgtacgatagcgagcacacgctcgggcacgcttttttcataccggtaattgagacggaggacgatgacattgctttcgcccgtctgcagcgggtgatgaaaaataaagtactgccgctgctggaggagtacttttacaacgactggcagaaaattcgtctggtccttggagataaccagaagcagtatacctgcatttatcctgcgagttttctggcatag

SEQ ID NO: 147435 - DNA, 966 bp, Enterobacter cloacae
atgaatcttcatgagaatgccgatagctttatcgagatcattcaggccacggcagaccatctttctataccggcggtatacgttgagaaagattattgggtgacatatattttaaaaaatcttagccgctctgattataaagagcggcttatttttaaaggtgggacggcgctttctaaagcctataaattgattcgtcgtttttctgaagatatcgatcttgccgctcatttgcctgatttttctggaaatcagatcaaaaattatatcagagacgccgaagctcggcttaccgaggggctgacgtatctaccgggacatcccggtgagtcaaaacatggttcatttcggaaaacatggtttgagtatcccagacaagttgacggtgagtttgctcaggcatctccgtttcttttactggaaataaacgcatttaccacgccagaaccctattctttaatgccagtgtatacattgattgcagagtctctgaatatgatggggcggcccgatctggttcagaaatttgggttgatggcatttgaagtcaaggtcctgaatattgagcgaaccgttgctgaaaagataatggggctggttcgggcttcccgtgaagaaaatgccgaggaacagttgaaggctaaaatccggcatatctatgatttatgccttatccggcgagatgctaaatatgccgggttgtttactgatgatgcgctgctttctatgctgaaggtggtcgaggatgctgacaggcaacagttcagacacgccggaagctggcttgattctcctttaaacgaggctgtcattttttctgatgcggcatctgtctggcagaggatacgactggagtttcatacccgttttgctcctcttgtctatgatagtgatattcccggagacgacgaagtgattagtatgctggatgctatccatgctcaacttaggaattatgtaaggtag

SEQ ID NO: 147436 - DNA, 723 bp, Enterobacter cloacae
atgagcattcagaaacaagtcgtaagagatattgacaggattgaacctggtaaaatgtttacctaccaggcattgcctgcctggcggtcgtcgccggagagtactgcgaaggccatgagtctcctggtgagccgtggtcaggttcgccgtttttcaaaaggtgttttttatcgtcctaagcagggagttttgggtgaggttcgtccttcggacaatgaaaaaatccgcctttatctctttgagggtgaagaacgaatcggctatataacaggcctcagcctgtataaccgcatggggctgacaactcaggtgccgaaaacggtcactattgctactgaaaaagcgcggcagaaaaagagtttgggtaatatcaatattcgcctagtccccagtaaagcgcctgttaatgaacaaaacaaggaataccttgaagtcctggatgctctgacggatattaaaaatattcctgacagtcagccgtttgaagtgcttgatgtgttgagtcagaaaataaaaaacatggatgaaggtgcgttaaaatcactggtacaactggcaaaaggatattatcaacctgcgaccaaagcgttgctggggctcattctggataccaatggttatgctatcagccgccttctggcagaagatcttaacccaacaacacgctataacattgggttgaaaggatactggtctcaggctaaaaaatggaaaatcatatga

SEQ ID NO: 147437 - DNA, 2313 bp, Enterobacter cloacae
atgaaagtcaccccttacctgataacactgatgctgctgtttatctcgttatctgccacagcggattaccacacccagattaacgccggaaatactgtttctggcgatgtcgttgatggctcaaaggggaaccagcatgtctatggcacgctgactgactccaccatcactggcccctacgcttatagctacgttggcaatggcggacaaaccaatcacgtcaccgttaccgatcacggtgagctgtttctggaaccgggcggcagcgcttataacacacagataaccgacgacggtgatctacaggtgaacggttatgctgaaaacacctatgtggatagtggcgggcaggtttacgttaacgcgggaaataatggtgttgaaaatccagaacaaggcggccagattgtgaataccacggttgatgcaggcggcctggtcgttaatcgatatggcatcgacacaaatacagtcgttggagctggcggcgaactggataccggttggaattacgcttatgaaacccgcaacacagcgatttcccgaaatgccgttatacaaaacggcggcattcagcaggtcagcaacggcgggataagcgaaggtagccaagtcaacgatggcggcacattaatcgtcaccggcacatggcactatgatgtcgtcaccgacagccagccttcggcctggtatcgcggcaccgcagataacactgctgtttatggcgtgatgcggaataagggcgggttcgacgaaaacactacaatccaatccggtggacaatacacgctaagcggctatggtctctcccaccagctcaccgtagcacagggcggcagcgcccaaataaatgatggtgctctggatagcttctggctctatgggctgatgaacgtcagtagccaggcaacgctgacaggtatcggttcagtgggtagcagtggcaaactggtacttaacgaaggcgcgaaaacatccggcctgaccgtagcgctgggtggcgtactttctctacaaaacagcagtgatagtggtccgcataattatcagattgcaggtctggagctggatggcggtacggtgctgtttgacccaacctccttcgccacgctgagtatggagacactctctggcaacggcaatttctggatgaataccaatatcgccgcccagcagggtgacatgattaatgtctccggggaagccaatggcgattttgggatctggataaacgacactggcgaatcccccgccgttccgcagtcactacaggttgtacagaccggcggcggcgatgcgcagtttacgctgttgaacccaaaccagcaggtagatatcggcacctgggaatatggcctgacacccgatagtcaaggcaactggtcgttgacgccgcaggcaacccccacgccatcaactgaagccgtactggcgatggcaaacgtcacgcccaccatttttcaggccgaagcccgtgcgttgcaaacccgtctggacgttactcgttcccgtccgcatcagggagagctatgggtgcaggcgctaagtaatcgctttgacgttaaccgcacaggcaatgcagcttatcaccagcggctcggtgggctgatgatgggctatgacagaagtctccctcaccagactggcctgcttacactcggtattgcaggcggctatagccgtaccgatcttgatctcgccaacgacagcgacggcacagtagacagctacagcgccgcattgtacgccagctattatgatcaaagccgtttctggctggacgggatgctgaaaggcaatctgtttaaccagcaccttaatgcccgcatgagttccggcggcaatgccgatggcagttacaccatccccggtatgggtggtagcctggttgccgggtatgacgccagatttgctaacactaccctctccccctttgtcggtttcactggcttcatctcacaaagcgatgattactggctgtcgaacggaatgcaggcgcatccaggtacggctaaatccgcgctggggcaatttgggtttcggctgcgtcagaatatgacgactcgtcatggaatgcagttcgttccgtggctgaaggtcgcgctggagcaggagtttgtgcataacaacccggtcagggttaataatgataatttcaataacgatatcgccggaacacgaggaagctaccaggctggcatcagcgcaacactcacggaacacacgcatatttacgccagtatcaattacgaaaaaggtaatgggatggagtcgccgtggactggaaacattggctttaattatagtttctaa

SEQ ID NO: 147438 - DNA, 594 bp, Enterobacter cloacae
atgtcattgctagagtcatttgggaaagcattagttatattgcttgaagcatttttaggaaaacgcaaaggtcaggaggaagcacataataatttcttaaatgaatatacaaaagcaaactgcaaccatcgcttggtagaatattggttttgtcagttcacaggatggcgttacgcaaagtaccgggatattggttttatcatgacctcatccgacccatctaaaatattgtatatggctaaaggcattaattacattgcccgtacagtggagtttattgatagtggagaatgtaaactatccgatagatataaagagacgaaaaagcatacattcctctttttgttcatatcattcctgatcattttcttcatattaattgcctggatgatatcctctgtaatgtctctgataatgcatcatcatgatgtcacattaatggctataaatatttcatcgataatagcagctgcgatttttatcatgtgctttgcattctttattcatgcaataacaatggagttttttgcgtttgaaaaggctgagcattttgtaaaatcttacaatgcagaaagaacatcatcaggtcattaa

SEQ ID NO: 147439 - DNA, 927 bp, Enterobacter cloacae
atgacctttgaacagatcctggaagagtatttttttgcccgcttattgcgacctgacacccagagctgttatcgcacggcagtaaatcaattcactcactggcgcaacgtgttacccgccgaagtgacgtcgcatatggtgctggagtggcgtcactacctgctaaatgtgcgctgtatcaagccggtgagctggaaccactatatgcgccatatgcgagccttgtataacttcgccattgaacaggggctactggagcagttcatcaatccattccagaaaacatcgctgcgggaatctcgtaagaaaaagaaaaccctgacccgcgagcaaatcctcgcatcccgcaaagtgctgaaccaatttatcgaacgggagaaaatgcagcgcggctatcgttcgcctttatatccggcatggttttggctgaccgtggttgaaaccttcaactacaccgctatccggctgaatcagcttattcacctgcgggtcagggatatcgatttggtccatgacacgctgtttatccagagcgaaggcagcaaaagccatgatgaacacgttgttcctatcgcctcccggttacggccctacctggagcagatgcttgaagaagcgaaaacaaagggaatgcgggctgacgatcagttgttcaacatcaatcgtttcagtcggaggacgctgcgccagggtaaaccgatgacagaaaatcaggtgagttatttctttgccaaactcagcgatgcctgccacagccgtttttcatcacatcgctaccgtcataccgttgccacagaattgatgcagaaaccggagcaaaatttgtatgtcacgcagaaactactcggccaccgcgatattaaggtgacgctcagctatattgaacacaatgtcgagatgctcagaagttgcgtggagagagattga

SEQ ID NO: 147440 - DNA, 951 bp, Enterobacter cloacae
atggatgatttgacaaagctattcccggacgttgctgatgctctgggcattgaatcagttgcaattgtagagaaagatcattacatcgttgagttattgcgattgctccagcctctgtcctttgatacacatcagctggtttttgccggtggaacagcattgtctaaagcgggtatatctttgaacaggatgtcggaggacgtggacattaagcttgttcctgtcaccgacttttccctgcaatattccagaaatcaacgtaaaaatatccgtaaagatattattaagaccatcaccgaaacgattttagcttcaggtatgtttagcatggatgaggagtacccaaaggttactcgtgatgaaaaccgctataatgaaatttcggtgcgctacccgcaggaatatgtacaaattccctgtttaaggccatttatcaaactggaactgatggaaacggatttgcttgaggctgcggaaaatcgtgctattagctcactggtaatggatctaacaaagaagggcgaagtagtgagggcttttccctgcgcaactatcggtagcacgcaggctgaaaaactgatctcgatgatgcgcagaacggctgcaagcgtgcgtaatgtggagcgtgcagtggatgagtcactggtgcgtcatatctacgacaacttttgtattatcagagaaaaaggtgctgacgttcctgttttgaagcgctttgtgcaggaatgtattgagcaggatatccaacgttacggtgctcagtatcctgaattctgcgagtcgcctgttgaagaactaaaaatggggttggaagaactggcgagcaaccctgtttataaggaacgctatctgcagtttgttacaccaatggtgttcggtgaaagccacgtttcctgggaagaggcctatgcctgttttcgcataacggcattggatgtgattgatgcatag

SEQ ID NO: 147441 - DNA, 396 bp, Enterobacter cloacae
atgaccataaaagctcgaattcagtcacggctgaagcgctcaaagcgttatgttttcactcgtgacgatttcaaagatcttgctggctacgatcaaataggcagagcactgcgtgagctaatgaaggaagggcagctactgaaagtaggctatggcgtctacaccaaagcgcggcaaaatgcgattaccggtaagctgatgcctgctgctcccggaggttctgctgcggtaatgattgaggcgttggaacgtctgaaagtggattaccgtctggcaggcgcaacaagcgcctataatagcggtaaatccacccagatccctgcgttagtggaaatcaaaacctcaccacgttttaagagaacattgtcagtagggaacagcaaattaaatggatga

SEQ ID NO: 147442 - DNA, 834 bp, Enterobacter cloacae
atgcaaacagaacccgacgtgttgacggaacacaatgaactcattctttcgaccagtatcgagcgtgttgtcacgggccgcgataccgcactaaaacggatcgaacaactcattcagcagcttgatgccatttcacggctgacctcagaaattggcggtggtacagcgcaagactgggcgatgaagtccgggcaccgctacgatagctggctgactgaaaaggctgataaagcaatgcctgccgtcacccgcaatatagatcgcagtatctggcgcgatttgatgctgaagtctggcatgatggccttgatggatgctcaggctcgcgaccaatggcataagaatctggaggagggcgatcttcctgcgatcagtgaggcgaatatcctcagtacttttgagcagttacatttgaacaaaatggatgtctttgagcgcgggatcatcaacgtgttcaaaggtctgtcatgggattacaaaaccaatagtccctgctgcttcggtaagaagatcatcattaacaatctggtgacgcataaccgctggggctttagccttaactggggttggcgacgggatcaactggcggatctggagagaatgctgtttctactggatggcaaacccatccctgacaaccgtggtgatatctctacccgattgatggagcatattcgtgataatccggctaagaatgtttacgaagatgagttattcagcattcgttactatcaaaaaggtacggcgcacttgaccttcaagcatctggagttgattaaacgtatgaacgatatcatagctaaacactatccgggaatgctggctgcaaggtaa

SEQ ID NO: 147443 - DNA, 324 bp, Enterobacter cloacae
atgtcaatcacaccacctcatgaatggggtctacaaagcgatatcaccccacgatttggcgcgagattagttcaggaaggcaaccggctgtattacctggctgacagggctggattgacggggagttttagccccatgcacctgcagaaattagatctggctttcccgctgtttgtagaacaactggaagatatgctgcgtgctggcgaactaaatcctcatcagcaacgtcaggtgaaaattcaacttgcgagtttaacctgtatagctgatccccgtggtagctgcggttacgtttacatctctatttatcccacaccgtaa

SEQ ID NO: 147444 - DNA, 951 bp, Enterobacter cloacae
gtggaggggtatgaattcgatgaacgggaaatgcgaaaaaagagactgcgacaggcaagtcgcctaaagtggttgaggaaaaacccaagggcgatgcatttctttctctttcgtttactagcgaacaaaaccgtagcactcgccagtatgaacatccgaacaaagctcgatatgccacagtttcatgtccatgcccccgatgtggtcatgtcccctcaaaatacgggaaaaataaataataaaggcgagataaacttccaggatttagacataaatctgcaggacttggatctgaattttcccccaccaaaatgtgaacaagctaatggattagacttctctagggtaacgaatacggatgttatcccagatgtaatggaaaaaataatcgatgtcattttgaatatgcaccaatcgacgagggaagcagaccaggctatcacggaagtcatgagggcttgggctaatgccagcaatcagttccctagagcattttcatggctggataagaataatgaagagcaatgtttatgggtttgggagcaaatgaggaagaaatatatttctattgataccaaacctatttcctgtgagcaacgctaccattttattattgctatctttgataactggaaagggtggagtgacgagcaactaggttatctgaaagaaaataaaagaagaaaggatgggaaattcatttcttatggattgggtggtacaagtactttaagccacaaagaaatattgctcgaagaactgagtaaagcttgggaacaaaaatcccgtaggaaaaagataaaagatacgcatccctctttgaaattgaacaaattataccaaaaaaggctgggccagattgctgaaagtaaaagcatgacgctagatgagacactcaaatttcttatcgacaatgagttatcacgcttgagcatgttgaaacctgtatag

SEQ ID NO: 147445 - DNA, 207 bp, Enterobacter cloacae
atgaacacccatctttctcttttagaagaccagtttgtcaatatggcatatatcaccagtctgactggtttaacagacaagtggttctataagctaattaaagatgatgttttcccaaaaccaataaaaatgggtcgtagctcccgctggctaaaaagcgaagttgaagcctggctccaagaacgtattaaccaatcccgtaaataa

SEQ ID NO: 147446 - DNA, 597 bp, Enterobacter cloacae
atgaaagactataaaccgcgttacgaagaacttcaaaaatgctaccagacttggttgacagattttacgaagctgacagtcaggcagggaatgtgccatcagaatatatatcactaccatagcctgacggttggctgtcttaaattccctggagaagacgctgttattgctattgtgcctcactggttacaccggcttatttacggaaaggcagcggcggcatcattatcgatagatgatgacctgagtgtaagcttattaacgcaggagcacttattggcccaccaccccatgcttgaaggtgttctgctttccgaatgcgtccgtttaaaacatcgttcactggcaaataagctcaccagcctgtttcagcagtttagcggaactgagttgcgtctgaagcttgtatggctatgctggtacgatttgatgttggggaattgtcttgctgactggattgaaagtctcaagttcaaaacaagcgaggaggtaaataactgggtcaatgaccgacaggctgagaaccatatgcttaccagcatgatggatgagtacgtctgttttgcctaccgcactgtactcgatccgctgatttga

SEQ ID NO: 147447 - DNA, 579 bp, Enterobacter cloacae
atgaatattgaacgatcctggacaccagactggtttctggagtctgtcttgaactggcatacggatagtatgatcaaccggtatgcttacctgcgggctattcgaatagacctgttctacaaaaatggaacgactagatatgcacaacctggacaccaccaactggaactggatatccaattattaatgaaaaacatgatgagtctgcgagccgtagtaggttatttctgggtcatagagtggactgaggatcaccgctaccacgcccacgcagtcttctggttagatggtaataggacccagataacctatccatgggctgcgaaagcgggcgagctatggagcaacattacagacagggaaggctggcatcaccgttgcgagtacaaggaacactatcgagcaaatatcaatgtccctgttcactacaacgatcctggaagtattaccaacatacggcaggtactcgcctatatgacaaaaatccagcagaaggaggggttgctactccacggctgcaatgaagtacctgagcgtccactgacaggtcgtccacggcttcccctgcgactcaactga

SEQ ID NO: 147448 - DNA, 1134 bp, Enterobacter cloacae
  misc_feature (1010)..(1019): n is a, c, g, or t
atgagcaagctgagttatttggaaaagctactcaatggggttgatgtcgaatggatgtcgctgggaaatattggcagtttcatacgtggcaatggactacagaaaaaagatttcgttgaaagtggttttccagcaatacattatggtcagatttatacaaggtatgggttatcagctgataaaacatttacttacgtgtcgccagaactagccaataagctgagaaaggcgcaaagaaatgacttattgctagcaacaacatcagaaaacgatgaggatgtcgtaaagcctttagcttggcttggtggtgaagctgctatttccggagatatgatgttatttcgccatgagcaaaacgttaaatatctcgctcactttttccagtccgaaatgtttcaaaagcaaaaaatgaaatatatttctggggctaaagtccgtcgggtttccagtggtgatttagctaaaattaaaaccccaattccctgccccaacaacccggaaaaatcccttgccatccagtctgaaatcgtccggattctggatacatttactgcacttaccgctgagcttaccgctgagcttagcatgcgtaaaaagcagtacaactattatcgagaccagttgctgagttttgatgatggtgaggttgaatggaagccactgggagatataggtgaagtacgtatgtgtaaacgtatattaaaatcacaaactacttctgaaggtgatatcccattctataaaataggaacatttggaaaaaaacctgatgcctatatctccagaagtttatttaatgaatttaaagaaaggtatagttatcctaacgctggtgaggtattaatttcagcaagtggaactattggtcgggcagttatatttgatggtaaagaatcatattttcaggatagtaatattgtctggattgaaaatgacgagaaaattattttgaacaaatacttgtactatttttatcaaattgctaaatggggggtatctgaaggtgggannnnnnnnnngtatctgaagctgggaccatccaaagactatacaacgagaaccttagaaaacttgagatacctgtacctttttcaggaaaccctgaaaaatcgcttgccgaacaagccagaatag

SEQ ID NO: 147449 - DNA, 627 bp, Enterobacter cloacae
atgcttctgaaaaaaggtggcggtaaagtccttcaggtctttaatcaacgtgttatcggacttcgcccagttcatggagaaatcaaaactgtttttatcccgcttggtggtgttggcaaagtaacgggtatcggtaccgttggaaattacaaacagttgcaggtatttaaacagagaactgtcactgttaaagctttccttgctgtaacggtgtatctggttaaaagcttcacgaatcgctacaccgcgttttttcaactcaatttgtaccagcggcaggccattgaccagaatggtgacatcgtagcgattggcgtgcgtgcctgcttgttcaaactgcttgatgacctgcactttattgcgaaggatattttttctatccagcagatagatattctgaatgcggccatcgtcgaagacgaaatcatgaacataatcatcatgaatcttgcgggccttttcgacaacgccatcgctgggcttgtccatccaggtttccacaaagcgacgccattcagcctccaggaactctaccttgttaagggtttgcaactgttccctgacattagcgagcatagccttggtgttattcagggttggcaggtattcatagccctggttaactaa

SEQ ID NO: 147450 - DNA, 4413 bp, Enterobacter cloacae
gtggtgaacgccacggtagataccgtgagtagcccgtcagcgcccgtaagccttgagccagggccggtggaaaaagtggtgctggacgtcccggaaaacgcggtcgcaggcagtgaggataaaaccgtcagcgcgcagctgtatgaccggtttgataacgcggttatcagccgtaagcaggccatcacctggcggatagaagggagtcagttccgggaagcgcctaccggagacagcgatgagcacggtattgccagtgcaaccatcgtagtacctgaaaaagcgccaacgcaggtgaaagtctccgccggtgatgagcagaagatcgtcaatgtgactgtcgggaaagtgaatcatgttgagcttaaaggtaccccagatacgctgaatgccaatgggagcagcacttcgacgttgaccgccatcgcgctggatgagcacaacaatagcgtaccggacgcacccgtaacgtggtcgttaatcacgcagcagtttggcgcgctgagcaacgcgatcgaaaaaaccgatgcagaaggcaaagcgacggccacgtttacgaccgcatcagcggggggcaatgcgcaaatagaggtcgatattggcggcaaaaaacaagcgacgcagctgacgctcaacggttacccgattatccgcagcatcacgctgaaccaaaccgccgggctgaaggtgggcgacacggtaagcgtggaaaaggtggacgtggagcagaacggcggcggcgaggtgacgctgagctaccagtggcaccgtgacggtggcgcgatcgatgccgccacgtcagacagttatcacctgacggagcaggatacgggggcgactctctttgtggtggtgaccgcgaccaacgatgctaaaaatgaaggcgataaggcgtcgttgaaaacggagccggtggtcgggaaggcgtcagatgttacggtaaccgccagcgcggacagcgtggatgcgaacggtctcaacaccattacctataccgccacggcgaaggatcgcttcggccgtgcggttgtgggcgaggcgattgtctgggacatcgacaagccggagctggtgagccggggagaggcaagcgccgtcaccggtacagaaggcacgggaacgatgatcgtcaccgcgaaaaataccggcggaaacatcacggtgagcgccacggtcaacggcaagaagggcgagtccggcgtggcgctgcaggggattccgacgatcaaaagcatcacgctgaaccaaaccgccgggctgaaggtgggtgacacggtaagcgttgagaaggtggacgtggaacagaacggcggcggtgaggtgaagctgagctaccagtggcaccgtgacggtggcgcgatcgacggcgccacgtcggaaagttatcacctgacagagcaggacacaggggcaacgctgtttgtcgcggtaaccgctaccaacgcggccaaaaatgagggctataaggcgtcatcaaaaacggagtcggtcaccgggaaagcgtcagccgtgacggtcactgccagtgcggccagcgtggaagctaacgggctgaacaccattacctacaccgccacggtgaaggaccgctttggccgtgcggtagtgggcgaggcgattgtctgggatatcgacaaaccggagctggtggctcggggggagaccagcaccatcaccggaaccggaggcgtggggacaatgaccgtcaccacgaaaaataccggtggaaccatcacggtgagcgccacggtcaacggcaaaaaaggcgaatccggcgtggagatttacggcgcgccgttggtgacagacctgcatatctctggcacgccgaaggtggggcagaccctgagtgcggaatacaccttctcggcaaacgggagcggtgcggatgcgtccacctaccagtggcagtggaaggacggagagacatggaagaatgcggcagccgctggcaatacggcacgaacgttcacgctgccggacagctatgcgggctacagcgtgcgggtggtggtgacaccgaagggcagcagtcacccgtcgctgaccggaacgctccaggagagccaggcggtgacggcttacggcacgccagcggtggaggacgtgcgtacatccggcacgccggaggtgggacagaccctgagggcggaatacaccttcaaggcgaacggaaccggtgcggatgcttcaacctatatctgggcgaggtatgagaaaaccagctggatgccgatcgagggggccaacggccgggaatacaccctccaggcgggagacgcgggttacagcattaaagtaacgataataccggagggcagcagtcagccgtcgctggtcggggcggtgcagcacagcccggcattagatgtttacggtgcgccatcggtgacagatctgcacatttccggcacgccggaggtggggcagaccctgagggcggaatataccttcacggcgaacggaagcggtgccgatgcctcaacctatatctgggcgaggtatgagagaaccagctggatgccgatcgaaggagccaccggccgggaatataccctccaggccggagatgcgggttacagcattaaggcggtggtgacgccgacgggcagcagccagccagcactggccggagcggtacagagcagcccgtcggtagacgcttatggggcgccgtcggtaaccaatctgctcatctccggcacgccgagggtggggcagaccctgagggcggaatacaccttctcgtcaaacgggagcggtgcggatgcgtccaccttccagtggcagtggaaggacggtgagacctggaagaatgcggccgccgctggcaatacggcacgcacgttcacgttgccggacagctatgcgggctacagcgtgcgggtggtggtgacgccgaagggcagcagtcacccggctctggccggagtggcgcaggaaagttcagcggtcgaagtatatggcgcgccgtcggtgtcgggcctgaagatttccggcacgccgaaggtagggcagaccctgagggcggaatataccttcaaggcgaacggaaccggtgcggatgcttcaacctatatctgggcgagatatgagaaaaccagctggatgccgatcgagggggccaacggccgggaatacactcttcaggcgggagacgcgggttacagcattaaggcggtggtgacgccgacgggcagcagccagccagcactggccggagcggtgcagagcagcccgtcggtagacgcttatggggcgccgtcggtaaccaatctgcatatctccggcacgccgaaggtggggcagaccctgagtgcggaatacaccttcacggcaaacgggtccgggacggacgcctccagcttccagtggcaatggcaggatggtgcaacatggaagaatgctgcaggcggcacggcaagaacgtttacgcttccagacagctatgcgggctacagcgtgcgggtggtggtaacgccgaaaggcagcagccagccgtcgctgaccggggcggtacaggatagtccgacgatggcagcctatgacgcgccgtcggtaacgggcctgaggatctccggcacgccgaaggtggggcagaccctgagggcggaatacaccttcacggcaaacggggccggtacggacatctccagcttccagtggcagtggcaggatggtgcagcatggaagaatgccgcaggcggcacggcaagcacgtttacgctgccggacagctatgcgggttacaacgtgcgggtaatggtaacgccgaagggcagcagccagccgtcgctgaccggtgcggtacagaacagcccggcggtagcggtgtatggtatgccgtctgtgacggggctaaggatatccggcacgccggaggtggggcagaccctgagtgcggaatacaccttcacggcaaacggggccggtacggacgtctccagcttccagtggcagtggaaggatggccagacgtggaggaatgtcgcaggcggcacggcaaaaacgttcacgctgccggacagctatgcgggctatgacgtgcgggtggccgtaacgcctaaaggttcagggcagccgttatctggcactcaggcctttagtggagctgttaccataagatctaagcctgcgccttacgttacaaacctgggttacagcggcagtaccggagcctgtaacagaataacggcaacctacacctacaacgctaatggcggtgcatctgaaggcaacacgatatttcagtggaagtggggaagcaccgtcgtttccaacataaaaagcgttactttaggctattggggggaagtcacgctttatgtgacgccagttaataaggacggtatcagaggaaagacggaatcaaaaacgtttaaaaatacgggcttaagtagctgtgattggtaa

SEQ ID NO: 147451 - DNA, 915 bp, Enterobacter cloacae
atgacaaagaccgtcgtagcattagccatgcttagcgctttttcaacggcatcagtatttgccagtgattatgcgcgtatgattaacattgaaaaccctgaccatctgaaaatcagggttcagaatgctacttatgaagagggttacgatagcgactttattcctcatgtctggtttggtaacgaagataacggcgtgatgaatatcattatcgataatggtgcggtgctgaacgaatctattgaaaacggccttaactgcaactatgccatgattgtcagtaaagacaacggcgtcaacttacaggcaaacgggaaaaactgtcgttataagaaaaagagttaccgttccattaactctccggtgatcaccattattaatgattcatctttaacgcttcgcccctatttttccgttaacgggaatgacttttttgctgccgccagcgcgatcatccccaacgggatccgcatgttcaccggggacagtggcgactggaaaaaacagggcgttcgccacggggataacctgaaagtgaaatttagctacacgctggcagagtcgggttcgcaaaaagaggtcgtctgcccgtctcttgacaccttaacggaaaaccgactttatcgccttcagggcggtgagcaaaatgcgatctgcgtccttgagagtaatgagattcacattaaaaacgatcgtattgttgccggatggaacaaacctctgaccaaagcagagctgctgcaacggattgaagccaccgccgcagacgatgacgtcatcatagatatgccagatgacaaatacatggcgctctttacccagccggatgaatataaaatcccgctgaaagcaggggacgcaaaagcgacgattaccttagtggttatcaaagggaccattcccatcgcgcagtaa

SEQ ID NO: 147452 - DNA, 1554 bp, Enterobacter cloacae
atgcgaataaaaagactggcttattttttcatctcgctggctgctgtgtctcaaagcataagcccggtatttgctggtgagcaggcaattaaggcaaaaaatcacgtaacggctattccactggaggaagttgatcactatctgaatcaaaataaaacgcaggagacgattgttatagaagatgcggcgctacttgatgttcatatctcgtatgctaacctgcccgccgatgcactagtggaaatagcaggtaaaaataacaatgaagtttaccgttatgcggctgagaaaatcctgagcggctcggatgatcaccatgtcagtttcgatgcattatccatctttggtgatagcgtaacggtacggttgttagctgccgatggctctgcacttccctcttcccgacaggccgaaattgccttccaggtcaggggcgaggcaaagcttcaggatgtgtcattgtttaatatcattccgggtgacaaaaacccgcccccgcactcctgctttaaagacacaccttttatctataactatacaaaacccgtcgcggtgatccgcgatacctatgaccgggaaaaaccgcattacaataccggatggcgcatcggcgaaaaaggagttgatggcgatctgctggtattaagcagtttcccgttaaaagaagataaaaaggtaagaaccacagaggtctggtttgttcaggaggttgaggtcaatccaaatgattgcaccagttatcagataaagaaaacggccaaagtgaaagcctttggcaaatcatccagcagagacggtaaatatcgcttattgtcgttagattttgcgggtgataaagcgcaggaagatttcgtcaaatctctgggttatttaggaattgatccaagagatgaaacgaaggttaacgacattgccactcaaaaaacggaattttatctgccgcaggcgcagtttaaaaaagataatgcgcgtttgtacgacgcagtaaataagtcagatggcacccactgtgctattgaactatacgaccgcgaagcaggtcaattccggcatcgttgtagcacgtacaacaacgatatgggcaataagaacaaccctatgaagcctggcgtgggtgcgccgctgatcgataactacacgcagcgcgttctggctctcagtaccagcggtgagctggtgaatggttataatcaggcaatgccgattgcccggatctggccgcagattaaagcattctttcctgatggcgcgatccccgatacgtcttttgtcattaacggccaggtggctgatgcacaaaaatcattgaaaggctatacgagcgccagtgttgtgcagatccttccggacttacactattctggaatttcacaatatgcctgtaaatggtggctacccaccggggtcaaggcatcaaaacccaacccggatggcagtggaatgctgatctatgaaaagacaggtactgttacagacccgcttattgcctggtgtgatgtcgaaggtggagagcaaaaatatcggccacaatgggtgatgaccgccattccataa

SEQ ID NO: 147453 - DNA, 1212 bp, Enterobacter cloacae
atgtcccactgtacccgtactttctccgccattgcgatggcggcattgttctctttcgcaagctgcgccagcgcggcgaatcaggtgcctcttgaacgctggcgcagctactcaggcgtaagctgggatacaccagagagcgggcagccagcgcctttttccgggtcggttaacgcccctgtcgccggtattcactttgatgcaaagggccgcgcctttgtcagcacgccgcgactggtttcggccagcgcgcccgccacgttaagcattctggatacccgcacacagtcgggcccggcgcgcctgacggcatttccgtcccgccagggtaatgcgatagattctgctcccgaccgacatctgcgcaacgtgctcggcttttatgttgatcgtaagaacggctggttatgggcgctggatatggggttcgtcgcgggagaagcggaatcccccgtaggttcgcagaagctggtcgtgctggatctcgactcgggccgcacggttaaacggatccccatggacagcgtggctgaccgtaaggcgagcttcctcaatgatgtcgttgtcgatgaggatcgtcgtatcgcatacatttccgacagcggatcgcgaagtgcgcctgaaaaccgcgttggtctgatcgttgtggatttcaacaccggtacagcccgacgcgtactggatcgccaccctgccctgcaggttgaacccggcgtaaaagtcgtctcccacggtgcggaagtgtggccgggtaaaccgctgctgattggcatcaacggcattgcgctttctcccgatgcagagaccttgtactggacggtaacgacgggaacacatgcgtacgcgctcccgaccgccgttctgaagcagcacggctcaaccgatgcgcagattgccgggcaaatccagaatctgggtacggtaggaggcaacacggacggcctggtgaccgatgcaaggggcaacctctatattacggacgtcacccgcaacggcattgtccggtatgatccgaagacacgtactatgtcgcttattgctgcaaatgaagccgtacgctggcccgacacgccggctattcgtccggacggtgacctgatcttcacctcaagcagcctcaatgaccactttgctggcgcggtcaaacccggtcatgaacgctacgagctatggcgtttacctctcagcgcttcaccggccacgaaaaagtaa

SEQ ID NO: 147454 - DNA, 888 bp, Enterobacter cloacae
atgatggcgaaacgggaaaactataacgatctctatctgtttatgcaggtcgtgcgagaagggagttttactgccgccgcgcagaggcttggcctggcgcagtcaggaattagtcgtgcagtgcgcgagctggaagaacgactgggcgtgcagcttctggtgcgtaccacgcgcaagttatcgctcacccatgccggcgagttgctctatcgaaccgtcgaatctggatttgacgctttagatatggggcttgccacgctggcccattatcgccataccccatcgggtacggtccgtattaatgccagtcagcacgccattgataaagtgctgctgccgaagctggcggtgtttaaacaacgctacccagatattcggctggaactcatcagcgaaagccggtttgtcgatattattgctgagcgcttcgatgccggtatacgtctgggctcggaagtaggtagcggtatggtcgctgtgcgcatttcgcccgatatggagatggccgttgtcggcacgcccgagcactttcgtcgctacggatttccgcaaacccccaccgatttagtggttcatccctgcatcgcttaccagttcggcgacggcagcctgtatgcatgggaactcaatcaggacggtaaaaagatcacccatcaacctcagggacaatgggcctttgctgacagctatatggaagccaaagccgccaggctaggtctgggactggcttatgttccggaggaattagtttctgatgatatagaacagggggcgctgatcagagttttgcaatgctacagtcagcgcctggaaggttcatatatctattatccgcaccgcaatgtgtcacccgctctaagagcggttatcgatacattgagaatttaa

SEQ ID NO: 147455 - DNA, 1059 bp, Enterobacter cloacae
atgagttatgctgatacagccaatccgaacgcgcccgtttcgctggtcgagaaatgggataaaacttttgctgagagcacgcaagttgatcaccgtaaggtgacctttccgaaccgatacgggatcaccttagtcggggatctctacatcccgaaggatcgtggggatcgcaagctggcagctattgctgttagcggccccttcggggcggtgaaagagcaatccagcggcctgtatgcgcagacgctggctgaaaagggatttgtcactctggctttcgacccttcatacacgggcgaaagcggcggctacccgcgcaacgtcgcatctccggatatcaacaccgaggatttcagcgcggcggttgatttcttaggcctgcaaaaagaggtggatcgcaaccgtatcgggctgctcggtatctgcggatggggcggcatggccttaaacgacgccgcgatggacacgcgtgtcaaggcggtggcgaccagcgtgatgtatgacatgagccgtgcgatggggcatggcgtgggcgatggcaaagaccgctataccactgccgatcgtcgtgccgtattgcagtatctgaacacgcagcgctggaaggatgcggaaaatggcgctttcgcgccaggcgggcatgacatttatgttgatgagaagggcaacgtcaccgcttccgatcgtattctgccggaaactctgcccgcgaatcctaacccagtattgaaagagttctttgattattaccgcatgccgcgtggtttccatgagcgttcggtcaactcaaccggtgcctggaatgcaaccatgccgctgtcatttatgaatatgccgctgctgagttacgccaatgaagttactatccctacactcatcgtgaccggcgaaaaagcccattcacgctattttgctgaagatgcctttaaggcaatcggcagcaaagagaaagagttagtgattgtccctggggcaaaccatgttgatctgtacgacaacgttgcgggtaagatcccatttgccaaatttgagcaatttttcaaagcaaacttaaggtaa

SEQ ID NO: 147456 - DNA, 1194 bp, Enterobacter cloacae
atgtccactgtaagtctaaaaccatcatacgaaaaaaagcatgcatactggagcggcgtatttgccatgacgctttgcgtgtttgtgctgatcgcttctgagtttatgccagtcagcctgcttacgctcattgcccgcgatttgcacgttaccgaagggttggcagggcaaggaattgccgtctctggcgcactggcagtgctgaccagtctgactatctcccatattgccggagacctgaatcgtaaatatcttctgcttgggctaacggtcttaatggccatatcagggttagttatcaccatggcgcctgactatccgatttatatgctggggagggctctgattggcgtcgtcatcggagggttctggtcaatgtcggctgcaaccgccattcggctcgtgccacagcaccaggttccccgcgcactggcaatttttaacggcggtaacgcgctggccaccgttgtggctgcgccgcttggtagttatctggggacaacggtcggttggcgtggggcctttttatgtctcgtccctcttgcgatagctgcgttcatctggcaatggttcagcctgccttcgatggaaagcgataaaacacaaaaaccacaggggtctgtgcttcgtctgttcagcgttgccatcgtaccaacgggaatgcttgcctgcgggctcttctttatgggacagtttgctttgtttacctacgtgcgcccctttctggagagcgtcaccagagtgggaccttctaacctttctctgattttgcttgcaataggcgtagcaggttttgtcggcacaacgatcgtctcaacattcctgaacgccaggttttatcagaccttaatcatgatcccgttgcttatggcagcgattgccggtgcattactgctggtcggacaccatatctgggctgttgccgttttactcagcctgtgggggctacttgcgacggctgcgccaacagggtggtggacatggatagcacgagcgttacccgaagatgcagagaggggtggtggcctcatggttgcggtgatccagctatcgattgcgcttggttcaacggctggaggtctggcattcgacagtctgggatggagaagtgcatttggtttaagtggtttgttactactgggggcggtagtgatgacatatgcaacatcccgtcaaaataggaaggtacactaa

SEQ ID NO: 147457 - DNA, 162 bp, Enterobacter cloacae
atgtcaatggaggaggtggcagacgagctgaatacgtcggtgaaaagtctctaccgcaaacggacggcgctctcggaacggctgagggcggagaacttcaacgaggcgtgtttgtttatcttcaaaaacaaattgctgggtgcaggtgggaacgatccctag

SEQ ID NO: 147458 - DNA, 522 bp, Enterobacter cloacae
atgattacccttaaaaatttcgttcaatatgaaccaaaatacaaagagtttttgtttaatgctatatttcttcagtcagatgaggggcttgactggtattatcatatgtcacgatttcagcctgaaacactgaaaatttgctacgacaaaaataatattattcgctcttttagtaatgatgctgatcgcctttttcctctggggatgtcagtttcagaagttgatccaacagacgtgcctgaagggctgaatatacacggtgagtgggtatggaatggcactaaaattattccacgccagttgacccgggaggaattaattcaacaggcggaaaccagaagaggtgaattgcttgccgaagcttcggatgttattgcccccctccaggatgctttcgagctcggcattgcaacaaacgaggaagcagccacgttgttactctggaagcgctaccgggtgacgctaaaccggctggatttcagtactgcccctgatatcgactggcccgaacgccctgcctga

SEQ ID NO: 147459 - DNA, 468 bp, Enterobacter cloacae
atgcacaaactcaagagcctgcgccaggcattaattgacgccatcccccaactgaacgctagcccggaacgcctgcagatgtcggtcggaagcgggcatattgacgcccgcctggcctcctcgctctcctttgaaaaacactatcaactgaatgcaaaggtcagcggtttcaccggcgacagcgagggattgttcgttcccgtgctggcctggcttcgggaaaaccagccggacatttttacccttgatgaaggccgtaaaaacggatgttccttcacgatcgtcttaaacgatgacgatacgatggatatcagcatcagtttgcaattaaccgagcgcatgcttgttgcacaggatcagagcgctctgcacgtgacgtattccccggagccgccgctgccggagcccgtcacgcgtccgacgtcgttgtacatcaacggtgagctggtcagccagtgggaggcgtaa

SEQ ID NO: 147460 - DNA, 1521 bp, Enterobacter cloacae
atgtcttctccttcctttgtcacccagaataattatcctctggacgatgacaccaccttaatgtcgaccaccgacgtccacagctatatgacccatgcaaacgacacctttgtgcaggtgagcggctatcagcttgatgagctgatgggccagccgcacaatctggtgcgccatcccgacatgccaaaagctgcgtttgccgatatgtggtacaccctgcagcagggtgagccgtggagcggcattgtcaaaaaccggcgtaaaaatggcgatcattactgggtgcgcgcgaatgcggtaccgatggtgcggaatgggcaggtgacggggtatatgtcgatccgcaccaaagccacggaggaagagatcgctgccgtagagccgctctaccgggcgctgaataacgggagctgtaaaaaacgcatccaaaaaggactggtggtgcgtaagggctggttgggtaaacttccttccatgccgctacgctggcgcgtacgcagcgtgatggcggcgctctttgccgcgcttgccgctaccctggtgaccacctccgcaggctgggtgccgctcgcagcggccgccgtgataacgctgctgggaacgctgctgtttgagcagcaaattgtccgcccgatcgaaaacgtcgcgcatcaggcgctgaaggtggcgaccggcgagcgcaacagcgtgcagcatctgaaccgcagcgacgagctggggctgaccctgcgcgcggtaggacagctggggctgatgtgccgctggctcatcaatgacgtctcaagccaggtgatgagcgtccgtgacggcagcgacaggctggcgcaggggaacgaagcgctgaacgatcgtacacgtcagaccgtggcgaacgtgcagcagaccgtcgcaacgatgaaccagatggccgcttccgttcagagcaactcagaaaccgccgccgaagtggacaaactctccgtcgccgcgagcagcgcggcgacgaaaggcggcaacgcgatgcagaccgtggtgaaaacgatggatgacatcgccgatagcacgcagcgcatcggctcgattacctccctgattaacgacatcgctttccagaccaatatcctggcgctgaatgcggccgttgaagcggcaagagccggcgagcaggggaaaggctttgccgtggtcgccggggaagttcgccaccttgccagccgcagcgcgaatgcggctaacgatatccgcaagctgattgatgccagcgccagcagggtacagtccggctcggagcaggtgcacgccgcaggccgcacgatggatgacattgtcgagcaggtgaaaaacgtcacgcagctcatcgcgcagatcagccactcgacgtccgaacaggcgaccgggttgtcagatctaacccgcgcggtggcggaactggacagcattacgcaaaaaaatgccgacctggtcgaggagagcgcgcacatctctgccatggtgaaacaccgcgccgggcgtcttaaggatgcggtgacggtgctccattga

SEQ ID NO: 147461 - DNA, 1191 bp, Enterobacter cloacae
ttgttacctgcaggctgtcgtgccgaggggctggcagaacaactctccaccctgacggcagatttgacttcacagggcctgcagcagacctgcggtgaagtgaaacataacttcctactgtcccttgccgaccaactcattcgtgagccggaaagcatgaccgcaccgctgtcggtgatgctcaatccgtaccgcccgctgccgctggccggtgtggtgttcagtcagccttcagccggtgcagaacgcgccgtgccgcaccactggggcatggataagcgctgggatgttctgcctgaatcagtccggacgcttcctgccgggctgcgtcctcgcaagcccggtattccatggcgcaaggtaatggcatctgcagctgcgctcacgatggtgagctgggctatgtggatgtgcatcgcgtatgtcaccaaccgcagccagattgacggtgcgaatgctcaggccgaacttgccgctcgacagaatcagcccctggagcagcgtctgcacgcgctgtctgaacttcagaaaacgctggcccgtctgcagtaccgttctgagcatggtgtgccgtggtacgaaaaggccgggctgagccagaacaatgcgctgctggcggcactctggccacactatcaggacagcgcgttgccgctgttgcgcgatgcggctgcagaccatctgcagaagcaggtcagtgcctttaacgcgctgcctccggatagcccgctgcgcgagcagagggcaaaagcgacctatgaccagctgaaactttacctgatgctggcgcgtcctgagcatatggatggtgcctggtttagcacggtgctgcttcaggactggccgaagcgtgacggcgtgaaagacggtatctggctaggcgtggctccgtcgctgctgtcgttttatggtgcacaactggtcacacatcctgagtggaaactgcgagctgatgaaaacatggtcagccaggcgcgttccctgctggttcgcctgatgggggtgcgtaatagcgaatcgactctgtaccagaaaatgctttcacaggtggcacatctgtatgtcgatatgcgtctcgaggacatgaccggcgatactgatgctgcccgcctgttaagcaccaccgagatcgtgccaggcatgtttagctggcctgaacgaagggctggcgattctggaggccctgattag

SEQ ID NO: 147462 - DNA, 1026 bp, Enterobacter cloacae
atggaaattcttagcggcctgagccagcgactgcagcagcgcatgcgtatgctcccactcaacaacagccatcttagtgagctttatcgtgttgaagcgttgcttacccgcctgagtgcggtccttcagcgccttgaactgaaacacctaagccagttcgatacgttacgaatgatgatacgttcgaatgctgaacggctggaaagcagtaatgacgcatcagatctgaatgcactcatgctgcccgatcgcgaattacctcaggagagggcagacccgattgacgaagtgaaatgggtctatgttgtgcaaccggaaaaccagcctaatgcagaggggcttacgacagcgcatggatcggccagaccatggaagccctttgtcgccgggatgtgttctatgctggtggtctgcgtcgccatagcgtggggtgggggctttctctccagacccgatcccttaacgacccaggccattgcctcgctggcgccgttacctgaagtgctcacacctgttcagcaagacgcgttagcacagcgagggactttaccgtccacgtttatcgcagaaacgcaacagcagcttgcccgactggataagctgccccctgactggaatatttcctacagcctacaggtgttaaagcagctccagacattacggcccgaagaggctaacgcgctgataatacagtggcaaaaaaagtttaacgcgacggcgttgcctgtagacgcaatgaacagctggtatcaggggatgatgacgcttcagcaactgagtgatcggctgagtagtctggatgagcaaaaaggaaaatatataaccgtgagtgagcttaaatccgtggttttttcgactatgcagtcatttaaccatgcgatacccgctgaagagcagctcaggcgcctgtcgcagtatcctgcaggaagtgcgctccctgaagcagaaaagacccaacttgagcttcacctaaagcaactggcaacgcgttatgctcaaataaagcaggatgcttctgctcaatga

SEQ ID NO: 147463 - DNA, 642 bp, Enterobacter cloacae
gtgaaaaaatcaaaagtggcagatctcattgttcagcatgttcaaaaacaactcttcatggccctttctgacgcgatttacgcggcatcaaagcgttcttacgattatgcgcaaaagaagaagctagaccacagagcgaccgcgcttggttatgatcgtcatttaaacctgaatgaaactatttatgaggtgtttgaggccaacggttgtaatcccggcaagctgcgtggtaaccgtattgtagaaggccatagcggtattttcacgattgttcgtgaaagctacaatgataaccaatggaagagactatttcgcagcaaacgtaagcaagagctcattgccgaaaacgtttctgtggaaaaagtggtgcaaccggatttattctccgatggttctgatgtaccgaaagctacactgttcgtagtatgccgtttttccggttcattgcagaatcaacccgaagccccgatgtctatagagcttgtcgttccaagttctgacgggaagagctgggttttccatgagccacttgaactttttttaacccgatatgatgtagttccattccaagaagataatgcattctctgcactcaaaaagggcattatcaaaaaagatggaaccgaggaagatgaagtatga

SEQ ID NO: 147464 - DNA, 468 bp, Enterobacter cloacae
atgagcgcttcgcagcaacctctagagagaacttacatatctgatgtgaaggttaacacccttttctcagtcattagcgatcagtttggttatgacgccaaagattgggccaaggaaattgtagcgctcatgaatctttggaaaaagaacggattcatagaggtgtaccaaactaaagaggatcgcaagtttggcctcatcaaagattctagtatcaatgagcgcggtataattagcccctattacattggtctttttcatgcaagattaattgacggtgataatgatccgttaataattatcaaatttcatgaagttgaaggtgatcatccttatgctgatatgaaatttatgctcgaccattgtgatatctttggcgacaagtctcagaagttcgatcaagctcaaatgcgattcatatggaagcaaattgatgaattcattcagcaagcagatggtactctctga

SEQ ID NO: 147465 - DNA, 177 bp, Enterobacter cloacae
atgatccttgaacgtgacaagaaaaagttcgtcgcttcccttgttgcactttcagacaaggtgagcagtaagtccttttctggagcaccaaaagaacaagaacaagcgctgatcgactttttcaaggaaaccaatgagcgcttcgcagcaacctctagagagaacttacatatctga

SEQ ID NO: 147466 - DNA, 1035 bp, Enterobacter cloacae
atgggactatcaaccaatttcagctacgcggattacaccaacacctttgtgaacatggatgcaaagaacactttgctgtccacgcttaatgttttcagtgatcgtcagacttctgcaagtccgaaggtgagcctcgatatcattgatgaagtcgctcagaaggtggcaagctctgttaatcgttacggttcagagtggtcaaccattcctaagcgtagcgccagcaatcacctgatcgaagcaccgctttatgcttatcaggaccggattacagcggcagacgtgcaaccatatcgcaaaccaggctccgacctgcaaatgtctgtaatggatgcggtcacttcttctgctgtcgcaatgcacgataagtacatgcgtactaaagagaaaattttcgctgacgcactcttccgaaatactgtcgaagcgacctacacccagcagccgatcatttcctgggaagatgaatttggataccaacaggcaaccggaacgatcaaaaccagcgttagctctggtgacccacttcgcagcctcgatgatgctgtaaccgctgctaaagtgcgcatgggtgaccttgctggtcagcttgacggctttatcctgtttgctggtagcaatgtttatcgcggcattaagtatcaccctgatgttcgtcagaatgttcagttcggtgtgcttgatcgggatgttttgtttaacaaagaagtgcttccggcgttctcaacattcattattgaaaatgtccgagtggtggaagtcacggatcaggcactttacggaattggtccggatgaatccttcctggttccacgctttagcaaaccgctgtcttcggatattgctctgcccttcgggtatgtggcaactgctaccagccgcaatctggatctggcatttgctgatccggttgatttccgtatctggagcgtacaagacaagtttaagaacgttgagctattcgcggaaagctctatcttgcctgttgtgtaccgtccggatttcactacacgactgacgaacgacgcagcgtaa

SEQ ID NO: 147467 - DNA, 381 bp, Enterobacter cloacae
atgacattgaactgcattaaaaatgctctgtttgccactatgcacggcatgacaccagaggaatacgaactccaaaaggcgcgggacaatctgaagagcgtcaccgataactttctggatcaacatccagagttgctcaaatcagcctcgtctgacacccccacggataaacggggcgaagccctctcgccaatgcgagacacctttggtgctgaacaacggattaaaaaatttttgggcgctgatagccgtccggcggtaagtcataccgctgaccatattgatcctgaaatgctggcgaaagctaaagcagcggctgctgcactcgcaaaatccgatcctgatcgttacggcaatatcatcaagcagcagggggtgtga

SEQ ID NO: 147468 - DNA, 912 bp, Enterobacter cloacae
atgaccgagacagtaaaaactgaagttcaacgtacaccagatgaggcttacggcgttactgagatgcgtttcttgtgtgccagccagattgtgattcgcagcactggcgaggttgtgaaaataacgcccgcaatgaagctcgtctacatctatatgaaaaatcagttcattggattctcaggccgtgagcagcaattttacacagaccagcgacaaatggcggcagcgttggacatttcacgcgacaccctgagcaaaatactcgcagctttgaagaagctcggaattgtcgagaatgctgggtggaagggtaatagtgagtcttacaccgtccattttttcagtgatgttgctgacggtctacaggtgatccataaagagtacaagggtgctccagcgtgggaccacgagcgggcgaataaaaactttaagtccaagtctaagatgaaggaagcagcacggccaagccccgaggagagagaagatggcgtacagcagcaagagcacgaacagcaatcccctgatgtggcctcttcatctgccacggatgatcctgaacagcaatctggcgtttcacagtttgctggtgatagctgcgatgatgtttccgctaatgatgctccatcactgagtaagccagctgggggaaatgttgtcgggataccgtggatcgccaactcgtttacccctcgtgggcctttggttccagaggcgcgacgctgggcgcaatcacagggcgctacaacctggcaggatgagatcaaacttgtgtggaaactgacaggaaaaatcaatatgagggagcctgaagagcatatgcggcctgatgatatacctgcacctgaaccagcaaaacagcaggctaacgggtatgcgccgcagcttgattatgatgaagatcaaccattctga

SEQ ID NO: 147469 - DNA, 201 bp, Enterobacter cloacae
atgcacatcaaattccagcagcacgtttatcaggctctgctagctgaggccattcgccaagataagccactggcacggctctgcaacgagattttagagaaagctgcaaacattttcgacaacgcaccaggccacacaacacctttagccagcaaggcgaaacctaacggagagaacaatgaccgagacagtaaaaactga

SEQ ID NO: 147470 - DNA, 174 bp, Enterobacter cloacae
atgggctatggagggttaggagatcacgagatggcgtggctgtttcacgtcatcgaagctgagcttcttaccacacagatcctgaagaggcgaagccatgcagagcggagcgatacagaagcatcactccttaacaccaacagaatgactaaccgtcattccagaaagttataa

SEQ ID NO: 147471 - DNA, 699 bp, Enterobacter cloacae
atgtttgaactcttgatatctcatctagaaaaatggagcacattcataagttcagtcgcagccattttaacagcagtagcaactttttttctttggcgggtaacaaagttactagccaaagaaactacgcgtatggttgaagcctcatctcagccgcatgtcgttgtcacccttgaaccaaatacctgggccgccttttactttgatataaatgttgcaaacacgggcaatgctccagcttataatattgagattgactttgatccgccactgattaatgctgaatatagagaaaacaaccatcactccattccatttagaaaaatcagtgtattaaagaacgggcaaactttatctagtaacctttgtgaatataatcaaatcaaaagcaatacatacaatgtaacaattagctggtcaaaaaaagcagactcaacagaaagagaatataataagtatgagtatgacatgtcatctttcgatggaattaactatttaggttcacgtagcccagtcacacaaattgcagagcaaattaaaaaaataagagatgactggagacctatttcacaaggttccaaaaagataaaaacggatagttatagttcacgtgatagagataaagagaaaaaagcacgtgacgaatggtatcaaaatgttttagcagaaagggaaaagagaaagaataataagccataa

SEQ ID NO: 147472 - DNA, 327 bp, Enterobacter cloacae
atgaaagacggactttattctgttttctttagaagcaacactcaagatttcggtgccggggttgtatcagttaaaaatgatggtgttaatggtggcgattatgccttctactatcaaggacaaataatcagcaataaattaaaactgcacgtaaaacaatttaatccttctggtcaatctgttttcggtcccttaaatgacttttatttgctcttgactgtaaacgaaaaagatgcgagcagctatgtccttgaaggaagcctggaaggaaattcccatttgaacttacaggttttagcaacaaaaatttccgatttgattggctga

SEQ ID NO: 147473 - DNA, 255 bp, Enterobacter cloacae
atgccggagtgtttgaaagagagcctaacggtggatgaattaccactgtatgtacctgcttttaaagtggaagtggagcaggtttggcgctactgccaggtactgacacagttgatagtgagtgggtctctgacggtggaaacagaaagagtcatcagtgatttactgtatgaactggtgggatattacgccgaaacgttaaaagcaccgcgttggctaagaacaaaagaaggaagtattgagctgttagattag

SEQ ID NO: 147474 - DNA, 276 bp, Enterobacter cloacae
atggcaaataaaaagacgtttcaccgggctacgtttttggtttttctgcttagtaccctttattacggcgtatgtttttttgcacttatttttattgtaaacaatgtgctgatcgagtttataagctctggaaagattgatttttcatctaaatcattaagttatttgtctgtggtgagcgctattgttggcgtcgccgcaggtgccagagtatggctctttgcaaagatagatgaacgcaaagcgagaagatcatcctcaatagatcgccactaa

SEQ ID NO: 147475 - DNA, 150 bp, Enterobacter cloacae
atgtgcaaaggtgatattcgttgcaagcagatcgccgaaaccggtttcattttcgtgaacggagtcaagtttggctgcatttacgggctatacagaaaaaaagatccccacgtccagaataggctcgcaaacgtttgcctggactgttag

SEQ ID NO: 147476 - DNA, 792 bp, Enterobacter cloacae
atgcctgaaggtccggagatccgccgcgcggcggatagcctggaggcggcgataaagggcaaacccctgaccgatgtctggtttgcctttcctcaacttaagccgtttgaaacagagctggtgggacagacggtgacccatattgaaacgcgcggcaaagcgttgctcacgcatttttcccataacctgacgttatatagccataaccagctctacggtgtgtggcgcgtcgtcgatgcggacgagcagccgcaaacgacgcgcgtgctgcgcgtccggttacaaacggcggataaggcgatcctgctctacagcgcctctgatatcgaaatgttaacgccggagcagctgctgacgcatccgttcttacagcgcgtcgggccggacgtgctggacatgcgcctgacggcgagcgatgtgaaggcccgactgttatcgcccaaattccgcaaccgccagttttccggattgttgctcgatcaggcttttctggcgggattaggcaactatctgcgggtggaaatcctttggcaagtggggcttgcgccgcagcgcaaggcctctcagcttagcgatgaaaagctggaggcgctgtcgcacgcgctgctggatattccgcggctgtcgtacaacacgcgcggcctggtggatgagaacaaacatcacggggcactgttccgctttaaggtattccatcgggcggggaaaaagtgcgagcgttgtggtggggtgattgagaaggttacgatctcttccagaccgttttactggtgccctcggtgccagatgtaa

SEQ ID NO: 147477 - DNA, 921 bp, Enterobacter cloacae
atggctctggagaagggtattgataagctggtacaggagtttattgccgcaggacgaccttcctcgcgaaagcagagtattgatgaccggagaagcggatatgtcgccagcacagcgctggccggggaaaaagaaactcgtgtccaggttgaaacgcttgttcttgaggacctgacctttcgggtattttcgcctttcaatgcccctgaaacgttaccttgtgccctctactatcatggcggttgttttgtcagcggtgggtttgaaacccatgataatcagctttgccaactggcgttttacggtaactgtcgggtcattgcggttcagtacagactcgcacccgagcataccttcccggctgcgcatgacgatgcagagagagcggcagatcttgtctggcaaaatgcagaacaattaggtgtggataaaaaccggattacactttgtggagacagcgcgggaggccatcttgcgctggtaacgtcattgcggcttaaggccaaaggtctctgggatcccgcgcagctcattcttatctaccccatgctcgacgctacggccagttttgaaagctataccctcaatggcatggattacgtgattactcgcgatacccttttgagcggctatgaaatgtatctggctggagccgaccgtcagcatcctgaagtcagcccactgtggcgcaacgactttagcggtctgccaaaggtccacattgttaccgctgagtatgatccgttacgcgacgaaggcgaggcgctttgtcagcgcctcacggagcaaggcgtgaagtgtaccgctcaacgatggcggggtgtaatacacggcttctttcagttgggtggaattagccagtcagcgcgagacgttatgcgagatattgcctggcgcattaaccatgccggacgagagtga

SEQ ID NO: 147478 - DNA, 933 bp, Enterobacter cloacae
atgactagtcgcccacagatgattattaatgttcttcaggctaatcctgatgagcaatttacagcccgtcagcttgcccaaaaaatcattgatcactatggcgcagagcttgctgtaaagcgtcaaaatcctcgattcgccagtgatgaagatttcttgagtcaaatagctgctgaagtcggtgggagcagaaccgttcaggcaaaagcgatgtgtcctcaggttatgacgcgtgacaaacctcggcccagactttattactggggtaaggaaatcgataatggcgtgcaacaagagtcatcttttgatattgctccgactccgtctgctgagacggtagctttttctgagcatgctctttacccgcttttgattgagtacctttctgaagaagaagaattgctttgccgtcgtatcgatgaaaagcgttcaagcaacaacaaaggtcttggggcaaaccattggctttatccggatattgttgctttgcagcctctcgataaaggttgggatagcgttgtgcaaaactgcgtacggtatagcgaagggcgtttaacccgtctgtggtcttttgaggtaaaacgtcagcttaaccgtagcaatgttcgagaatgtttcttccaggcagtgagcaattcaagctgggcccattatggttatcttgtcgcgaccgaaataaatgaagataagcagcgtggtgtagaaagagagctgcagatgttgtgtgcattgcatggtattggcgtgatccttcttaatccgcaagatcccggtaatagccaaactctgattcctgcacgagagcgaacaagtattgattggcaatccgtcaaccgcttggtagttgagaacaaggattttaaagagtttatcgatctggtttccgattatcaccagacaggaaaaatacacaaagcgctctggaatagataa

SEQ ID NO: 147479 - DNA, 756 bp, Enterobacter cloacae
atggaagtaaaagaagcatatgaaaagtgtttaaatgatcatcagggaaggaaaccagcgcctacacaaaaaattcattattcagatgcccctatacaacatgcgcaatcagctaaaaccatcaatagcaaagcagcaggacgtttattggccgctggcggggtttataatggaaacattgaagggttcagaaaaactgcagaacaattaggcggtgaggctatacagggttatgaccaggtattaaatgaacaaacagcaggtacagtaatagcagcagcctctattttaatggctaaaagacctaattctcaattgtatgaagaaatgaatagttacataggaaagttgagaggtgaaactaagttgcttgatggattagaaattaagcaaattaactatgtcagacgtgaaccagccgaagcagcagtattaagacgagagtttaatagttctatcagaaaaaatttccttaaagacattgctggtacaccggaagctgcaaacaagtttagtccatcagatttattacgtatgtcagaaggcggagtccctggtggttggagcgttcaccacaagttaccattagatgatggcggtactaacgcttttgaaaacctgtcattgattgaaaatgaaccataccataaattgtttaccaatatgcaatcatccgtaacaagagatatgatagcaggtgaaagtaagataactccgtgggctatgcctactggttctatttatccacttaaatga

SEQ ID NO: 147480 - DNA, 375 bp, Enterobacter cloacae
atgcacgatttcagattgttcatgatatgggatgcagcaagggaacttaaacccgaagattttcaatacatactgagaccggaagtcacttttgaaaaagcaagaatctactacgatcttgattctgacaactattcttattttagcctccatcaaatgccaaacagaaagagtgggtttgtaaatcctcattcagccaaatatgaccgtaaacgtaatggtctgtacgatggtgcatatgatcacacgcagcataatatagatactggctggcttatcggaatagacaccactgaaaaatgggattacttcaaacatcccttttattttgatgaaaagggtgatcttgtttatgattgctttatggaacattag

SEQ ID NO: 147481 - DNA, 477 bp, Enterobacter cloacae
atgtctcatgacaccctcgaaaagcgcatcttcccggccaaaggcacacctgcatcagaactggtgatgcctgacctgcttcacttcgataccgagatgcgaaagcctggtgtgacacgccagttgctgtggatggagtacaaggctcaggccggtgagctggcgatgggttactcccacttctgccgctgctaccgggagtggaaaaaaacacgccgcctctctatgcgccaggaacaccgtgccggcgaaaagctctttatcgacttatgtggcccgacggtccccgtcgtcaacccggataaagcgggttgccacaagcgcggccatataaagcgtcgtgcggaccccatcccttccaccaaagatggtccgacgcccgcgcatggtccccgagtctctgtttatgggggcgacacctacaagcgcactaattgctcgcctggagagactgcccagctcagggacctcggctag

SEQ ID NO: 147482 - DNA, 408 bp, Enterobacter cloacae
atgtcatggcgaatcagcattctggataaaagccccatcgctgaacacgaaacggctgccgatgcactggcgcgtaccctggcgctggcgcagcaggcagaaaatctgggctatcaccgcttctggattgccgaacaccacaacaccccccaacttgccagtccctcgccggagttgctgattgcctggatcctcgggcaaaccacgcgcattcgcgtcggttccggcggcgtgatgcttcagcactacagcccttataaagtcgccgagaacttcaacgttctggccgcgttggcgccaggccgcgtggatcttggtgttggaaaagcaccaggcggtctgccgctctctacccgcgcgttgcaacagggtctgaatcggcctaatgggagcgaagctgcaatatga

SEQ ID NO: 147483 - DNA, 1068 bp, Enterobacter cloacae
ttgaaaagaatattgatagttaagttaacttccttgggggatattgtgttcgcactaccactcatcaacgatattcggcatgcattcccaagtgtaagtatagactgggttgttgatgattcatgcagaagcgttcttgagtggcacactgatatcaactcaatatacagtcccccgctacgcgaattcaaaaaaaagaagaggctgaaagatttttttaaaataattaaatccattcttgcgctgcgcaaaaataaatacgacgccgtcatcgatattcacggtgtctataaaagcgccattgccacctggctttccagaagcgatatcaagtgggggtttcaggatcatgatctgggtgagtctggtgctcgtctggcgtataatcatcgccttgcatcggtacccacgggatcagtcagcgagggattgcgtcaacttgtcagccaggcccttagctacgatgtcgtctcatcaatggactatggcattttggcccctgtgaatgagatattgccagttatgccctctcagcccccctttgcactactttttcatggaactgcaggggagtacaaaaaatggagcgaggagaactggggaatgtttgccaggtatcttctcagctgtggcgtgagcgtattgctgccgtggggaaatcatcgtgaacgggaagtggcaaaacgtattcagcacgcagcgccaggttgttcagtcttaccactactgtctatcaatcagctcgcaattctgatatctaacgcagcccttgttgctggcgtcgatacaggattagtacatatttcatatgcgttaaaaaaaccaaccttacaaatttttgttgcgacatcctgcgaacgctacggtccatgtaatattaagaatgcctgggctataagtggaataaataaaagctccccgtctgtctcggatgcgtgtgaaggactatgctgtattcaaagacatactggcgatatttcctttatatgcactcattgcacgaaaaagaatcgctgcgatattaatcatcatgctgcggattccgcaggagggccagattcacggtaa

SEQ ID NO: 147484 - DNA, 750 bp, Enterobacter cloacae
atgaatacgaatggaaaaaatggtcatttatattatcgaacaaaagggaatggtcctcttgtagtactcttacatggcttgctgatggatggaaactcatggctcactaatgggttagttgaggctcttagccacaaattttgtgtagcatatcctgatatgttggggcatggaatgagtgataagccagctgaagctggtctttatgagcaggaaaagcaggcatcaaacataagattattaatcaatgcattaggatgcaaccaagcgcatatagtaggttattcttcgggagcctggctggctgcaggattagtaaaataccatccgaacatcctgtcttcactggttattggtggatgggatgttgaaaatggccttcctgaaggtccaaacggaaaactggattttgataccttttttgcgtacgcaaaaattactgctcctgaattaactgactggattacatctgatacagaaccagcagtacgtgcatatttcaatgcaatcagttcgtacgatggtttttatgattcggagcgacttactcagatcaacattcctaaattattttgggccggattggaagatgtttactaccgacaactgaatttctgggccgaagcaaaaaaatacgcgttcatttcggcaactggagatcatgtaggcgcaatacttaagcctgaacctgccatcatcagtaaaatttgtaaatttgttaccctagcggagtataaaacctcggtatag

SEQ ID NO: 147485 - DNA, 576 bp, Enterobacter cloacae
atgaaccacacaccttatcctgtagttttagatgcttgcgtactgtacccgtcatttctacgggatttactgattcgattggggctgaccggattgtaccaaccaaaatggtcagccagtatcgaaaatgagtggcaacgtaacctgttagcaaacagaacggatctaactgaagatcaaattaaacgcactgccacgctaatgaataaagccattcctgatgcgttggtcaccggctttgagcctctgattgatagcattgatttacctgatgtagatgatcggcatgttgccgcagctgctgtccgtagcaatgctgaaatcattgtgacgttgaatcttaaagattttccggcacctgctcttgatgcctttggtatcgaagtgttgcatcctgacgattttgttatggatttatttgatttaaatagagcacttgtgctttcggccgtaactacgcagcgcagtagtttacggaaaccgcccgtgtcggttgatgaatatttagaagcgttgctaaggcaaggtatggcgcaaaccgtaaaagaattaagcaaataccgcatgctgatttag

SEQ ID NO: 147486 - DNA, 462 bp, Enterobacter cloacae
atgacaaactcaattcttgatagccttagccttccggctaaaggggagattgaggcagctatacgtggacaaagggagcttgccgcctacctctccacaaaaatggaaacacagaaaatttcgattcaggatgcagataacgtaactcatcaaatcgaactacctacgtcttcactgacgttgcttatgtcgattttgggtgaactggcacttggtaacgcggtgcaagtcgttcctgtgcatgctgaattgaccacgcaggaagccgccaatattctgaatgtttcacgccctcatatggtgaaactgctggaagatgggaagctgccttttcataaaacaggtcgccatcgccgcgtgcttttcgccgatttgatgaagtacaaggatcagcgagatagcgatagcaataaagctatgcaggagttggcagatctaagccaagagcttggactttactaa

SEQ ID NO: 147487 - DNA, 582 bp, Enterobacter cloacae
atgagaagcatggaaaaaacgggccatctggcatggtgcgctcttgttgccctgcacacggcgcgggaagacggactggtgctgtccgagtcgcaggaaaacctgtttatctgccgctggtttgcacaggcgaaaaaacagcgcaggttcccgcgcgacgtggccaccgatattgactggatactggagcaggggcgaagacttggcgttcgggcaaggttacggcataagctcgattatctctggcgcagctgtacgggcgaactgtccgagcagaacgacctctttcgcctgacatacgcgctggagctggcgaagcagtacgactgggtgtatcacgtcctgagcgacagtgagtggagcggccggcgtcagattcagccgacggcgtcggtaaacagcatctttctgctgaaaagcgcgctggaaatcggttttaatgatgacgggacgcaggttatgccggttccggccagaattggcgggcgcgctgaggggctgaatgcgctgcttaaaacctgtggctgggaggccgtcagcaacgacgaccagtggatactgatgactatccgcacaggctga

SEQ ID NO: 147488 - DNA, 396 bp, Enterobacter cloacae
atgtcacgaacggtcgaaatactgcagtacaccttacacagcggcagcggtgacggttttcaccgaatcatgagggacatcagcgttcccctgcatcagcgccacggcatagatgttgtgtggtctgcccagtccctgcatgatccggattactacattctggtacgggctttcgacagcccggaaagtatgtctgctgtgcttgatgctttttatgccggcgatgactggcgcagcgggccgcgtgaagacattattcgttgtatcgacagctgcattaaaacggtgataaggctgcctgcggaaagcgtggaaaagcttcgcggcaaacataacctgtctccctctggtctgaaaggaaacaacgctccgcagctggcgggggaatatttatga

SEQ ID NO: 147489 - DNA, 234 bp, Enterobacter cloacae
atggagtattcagacgccttcatgcgccggcatgaagagatgtgccaggtggtgggcagcatcgtttttgccctggccgaagccggccatgattcgcgccgcgaaaacattgtcgccgtactgcgcagtgagattgcggaaacaggaaaatggacgccggaccaggtgctttacctgcagctggccatcgacctgctggaacaggcgcgcttactgccggggcagggaaactga

SEQ ID NO: 147490 - DNA, 1350 bp, Enterobacter cloacae
atgcgtatcgctaaagcggtccgggaaagccggtggggtaaggtgaaagccttacaacgtctgctgacccgcgcgtatagcggaaaaatgttagccgtgaaacgcgttacggaaaatcggggtaaacgcacaccgggaatagacggcaaaatatggaaattcccggcggcaaagtggaacggaatgctgtcacttcagcatcgcggttatcaggcgatgccgttgcgacgcatatatatcccgaaaaacaatgggaaaaagcgaccactggggatcccatgtatgcgggatcgtgcgatgcaggctttgtggaaacttgcactggagcctgtatcagaatctctggcagatcctaattcttatggttttcggcccaaacgttcaactgctgatgccatcgaacaatgtttcaatgcactcagtaaagttaaatcagctgagtgggtccttgaaggtgatattcggggttgcttcgacaatttcagtcacttctggatccagcaacatgtaccgatggacagggctgtcctgcgtcaatggcttgaagcaggatatatcgacaaaggatctttgttcgaaactctggcaggcactccgcagggcggggttatttcacctgtcatcgcgaacatggtattagacgggctggaggccatcgttcacgctaactcaggcaggacgactgctgaacgccgaaagtccaaggtcaatattatccgatatgccgatgacttcgtggttacaggggcatcaaaagaaattcttgaaaatcaggtgctaccgtcaatccgtcagttcatggctgagcgtggtctggaactgtcggaggaaaaaaaccgtattactcacataaaggaaggattcgatttccttgggcaaaatgttcgccggtacgggaacaagcttctgatcaagccagcaaagaaaagcatcaaatcgttgctggtgaagatcagggaaatcatcaaaagaaacgggagtgcgactcagaaggtgttgatacggcagctcaatcctgtaatcagaggctgggccatgtatcaccgccacatagtagcaaaaacgacttttgagctggtcgataacctcatatgggaactgctatggcaatgggccaaacgcagacatcccaataaaggtgccagatgggtaaaacaacggtactttccgacgaaaaggaacagaaaatggaatttcgccacgaaaaaatcggccaacgggaccagcaatgacctagagctttttcgtgcagcaacggtaacgatcaaacgccatataaagatccgagccgaagcaaatccatttgtatcggactggaacagttattttactcagcgctatacctcataa

SEQ ID NO: 147491 - DNA, 228 bp, Enterobacter cloacae
atgctgaccagccccggcgaagtctgtgaccactggatgctgttgcttcagtcagccagcggacagcggattaaatgtctgctcagaatgccggtgctggatacctttctgataaacagcctgctgctgcgggctgatgtgctggataaaaaacggtacacgctggcggggctggctaatgaactggctggcatcaccgttacggcaatatccgggcgtcgtccctga

SEQ ID NO: 147492 - DNA, 441 bp, Enterobacter cloacae
atgccatacaaatataacgccggaaagcgccatcatatacccagagccagattcaccgtcacaaactggtccgaatacgaaaacggtctcaggcaacgtggcagcctgcccctctggatcacgcctgaagccattgccaaatggaaggcggcagaccgtatatctccgggaggtcagccccgttattctgacctcgccattcaggcctgcctgatggtgcgcaccgcttaccgcatgccccttcgtcaggccgaaggcctgatggcatctgtcttcagactgatgaatctctcccttgccgtgcccgaccacaccacggtcagcagacgcgctgccgtcctgcctcctcttccgcacatcccgtcagagggcgctcttcatatccttatcgacagtaccgggctgaaggtttaccgcatggcagacactggttcatgctga

SEQ ID NO: 147493 - DNA, 1650 bp, Enterobacter cloacae
atgagtcagttttttatgaataagaaagcagacctggtcagtgaagcgctggaagggatgctgcgcgccagcccgttcagtaatctggcgatgctggatgccgggaaggatatccgtattgtggttcgccgtgactgggacaagcgcagggtcgcgattatctccggtggtggcgcaggccatgaaccggcacacgcgggctttgtcggcaaagggatgctcactgccgctgtgtgcggcgacgtgtttgcatcgccaagcgttgacgcggtgctgagtgccatcatcaacgtcaccggcgacgcgggctgcctgctgatagtcaaaaattacaccggtgaccgcctgaatttcggtctggcggcggaaaaagcgcgcaagcttggctaccgtgtggaactggtcacggttcgcgacgatatttccctgcctgacaacccgcaacctcgcggcgtggcgggcacggcgctggtgcacaaggttgcgggcttcgccgctgaacaggggaaaacgcttgcagaagtcaccgcagccgcacaagacgcgatcgctaaagtgacaagcatcggcgtggccttctccagttgcaacattccgggagaaaaccatggtgatcgtgtgcagaacggtacctgcgaactgggcatggggatccatggtgaaccgggcgtggagacactgcaattccggacagggcgcgagctggtcagtctgatgacagacaagctgctgagcacaaccgataaacacagcaccagagcgctgctggtcaacaacctgggcgggttttccgcgctggaaatgtcgctgctgacgcgcgaggtgcttcgctcttcgctggccagtgacgttgaactgctgatcggaccggcgacggtcgtcagtgcactggacatgaaaggtttttcactctctgtcatttcactgactgataccctgcgcgaagcactgctggcgccggttgaagcggccggatggccatcagtggtcatcccacaacaaccggaagtggtggtggcatccaaccggatcccggagcatcattttacgccttcggataacgagacaacccggcgcgcgctgtcgaccatttgcagaaccctgatcaatgcagagtctgaactgaatgccctggacgcgctggttggcgatggtgacacaggctccaccttcgcaggcggggcccggcgggtactgtcagcactggaaaacggccagcttcccctcgataagcccgatgacctgatgattgccgtggccgaacatctggccacagcgatgggcggctccagcggtgtactgatgtcgattatgctcaatgcctgtggccaaaaactgactgaaggacagactctaggagaatcgctgggctacggtctgaaccgtatgcagtactacggcggggcaaatacgggagaccgtaccatggttgacgcgctcagcccggccttcacctgtatcattcagggcggctcgctgtcggagatcgccagggcggcacatacaggcgcagaaagcacctgttctatggccaaagcgaatgccgggcggtcatcctatctcaacagcgataatctcaacggcgtgaaggacccgggggcgtatgcggttgagctgatctttgcggagttgagtaaacagttttcctga

SEQ ID NO: 147494 - DNA, 1116 bp, Enterobacter cloacae
atgagagttattcagtcccccggtaaatacattcagggtcctgacgcgttgtgctcactgaatgagtatattcagccgctgggctcgcgctggcttatcctggtcgaccccgccatgaagcatcatctcccccgcttttccacgaaagccgctgataatctgcattttcatcctgaactgtttcgcggccagtgctcccgtcaggaaatccagcgcatcgccgggcatgcagaacgtcaccgttgcgacggtattattgggtttggaggcggcaaggtactggataccgccaaagctgttgctttccatcagcgtattcgctctgtcatgttgccgacggttgcctccactgatgcaccaaccagcgcactgtcggtgatttataccgaggaaggagaatttgaacagtacctctttttcccggccaacccggatatggtgattgtggacagcacgattattgccagcgccccggtccgccttctggtcagcggtatgggggatgcactctcaacatggttcgaagctcaggcatgctatgaatcccgttccgctaatatgtccggcggacagaccacccgcgctgcacttacgctggctcgcctgtgttatgacaccctgctgcaggaaggtaaaaaggcaaaaattgctgcagagcagaaggttacctgtcgtgcccttgagcgcatcatcgaagccaacacctatctcagcggtatcggttttgaaagcagcggtttggccgccgcacacgccattcacaatggtctgacccagcttgccgactgccaccatttctaccatggtgaaaaagttgcgtttggcacgctgacacaactggtgctgcagaacagcagtgatgcacagattaacgaggttctggatttctgcgtctcagtcggactgcccgtgtgtctggagcagctcggcgtgaccgaaaatgtgcgggaaaaaatgcgctgtgtggcagacaagagctgcagtgaaggcgagaccattttcaatatgccgttctgcattactcccgaaaacgtatacagcgccctgcttattgccgaccagctcgggcgtcagaagctcggcctgaattgtcagaagctggacctggcagcgtaa

SEQ ID NO: 147495 - DNA, 750 bp, Enterobacter cloacae
atgccatacaaatataatgccggaaagcgccatcatatacccagagtcagattcaccgtcacaaactggtccgaatacgaaaacagtctcaggcaacgtggcagcctgcccctctggatcacgcctgaagccattgccaaatggaaggcggcagaccgtatatctccgggaggtcagccccgttattctgacctcgccattcaggcctgcctgatggtgcgcaccgcttaccgcatgccccttcgtcaggccgaaggcctgatggcatctgtcttcagactgatgaatctctcccttgccgtgcccgaccacaccacggtcagcagacgcgctgccgtcctgcctcctcttccgcacatcccgtcagagggcgctcttcatatccttatcaacagtaccgggctgaaggtttacggcgccggtcagtggctggaggagaagcacggggcccgtgcccgccgcgactggcgtaaactccatctggccgtggatgcggacaatttcagcattgtggcgcataccctgaccgactcacagaccgatgacccgtcgcaggtggggccactgctcagtcagactgatggcaccatcacgcaggtcacggctgacggggcttacgatggccgcccgacgtacaataccattgccggtcacggtgaggggattactgtcgcgacccaccccgggtcacgacggtaccggaagacactaccgggccgccatgccagcgggaccggcacctggccatga

SEQ ID NO: 147496 - DNA, 399 bp, Enterobacter cloacae
gtgcgactttcacgtcgcaccctgaccgacccgccatatctggttggttttcgtgaccgtcaggggcgtaccatcgccggcgataaaaccgatgaatggctgcaacctgcctgtaatgaaatgtaccgcgtactgaaaaaagacgcgctgatggtgagtttctacggctggaaccgtgtcgatcgttttatggctgcctggaaaaatgcaggattcagcgttgttggccacctggtgtttaccaaaaccgacacatcgaagtccgcctatgtgggctaccgccatgagtgtgcctacctgctggcaaaaggccgcccacgtctgccacaaaacccgctgccggacgtgctgggctggaaatacagcggcaaccggcaccacccgaccgaaaaaccgtaa

SEQ ID NO: 147497 - DNA, 1701 bp, Enterobacter cloacae
atgactgcgaaaagtttaaacgcgggtgctcccaccggccacaatacacactggcacagcatagactgggccagatgccgtcgtgaggtcagaaggctgcaggcacgtatcgtgaaggccacacaggaacgcagacatggcagggtcaaagccctgcaatggttgctgacccactcgtacagcggtaaagcacttgccgttaagcgggtgacagaaaatcggggtaaacggacaccgggcgtggacggatgcacatggtcaacacccggaagcaggatgcgagctataaatgcactcacacgtcggggctatagtcccctgcctctgagacgaatttatatccccaagtccagtggcaaaaagcgccctctgggtattccaacaatgagggacagagccatgcaggcactatatctgctggcgctggaacccatagcggaaaccactgccgatccgaactccttcggattcaggcctggacgatcgacggcggatgcgattgaacagtgtttcaatacgcttcatcgtgccgatcgcgccagatgggtactggaagccgatatccgaagttgctttgatgaaatttcgcatgactggctcattgccaacatccccacggacaaggtaattctgagaagatggctcaaggctggttatatgcatgagggaaacttcagcccaacggaggcaggtacgccacaaggcgggatcatatcacccacgctggcgaacatggcgctggacgggttacagccgctcctgaagaaagcattctggcggagtgggttaaacccggataaggtcaacatcatacgatatgcagatgactttgttgttaccgggttaaaccgggatatcctgaccaacaaagctagtccactgattgagcaatttctggctgagagaggattaatgctctcaccggagaaaactaaaatcacgcacattgatgaggggttcgacttcctcggcatgaacgttcgtaagtacagcggaaagttgctgatcaagccttcaaagaaaagcgtgaaaacgcttctcaccaagatccgccagaagctgaaaagtaacctcatgatcagcccaagtcagctgatttggctgctcaacccaatactgaaaggttgggctcgctactatcagcacgtagtatcaaagaaaatcttccacaaaatcagtcatgaaatatggaaagcggtatggaactgggcctgtcgcaggcatcctgggaaaggaactggctggatcagaaagaaatatttccgatccgtcgggtttcggcactgggtgtttgcagcggacaccggaaagattttgaagtccggtaaacgagaaatacgcactctgtatgaagtttcagatatgccagtaaggagacatagacagatcaaaacaaccgccaatccatttgatccagcctatgaggcttattttgaggccagactgggagcagcaatgcttgattcgatcaaagggtacggtcaactgatacgtctttggcggggtcaggacaggaaatgccctgtctgtcatctgatgataaccgtatcgactggctggcagcttcgccatatcgtgcgcaaatcagacggcggactggataatgcctcgaacctaatcctgctacaccctgaatgtcaccatactgccagaagtaagggattttctgttgtgaaaccggctcttatgtggagctattga

SEQ ID NO: 147498 - DNA, 231 bp, Enterobacter cloacae
atgtcccgtctgattttgggtgactgtgtgcaggtaatgactggcattcctgagaaggctgtcgatttcatgtcgggtagcagcggcgcattactgcgccaccgtcccctcagaaccgtacgtgccggtttcccggcatacggctcaggcctttcaatagctccacataagagccggtttcacaacagaaaatcccttacttctggcagtatggtgacattcagggtgtag

SEQ ID NO: 147499 - DNA, 201 bp, Enterobacter cloacae
atggacagagaaatgccggcagagtggctgcgggatattgcccaacatatagaagaggaaagtccactgattcgtgatgtcagtgtggatgatgccctttccgatgaggggctggccagaaagatcatcaccatcacgttcaatgcgcctggtcgcgccccacaacctgaagaagacgtcagcagcatcccccggcattaa

SEQ ID NO: 147500 - DNA, 648 bp, Enterobacter cloacae
atgattacagttataggttcaaacaaaggcggtgcgtcaaagagcacgaccgctactaacattgcgattgccttggcattacgcgggaaggatgtttgccttttggatgctgatcttcagtcatcagcggcaaagtggcatgcttctcgtgaggaatcagacctgttacctcgcataacccttattcagaaatatggaaacatcagccaaacgttgcgtcagctcgatgaaaagtttgatcacgtaattgtcgatgtggctggtcgcaatagtcgtgaactggctaatgcgggagctgtggctgatataataattgctccacatttatgctcacagttcgatctggacactttggaagagcttgaaagccaactggaggcttggcaggatcttaatcctgatttaaacctctatatgtaccagacacgggcgactactaatcctgtattgcgtggtaaagaacgtgcagaatttcttgaataccttaaggatttcccaaccttacctcctcttaatgccattaactgtgaacgaaaaatctatcgagatgttgttcctcttgggaaatctgttttggaggcaactaacagaactgcaatagaggaggtggagcaacttatcgaagaggtgtattccaaatggctttaa

SEQ ID NO: 147501 - DNA, 783 bp, Enterobacter cloacae
atgcctgttcaagacgttattcccccctatgagcagatgtacctgctaaatcagcagctgatctgcaacgctgaccagttcaaacatgccgttatcacagttggcggtcaggctgtgcaatactggatatcctattatcatgcacaatacggcgacagattacctgatgagcgtctcaccacttctgttgactgcgactacagcgcccggaaagatgatattgcggctatagcaaaaacgctcaacgttaagacgtgggagaacaaagacggccagcccccatcccttgcacagtttatgcttatcgatcaggacacacacgatatcaaacgggatgatggacgcttatttgccgtaccggatgcgcctgacgagccaaatgtggtggatattatcgaccgacccggaggctttgaccgttctgattttctgggggaaaagctttacctgtataccgccccgttttatgtagaagcaaccggccccggcatgcctgaaatgaatgaaaaggtaagggtgttgaaccctgtcgcctgtatgcgctcgcgctttagcaatctgattgccttgcgccgtgatgctgaaattgaaattgcgcgtattaacgcgctcaagatcccatgttatttctttctcatcgaacagtttgatgaacagccgttcaaagttgcacgaggaatctttatggatttgtggtggctcgcgaatgacgaaagctgtctgcgccatcaggccttctggcatagctggcaggggccgcttcttgaagcggcaacaaagtaa

SEQ ID NO: 147502 - DNA, 1725 bp, Enterobacter cloacae
atgaaccaaacactacccactttgatatatctttcattttttgttagccttcctgccgctttggcttccgggcatacgcctgggtcctatactaattacacgttccccggggcccctgcaggattcagttctgttgactattcgattctgattaataaaaatccggggtactcggctaacacgttttggtctaatcagttttctttgattgggacttccggtggttacacgggaatgcaaagtgatggcggttcagcgcgaacatttttgttttctgtctggaatgcatctgaggcgaaaattggtactgaagggagctactgcctgaaatttgggggagaagggaaaggctatagttgcagaatgcactacccctggatggaagggggagtatatcagtttaatcttgcgcacacaggtaatggctggtttaaagtcacagttactgctaccgaacccgacgatggcagtaataaagtacattcatttgtactgggaagtataaaaacgacagcaacagaaatttcatcgtcagatatggttaactggactgaatattttgaatggaatgacagcagggcaacatgtctggggcagccatacagctctgcgactttttcattcccggaagggatatcagccgggaatcgtttccgggctgaaaccgcctctgtaagtacttctgaggattgccgggcattttcttcggtaaccccatcattcaacctgactggaaccctgcatcagaacggcactggtaactcgctgcgaacggcaattaacagcaataacaatcaatgtatcgcccctgtaactctcagcgaaaatgcagaaattgtaatggcaggaggaacctgcgaaacatcctcacaaaattgggtgtattcaaaagccggaacgcttgaagctccatcgaattactgtctggcatccaccagtaatggagaggtaaaactcagaacctgtcagcatggtcagccggagtttcagtgggttgtgatgaatccgggagaaataagaaacatcagcacctcgcagtgtctgacggataacggtctgaacaataaagtcacccttaataactgtgatggctctgatgcacagcagttcaacatggaattagacatcgggaaaggatgtatcgtcagtctgatgacaggagatgagtattgtctgcgttacggtgaaaattcagggtatgcgctccctgactggattaaggggcatgacgtatatgtccgggctgaccccttcttgtccgtgaaactgtctgactggagcaatctgtcttactccagaacagcgagctttgtggggacggtggaaaatgaggaactgaaaaaggtcagggccgataatggtgaattgcttgatttctcccatcctttctccatggctgtaaatatcaccgagacgcctgtgggttgtatccaggatatcaaaaaaccggtgaagtactgtttgcctgcctggaaaacaaatgaatactcgttacccggctggatatatggccgtgatgtttccgtaatgattcctttctcggctgatgattctggagtgtccgtaagactatctgactgggataatctttcgtacaacagaatcgccacttttaccgattccgtagttcccaacgaaaaccttaaacatgttctggccgacaatggcgaatatcttgatttttctaaaccccactccatgatggttattggtgtgctccggtga

SEQ ID NO: 147503 - DNA, 480 bp, Enterobacter cloacae
atgactgttaatacggaactgaaatggcgaaatgctgctcttaaacatctacttatcggtcccggggaaaccaggattcttgatgccatctcgacggttcttacccgagcgtcccgcatgactgacggacttttgctcagcgatctatggattaaaggctctaaaaaacgagggcgtgccggagaagtggatcatatgtttaatcgttttgttgtcacctggggggacactaccgtgatgactatatctcctgatggatgttctgaaacgatagaagatgatcaacttgttcgtggaaaaataaagagtgtattaccgcctacggatatagttgacggggaatccttcgctattgaaacacttgagagtgcaatggaaagagccggagcagccggtgcttttgatgagaaaccacaattaaaaaagatatttgaagatgcacttctagccagtacaaaccacaaacgtccaagactgtga

SEQ ID NO: 147504 - DNA, 144 bp, Enterobacter cloacae
atgtgcgatttatgcagggcggacgaaaattacttccatacgccagaatgcgtgtatggccagctggtcagtgagtacccggcgggattcgacccgctgcgcggggactgtaccgagctggcctccccggctgataccctgtag

SEQ ID NO: 147505 - DNA, 288 bp, Enterobacter cloacae
atgggctatgaagaactgatcgacactctcattattgaagagtcatcaaaagggatgctgtattgcggacgtctgcgtaccgacgatggaacgacggaggtgcatttcattaccagcgaagatggcgatactgttgcaaagaatcttcatgaggccggaggacacagcgggtggacattgtgcgacagacctgtcgacccggcacgttttacttttctccttgaaatctgggatatagatctgacagacagagagaatgctgttaaccagctctgcatgtttcattaa

SEQ ID NO: 147506 - DNA, 273 bp, Enterobacter cloacae
atggataacattgttgctgagaaaatttttctgaaggaaaatgaaggcgtacgcgtcaattccaatgatttttgtgcaatttttcttttgaatgatttcgaactcaatcagttcatttcggccttaaagaaaaatatgttgacacctacctatcaatcgacacctgttgaaatttattctgctagttcagaaatgtggaatgtcgtcatatgcttccagggaactgtcaagaaaataaagtttaatatagaaaaaatagaatcactggattag

SEQ ID NO: 147507 - DNA, 2751 bp, Enterobacter cloacae
gtgaccgttactgatccggcaggcaacaccagccccgtgatttcaacgcaggtgccggatatcacgccaccggctccggcaactgatttaaacatctcccctgacggcagcgctatcagtggtaaagccgagccgggcgcaaccgtcggtattgataccagcggagacggcctgccggacattattgtcacagccggcccggacgggaactttagtgctgcacttaacccgccacttacaaacgggcaaacggtcgcggtgaccgttactgatccggcaggtaataccagcccagagacaagtattaaagcgcctgatttcgttgaaaccccaataattaatccaaccaatggcgcaactattagtggcaacgctgaagcaggtattactattatcttaactgatggcgataacatccctataggccagaccaccgcagatgctgacggtaactggacttttacgccagccacgctgctggcagacaatactgtcgttaacgtggtggcaatagatgcctcaggtaaccagagcccggccgccagcgtgactgtggatgccattcctccggctagcccgggcattgaacccagcagcggtacaacactccgtggctcagccgaggcgggcgccacggttaccctgaccgacggcagcggcagccttattggccagaccaccgcagatgctgacggtaactggacttttacgccagccacgccgctggcagacaatactgtcgttaacgtggtggcaatagatgcctcaggtaaccagagcccggccgccagcgtgactgtggatgccattcctccggctagcccgggcattgaacccagcagcggtacaacactccgtggctcagccgaggcgggcgccacggttaccctgaccgacggcagcggcagccttattggccagaccaccgcagatgctgacggtaactggacttttacgccagccacgccgctggcagacagtactgtcgttaacgtggtggcaatagatgcctcaggtaaccagagcccggccgccagcgtgactgtggatgccattcctccggctagcccggttattaacccaacagagggtcatactcttagtggtaaggccgaagcgaattctacaattgttttaaccgatgcaaacaataaacctatagggcagacaacagccgatgctgaaggcaactggacgttcactccgctaacaccgcttttagagggaacgcaagttgtggcggtggcagaagatgaatcaggtaatatcagtccatcgtcaactgttactgttctgcttgccccgacaatcacggtgcctgaagcctctgatggatggttaaatgctcaagagttaagtgatggcattcaggttagtgtcactgttcgtccaagcatggcagtggggcaggtcatcaatgtcacattctctggccaaaatggttatgaaatcaccactcctcatactcttactgcggaagatattgccacaggcaacgtaacgattgcgctaataccgcctgctgatatgggaccatttccccaaggggacggcagcattactgccaacataaatgggggaccatcttcagccgccgttgatacgtctgtcgatacccttcccccagcagctcccgtattatctgttttaggaactgaacttgggatccttggcgaggcaggatcaacctttactgtaacgctcaagtttggtggagtgacgcatgtcgcaacggttacagcagatggcaaaggaaaagcctcccttgatttactgaccggttttgattcaacgcttacatgggatcaattacttaatgcacagctttccgttaccggaaccgaccctgcgggcaataacagtaatgtcgcctccatcgggataggcgaaaatatctttcaacctgttacgattggcaatttcgcgttggattttgccctctttccccccacttttggctttagtggcacgacttcccccaacgcaagtattaacctaatagttaaaacaccagcaggtaatatgtcgatgtccttaatggccgatgcgagtggtcatttttcgctcaacttacttagcccagatgtactcaatgatttgaatttgactattcaggatattctgaatcttggcgatcagctctcctttgacctcactgcaactgacatcaacggcaatgtcagtgcagattatggtatcgggcttagtgcaagcggcgtgacagtaaacttgggtgaaattgaaatcaatggcacggcgggtaatgacgttatgtcaggtgcagatggggtatctgagaatataaaatctggagcaggtgatgatctgattttaaatgttggtacaggagatcttacgagtgctggtgatggtaatgacaccattgagattgaacaaaccaattttaccagcattgatggaggcgcaggatttgataccttgcttctggctgatggcattaatcttgattacaacagcactggtacaggtaccttgactaatatcgaacgcattgatatgggaacaggggaaactggcagcaacctgaaactaactgcatcagaagttatagccattacggatggcaacgacatcctgcaaattaccggtgaggctaatgatactttgcatgtgacgggggcagttaaaacaggcacaacacaacacattgagggaattacctatgacgtttattcctttggcaatgcaacgctgttgatcgaagaaaataccgttaaggttgaagcttga

SEQ ID NO: 147508 - DNA, 1299 bp, Enterobacter cloacae
atgccatcggtttaccacagtaaacagactctgacaggagcaattttgctcctgtctgcttgtctgccgcataccgcgcagtccataccccttgtacaagccatcacaagcgggctgagtataaacccaaaagttcgcttagctcttgcagaggtcgagcgggcaggaattgaagtcagtatgtcaaagagcggctacttgccaagcttaaccttatcagcaggctcagagttttctcaaactacgcagcctggttatgatattaccgcctcgcaaatgctttatgattgggggcgggttgctagtgacgttgagagctccaatgcgacccatcaaaaatatatacaggcactgctggttgctcaggatgatagtgcgttagacatcattgagatctatctggatgtattagcctcccaggaacgaattaaaatagttaaagcgcatattcatgctcttaacggtatcatacaattaaccactgaacgcgattatcaaggctattcagaccggagtgagctggaaagaacgcggcaggagctttttcgtgcacaagagcaattggttattgaagaaggtactttgcaggaagcgagtgagcaataccacatcctagtcggtctaccagcgcgagacctcattatgccccacccaccatcattacaaaaaaaattattatacaaagacttaaatcaagtgatcgagaattctcctttacttaaaaaagcaaaagcggatgtctacgtgtcaaaagccgcccttcagaaaacaaaggcctcccttttgccacaacttaatttagaagccactgcgcttcgccgtgaaataggcggtcgaatggagaacgatactgtcgtctctttgcgatttcgtatggataccctccagggactctctaatttccaaagaccactggctgcggcccgacaacttgaagcttcgcaatggcaatatgatactactcatcgtgatataagaaggcagctacagacattattagataacataaacactttgaaaaaccgagttaaatcactgactctgcaaatgagaacgacatgcgaggtaattgagttatatgagaagcaatttgaagtaggccgccgggatgtcattgatttattaaacgttcagcgagatctgtttgaggttgaacggcaatggagcaatacacagattgagcaaaagcgactcaattatcgcgctgccgcacaaattggtcttttgcggcaattactggaagaaggtaatatgaaaaacatggatagaagcctttcaacatttgttaaggataaatga

SEQ ID NO: 147509 - DNA, 2136 bp, Enterobacter cloacae
atgagtcgtgtttcaaatgagcagggttgccccttatctcaaggactgcaccttttatgccagcaactgggaaaagaggtaagtctggcagcacttattgaaggattacctcttgaaaagggtaaacttcctttgcaactagccccacgtgcgttacgccgcttaaatattaatgcacaagtgattctccatcctttaagaaaaatagactcatacctactgccggcattattaattatgaaggacggcaaagcggtggtattagtcaaattaaacaaagcacatgcagatattttactcccacaggcacagggtggactcgaacgcatagttttagaggagcttgaacaacactatagtgggaaagttattttcgctaagtgccaataccgcgtagatgacagagtgggggatttcgccaatcttacgcctgaacattggttttttggcccattaaaagggctatggcgctcttatcttgaagtggcaatagcagctttgacagcgaatgtgttagccacagtgtcagctctttttgccatgcaggtttatgataaagttgttcctaataatgcctttgataccctttggcttctgaccagtggcgtggtacttgctatcgtgtttgacggagtacttcgtattatgcgtggatacctgttaaatgtgatgggcaagcgccttgatttacagctctcgacattgcttttttccaaagtcttgggcaccagacttgctgcaaagcctgtctccatgggtgcatttagtacgcaagtgcgggaatttgaatcggtgagagaattttttacctcatcaagtgccgctcttataagcgatctcccgttcgtattgatttttttattgttaatcgcgcttattgggggaccggtagtttgggttactatcttggctggggcgttaatggtattaccagggctgttggctcagcggcaccttgccaatttatcacggcaaaatcttcaggaaggggccatgaaaaatagcgtcctacttgaagcctttgaacacctcgaaacggtgaaaagtacatgcgcagaaggacgctgcctgtttcaatgggaaaggcttactgccaaactttctaacactgcgctaaaaacctatcggcttacatcaacactaagctatctagcaagcatggtgcaacaaatttgctacatcggcgtggttgtggtgggggtttatcaaatcagcgagggggccatgactgttggttccttgattgccagctcaattctttcttcgcgcgcaatagctcctctgtctcaggtagcgtgcatactcggacgctggcaacacacacgtgtagcaatggaaggtttaaatcagttaatggcagcccctcaggaaagagaacccggtaagcagtttatccatcgggagcgtcttagcgggcattatgaggtacaaaatatgaagctaagccacggggataatctcccagttatggatattaatacccttgccattatgcccggcgaacgagtggctctcttaggggggaacggtgcgggaaaatctacgttactacggctacttacaggcttaattaatgggcagtccgggcgtttattattagatggcgtgaatctccatcaaattgaccccgcagacaggcaacgaaacatcggttacctgcctcaagatatcgccctctttttcggtacactgcgcgagaatcttaatcttgcgaacttcgctatacaagacgatgagatgttacaagcgatggataacgttggattaggtgagtttgttagacagcatccgttgggtcttgatatgccacttcagggcaactcaagcctttcaggtgggcaacgtcaggctgtaggccttgcccgtattattctgcaagatccaactatcttattacttgatgaacccactgcagcattggaccaaaacagtgaaaaccatgccattatgtttttaaaacaatggctggggaagcgaaccttaattgtcacaacacataaaaaaaatgtactggaactcgccgacagggcaattgtgttgcgtcacggaaaaataatcatggacggtagtctttctcaggttgttcagggcaatcaggtaaacattccgctctcccaaaagggaggtcagtgctga

SEQ ID NO: 147510 - DNA, 1176 bp, Enterobacter cloacae
atgaaaacatccagtattcgacgccaattagacgacccgatgcttgccacaacacatcctgtttatcgccccttgctgtgggttgttataagtgtagttttactgactgtagcatgggccgccgtggccgaacttgatgaaataacccgaggggaaggacgggttgtaccttttagccgtacacaaaaaattcaaagccttgaaggggggatattaaaagagctaatggtcaaggaaggcgatttggtcgaggctggccagcaactcttacgcctggataacacttattttttaacgagttttcaggaatcagccaatcacgctaaagctctggaagccaccattgcacgacttgatgcagaagtattggaaaaaaaggaaattaatttcccccaaactattgaccccaacggtccgctggctcgttctgaaaatgagctattcaggtcgcgtcgggataaattgctggaaaatacacaagcaatagcccaacaaattcacctggcaaaccaacaattaaaccttattcgcccgctggtgaccaaacatgcagtgagtcaaatggaagcattaagactcagtcaagatattaccaccctacgaggaaaattatcagagcttaaaaatacctactctcaggatgcctacacggaacgctcgcaacgaaaggccgaactcagcgccctggaacccatagttctacaaaagcgagatcaattgcagcgaacagaaataacttctcctgtgcgtggtcgggtgaataccattttgatcaacaccagaggcggtgttatacagccaggtgaacccatccttgaaatcactcctgccgaagatacattattgattgaagcaaaaataaaaccacgcgatgtggcattcttagttccgggaatgccagcaagagttaaaattacggcttacgattattctatctacggtgatttacagggcacacttgagcaaataagtgctgacactattgaagaagataccgcacgtggtaaagaatttttttaccaagtattgatcaaaactgacctgaaccagctaaaacacggcgatgaaatactccccatcattccgggaatggttgctgaggtggatattatcagtggaaagcgcagcgttctgaactatttattacgccccttgattaaagcacgactgtattaa

SEQ ID NO: 147511 - DNA, 186 bp, Enterobacter cloacae
atgttttttcactgcattaaattagtagatttaggtcaatgcttgtttctcatcatttttatccttatgaaatccttgataaaagacaaaggtgtttactacgaagttatagtcacatgtctaatttattttattgaaagtcatatgattgatctactatatcggatgagtaatacctttatataa

SEQ ID NO: 147512 - DNA, 1896 bp, Enterobacter cloacae
atgttgatacacaggaagaaagttttagcagttgtcatcgggagcttggtaatatcgaccttttctggctcggtattcggtcacggtgcattggaaaacccaaaagcacgccagtgggaatgccatacgcagggtggtcactggaaccctgctacaatgaaaagtgctgcatgtaaggcggcattggataccagcccgtcaaagcaggccgcgttcgacaactggaacggcttcaccggttttgctactgctccacacacagtggacaagagtgacgtaaaagatggtatgctttgcagcggcagcaataccggttttgcaggattcaacttaccgcgcgcagactggactaaaactgttctccagccggatgcgcatggtaacgtcggcatgacttattattataccgcgaaacatactccgtcctttattgagttttacattaataagaaaaacgtcgatccaaccaaaaaagctttaggctggaatgacgtggaactgctcaagcgctttgatatcgcttcaggagacccaagcgttcgccatacgatcaacgttactattccagaagacaggatcggtactgcagtcatctttacccgctggcagcgcattgatgctgtaggcgaaggcttttacaactgcagcgatgtggacattaaaacccgagacaactctgaaattccggatggtggtggagaggaagacggcggggggggagatgccgattgggtaagcaagggagactttatcaccatggctcatcaacctacagttggagaacaggttcgcttccgcctgatgggcggcagccgcggtgataatttagtagatgtatttctgaagataacgcctcaaaacatcaacaacaatcagtggatactcgatttaggccgagaactgaaccgcaatcatgggaacgaactgcaaatcggccagcaacaggctgacggaaccattcgcttaaacgaacaaaagccacgtgaaaatcaagttttcgtaagtgataaaagctatggctatgccattgagatcgtgaaaaacgccgagacaccagctataagcctcgaccgttataccattgaccctattgctactaccaatagcggctatagctatgccgtgacaggtagcagcgataaagcggacgtaacctggcagtggacacgaatagctggcgacagccgcattaccgctagtccagcgaatcaggctaaaacgcagataattgtggaggggggcgtccccggtggttcctcagcaaccttcgagcttgctggtaaagccgcaaacggtgcagctggtaaagctacgctgaaagtgaatgtgcaggctcctcaggtagtacctactggcccgacaaatattacctctgacaaaagcggaaaatttaccgctaaggcgaactttgactatagccagggaaatgtaaactatagctggtcactgctcaaagcaggcaatgaagtcccaggcattgaccagagcggtaacgttaaaagcggcctacctgcaggcgattatctggtaaaagttactgccgagctggacaacggtgaacggaaagccagtggaaccgccgcgctgaaaatcacggaaaaagatgaaccaggtgccgggacctatgaaagttgggtggcaggtaaaacctacactgcgggtaataccgtgagctggaacggcgtgaactatatggcgagttactggaccaaagccgaaccgggaaaaggtgacagctggaaacttcataataacaccaagcctgttgcctggctctctactatggtttatcaaatgggcgacatagtgagctataatggtaaagtctggaaagcaagtcagtggatagcccagggcaccattccaggccagagttcgctctggaagcaacaataa

SEQ ID NO: 147513 - DNA, 453 bp, Enterobacter cloacae
atgaaatttatggaatgtattgttagggatgtcatttatggggacaatgtgcgtattgtcaaacctactaacatttatgaatgtgagctcagggacaacgtatttgtcggccctttcgttgaaatccagaaaggttgtgtcattggtagaggaagcagaattcagtcgcacacatttatctgtgaaaacgtatcaataggtgagaactgcttcattggtcacaacgtgacgtttgccaatgatcttttccgttccggtgctccggacccatcatcggataactggatcactatttccttaggcgatgcggttaccgtcggaagcggagccaccattctttcgcgatttatatgtagtggatctgttattggagccggttcagttgtggtgaagccgattgagatcaaaggtatttatgcaggaaacccggcaaggctgctcagaacattatga

SEQ ID NO: 147514 - DNA, 771 bp, Enterobacter cloacae
atgggaatctattcattttttgaaggatttttttctttttctttaaaattgcgcgctttaaatagcaatctgataacgccattgatatggtatggttattgtattatactttttgttgattttatgttaagaaccgtacttattgcagatgaccaccccgtttgtttattaggattaaagacattattaaatagtaggaaagaaagctatcagatagtgcacgaggcaagaaattcagatgaagtcttaacaaaactatcaattcagccagtagatattatcattacagacctttgcatgcctggggctcattttcctgacggccttcgtatggtaagacaaatagttagggattacccagaaagtattactgtagtggttacgatgataaaaaatcaagccgtacataaatttttagagaattgtggtgtaaaagtaataagtaaaaacgatatgcttaccactcttctgaatgttctgagtcgctcttcaagagttattaaaagcaggtcttcaacttcaactggactgacaaaactgttaacccctcgtgaaaccgaagttgttcgtctgttaatgagcggaatgacagtaaacagtattagtgattacttgagtcggactaaacaaactataagtgctcaaaagaaaagtgcgatgttaaaactgggagcatccaacgatttcgaattatttcagtgcgcttatttagcaggacttggaagtgatgctatgctaatagagcataaatgttctgaaggaattcggtaa

SEQ ID NO: 147515 - DNA, 1065 bp, Enterobacter cloacae
atgacggcatacggaacggagtttttctcaatgaacgatgtaaaccgactcaggatccttcaggacgttatcgaccgccgtcttaccacacgtcttgcagcaacccggcttgagatatctgacagacactgccgacggttgctggagcgctatcgtgaacatgggccgctttcacttgtcaaccgtcgccgtggccagcctggcaaccggcaactcatgccgggcctcgctgaacgagcactacgtattatccgcgaactctacgctgattttggcccgactttagcctgtgagaagctcgccgaggctcatgggctgtatctggccaaagagacggtacgcaagctgatgacacaggctggtttatggatcccccgcaagttacggccgccgcgtgtacatcagccacgaccgcgtcgggcctgcactggagaactcatccagattgatggctgtgagcatcgctggttcgaggatcgtggtccggcctgcacgctgctcgtttacgttgatgatgcgaccagccgactggtgcagcttctgttcgtcagttctgagtccactttcacctattttgaagccacccggggctatcttgagcgttacggtaagcctctggcgttctacagcgacaaggccagcgtcttcaggatcaacaacaggcaggctaccggtggtgatggtcagactcagtttggccgagccatgaacgagctgaacattaccggcatttgtgccaacaccagttctgccaagggccgtgttgaacgggctcaccttacgttacaggaccgtctggtaaaggagctgcggctccgtggtatcagtacgcctgaggcagccaacgcctttgccgatgagtttatggctgactacaaccgccggtttgcaaagccacctcgtcacgatttcgacgttcaccgtccgcttgagaataatgaaaatctggatgcaacattcacctggcgtgaacagcgtaaggtctcaaaaaatctgacattacagtacgataagaagttattgcgtattctggtgaagatgaacggtgattccggaggaacgtga

SEQ ID NO: 147516 - DNA, 462 bp, Enterobacter cloacae
gtggctgtcggttgcgaggtccttgttcgctggttgcataaggaaaacatcattccaccaaatcaattcattcagctggccgagcagagcggactcattgtctcgcttacgaggcaactaataaggtgtgtgactgaccagtttgcaatgtcatttaaaccggaaaatcctttgtatattagctttaatattagtgcccgtcatctgcagtctgacttactggaagacatccttaattattttcattcgcgagttgacagcaatattcgtctggtcctagagataacagcgcacgaaattatcactagtgatgacaaagtgagaaagaacattaagcagctcaaggcgagaggtgtaaagcttactctggatgattttggcacgggctattcaactcttaagacactactatatacacctgtcgaaattataaaaaagatatgctcttcacagccggaatag

SEQ ID NO: 147517 - DNA, 1191 bp, Enterobacter cloacae
atgccgccagtaaaactcctcccccgccgcacagtactgctttgcatcttcgtactggccactgttactggtttattcgcgatatttctgcaccaaccagctcaacccccctacattactgccccagtgcgtttgggcagtattgaaaatgcagtactggcaactggtcggcttgatgcaattgaacgcgtcaatgttggcgcacaggtttccggccaagtcaaatcattgaaagttaaagtaggtgacaaggtgactaaaggacaaccggtcgctgaaattgatgacctactccaacgtaatgacctacgtactgcagaagccagtctaaatgagattaaggccgatatatgcgcaaaagaggcacagcttaaacaggctgaatcgaaatacaaacgccaacgtaaattgcttagtaaagaagccagctctcaggaagactatgaggacgcagaagcggcgcttgccactctacgtgcacagatggaatcgctcaatgcacgcctaatacaagcgcaagtaactgtcgataaaaagaaagtcgacttgagttacacgcgcgtggttgcccctatggacggaactgttattgcagtcgtcagtcagcaaggtcagactgtgaactcaactcagagcgccccgactattattaaactcgcacgccttgacgtaatgaccattaaggcacaggtctctgaagctgacatcactcgcgtcaaaccaggtcagaaagcttggttcactatcttttcagaacctgaacatcgttatgaagctacattgcgtaccgtcgagctagctccggaatcaataatgaaggacgatacactgagcagtaacagcacttcttcgggatcagggacgtcgaacgcatccatttattacaacgcacttctcgacgttcctaacccagagaatcgtctgcgcattgccatgaccgctcaagtgtcaatggttcttggtgaagcaaaaaacactcttttagtacctgtccaagcagtgcataaaacggcagataaaaaaactcaggtacaggtgcttacatcagacggacacactgagacacgtgaagtcaaaaccgggattaccaacaacgtcgatgtacagatactctccggattgaaagcgggtgaaaccgttactctttctcagccagaggtcaaaccagccgagggagtattcttcctgtga

SEQ ID NO: 147518 - DNA, 1938 bp, Enterobacter cloacae
gtgaaggaggtcatcgaactgaaaggtgtcaaccgttcctactcagacggaaaccagtctctctacgtactgaaagatatcaatcttactatcagggctggcgaaatggtcgccatcatcggtgcttccggatccggtaaatcaacactgatgaatatcatgggttgcctcgatgttcctgacagcggcgactactatatcggtggccagaatgcagcgctgctatctactgatgcgctggcacagattcgccgtgaacacattggttttatctttcagcgttatcatctgatgcccgacatcagcgcgctgagtaacgttgaaataccagcaatttatgccaaccgccctcgcgaccagcgacgtctacaggcagagcaacttttggcccgtctggggctggaaggatgggaaaaccaccgaccgggtcaattgtcgggtgggcagcagcaacgagtcagtattgcgcgttcgctcatgaacggcggggatattattctggcggatgaacccaccggtgcgctcgattcaaactccggccaggaagtcctaactattctcagtgaactcaaccagctcggtcataccgtcgttatcgttacccatgatatgaacgttgcgcagcgtgcgcagcgagttattgaacttcgtgacggtgaaatcatttcggacagcgggtatagccagggtacctcgcaacagttatcacattcacgccaagtaactcaaaaaggctggcagattcttctggatcgcacccgcgagtctctgtatatggcactgaaatccataaatgctcaccgcttacgcactgcactaacaatgaccggcattatttttgggattgcagccgttgttaccgttgtcgcactgggtgaaggggccaaacagcgaaccctagaaaacatcaaaggattaggaactaatgtagtaagtatttacccgggtagcgatttctttgatgatgccgccgataaaatccgcacactcgttcccgccgatgcggatgccttagcacagcagaattttatcgaaagtgtcaccccagaaatctacgctcaggacactattcgctttcgtgggaaatcggctccagccaccatcaacggcgttgggcgtgattattttcatgtgaatggcataggaattatccagggtgccacgtttcgtgatgaccgtaatgctctccaggaagtaattattaatgataatgctgtacactccctttttggcgatccagatgctgaagcgctaggccagattgtttttctcggtgccgttccggcccgggtggttggtgtggcaaaaagtaaccgtgattacccacctaaccgtatagctgtctggatgccatggagtaccgtcatgtaccgcatggtgggtaaacctacattgagtagcatcagcgttcgactgcgggacgacgtcatcagtgaagccgcggttagcaccatgacgcaattgctcactcagcgccatggggtaaaagattttatgctcttcaaccgtgaccagttccgaaaatcggtcgaacacacgtccaagacactcagcctgctgatcctgatggtcgcttcaatttccctgattatcggtagcctgggagtaatgaatatcatgctggtttccgtaactgaacgtacccacgaaattggtgttcgaatggcagtaggggcgagacaaagcgatattatgcagcaatttatgacggaggctgtgttagtctgtctgaccggtggtgcactgggtattgctttgtcattctccaccggtccactattatctctgatggggggagggatacttaacgcaatttggtcttggaaggcggccactgtggcatttttctgttcaacattaattggtatggttttcggctatctccctgcccgcaaagcagcaagaatgaatccggtcatttcactggccagtgaataa

SEQ ID NO: 147519 - DNA, 327 bp, Enterobacter cloacae
atgaggaatatatcaatctatgcccggacctactatgttcgcttatcagtggcagcgtttttgcttgagttaaaaggagagatatatccggttgaaaatctatcaattttcgtatttgaagggacatggatcaatctgaaagattttctaaccatgacagaatgtacatcaaagcgcattctaataatagctaaagaagaaacaattaattttctctccgccattttgaaagctgacaaaatcagttacgcatgtattgacactgcccttactcatttgaaacagataataaaaactttcatacaatgccccacccccccctattag

SEQ ID NO: 147520 - DNA, 669 bp, Enterobacter cloacae
ttgagaccactaatttctacaatatactggtcgatagccagcgttggtttgtttagcttgagtggaatgtttattccccaacatttacttgcagcaacgagtggcagcgttagcggcgcaaatattaaggccagcgacggcgataccataatagctgacagggtcgtgagtcccggttggctgtatggtgttatgactcccccaggccagcccggtaccgccgatctcggaagtcacgttaccgtcagagcaaacgatcctgcaggcgttgtgagaggcattattattgagggtcacgatagcattcttagggctgatgcccttaccgttgaggtaaatggcaacagtgccaccggcattagcatatcaggcagtagggccagtgccgaactcggggctgacagccatataaccgtccaaggagctccgaacaaacgcgccgatgggattacgttaagtaatgcctcaaccttgactgctgagcgtctttccgtagaaaccattggcgactacggctctggcatcaagatcagcgactatggcagcaccgctagtctgggttcgggcagtacggtaagcacaaacggtcgtctcagttacggtatctacattgctgggtttaacggaacggcgagacttactgcagatggtttgcgtattagcacctag

SEQ ID NO: 147521 - DNA, 663 bp, Enterobacter cloacae
atgtcttccagcgaaattgccctaactggcgacctcgaaataaacatggcatcttcctcccagattgccatcgcaacccagcacaataacggctacgaggccagccggattaatgcgacgggcaggatgcacatcaacggcagcatttatgcccgaggcggcataatcgacctagatatggcctcagggtcattctggacgggcaccgccttcacggacaacattaatggcagtcggctagacgttagcttgaaggatagtatctggcaagtcatcgatgattctgcagttgataagcttatcctgaacaatgccgtcgttgatctggctgatacaacttcagcctcaggtaattttacctcgttaaatgttgcgaatctggacggtagcggtagattcattatgcgaacagatattaagggcggagagggcgacctgctacgcgtaaccggtacgagtgcgggaagtcatgtactgaccatcagaaaccggggaagcatggagactgacggcagtgagagcctgaccgtagtggagaccgccgacggaattgcgtcgttcacctcatcatctaaaattgagctgggcggctatctctatgacatccatcggaatggtaccaactgggacctctatgcttccagtaccctgcccgtcgcctga

SEQ ID NO: 147522 - DNA, 489 bp, Enterobacter cloacae
atgcttccagtaccctgcccgtcgcctgagccaggcccgtcgcctgagccagacctcaaaccgaaaccaaaaccaaaaccgcagctaaccaccacggctgatgcaggtggtaactacctgaacgtagggtatatgatgagttacgcagagaacaatactctgatgcagcgtatgggggacatgcgtcgtagtggaacacacggaaacatgtggcttaaccactacgccggcaagtttgaagcgttttcagggatcaagttaagtggatttaaaatgaactacgctggaatgcagataggggcggacaaacgtctggctgataatattccggtctgggtcggggcctttataggttcgacgcaggcctcccctaactatcgcggcggcaccggtataactcactcggattacgtcggactttattccagctatatctcacccgagggttactacactgacgccgtgcttaaagcaggctggcagaagtag

SEQ ID NO: 147523 - DNA, 942 bp, Enterobacter cloacae
atgacctcacttaaaacacttttgcagctaccgcgtgggtggcaatccagccgacaaactactggttctgatgggatcactctccatctccgtgccactcgtaaaacagcgcaatgccctgaatgtctcaaacgcagccgcgctgttcatagttgccgtcgacgacggatacagcatcttccatgctcaggtcagacactctggttaatatttgcggtccggcactggtactgtcgtaacccatcctgttcacgcaaaatctttgctgaatcgctgcttccctttgctgattcacagcagcagtcttcgacattactgcaaaatatgcagcatcagctgggattaattgccggaggagaggcagggagacgagctgcgttagcatccgggatgcagattagcgcagataccctattgcgcagggttgttcatgctccggagcaggcagaaaaccggacccggcatgtcggtatcgatgagtgggcatggcaccgtggccacaggtatggcacgctgatcgttaacctcgatactcatcgccccctagtactgctgccaggtagggagcaacgcacactggctgcatggttcaaaaaatatccggagatacaggttgtctcacgcgatcgtggcgggatctatgcattagctgctcgcgatggggcaccgcaggcaatacaggtcgccgatcgctggcacctgctgaagaatatcggtgatgcgctggagcgaatgatgtacagacacatgtcattgataaggctggttgccactgagttatctccccaaaaacaaaaccctgacatgtctctggccccgtctcaacgctacgtcgccctgagaaaattaaacagcagcggcgtgacagacggtatcaacgctggtctgaggtcgacgctcttcataaaaaaggttgtgggatcagagaaatatcacgtctaa

SEQ ID NO: 147524 - DNA, 1059 bp, Enterobacter cloacae
atgaatatcgatacatttaaatcagcaaccggcgcagtgctattgcttgccggcacagtgggcaccctattgcctgcccgggctgaaatttcgctaccacaggttaatgacagcgcttttggctacggcaaatccgttgacggcgcagtatccgataaattgttttataccctgggcggtgggtcggtgatatcgcagccggcgacgcgcagcaatatgaagaaaatgggtctggatgtggggtggagcagtgacctgatgtgcggcaactttgacctcaaaaccacaattggtaaccagctaaacggcgtaaccgatggctttaagaacctgatgggcgacgttattcagggggcaactggcgcggtggccagcctgccggcgatgcttattcagcgggccaatccgggactgtatgacatgctgaccaacggtgtgctgcaggcgaacgtttcgttcgacaaagcacaactgaactgccagaacatggcgaagaaattggcagatttcaacgacagtagcaaatggactcagcaggccatgctggaagaatacaagtccattgttaacagcggtgatgcagacgccgtgcgcactaatgaggcagggcgcaaagcttcaggtaataaaggtaataactggattggggggcagcagcgaggaggtgccggacaacctgctattaagcccacgcatgacctggcagcagcagggttcaatatgatgaacgacctgtctgtaaccagcacacaatctgttagccaaagcagttgtaatggcggtgcctgcagtaaatttagtaatgctgaagaggcggctaaggcagttgtgaaggtgttgggtgataaatcattacgaacctgtggcaatgcctctgaatgtaccagtggaggagagaatgagcagcctggttcatctgtggctggtacaggatttgctccattacttgaagaagcgacaaaggttaatacagaacaactggttaaactgtcaacaacgggtaaaaagtgggtcttccgcaacctgggtggaagaaaatcaatgaaactttttagttaa

SEQ ID NO: 147525 - DNA, 993 bp, Enterobacter cloacae
gtgaatcagcctccttcccgactcagaaaaacgttctgctctgccgctgtcgccaccgttctggccacagcgtcaatacctgcagcgtttgctgcgctgaatacggcacagatagtggccagtgcagtgacgcaggactgcattagttggcgggtaagcggtatctgctactggctgttctgtactgcattcggctgcaccgtaaaaacctctgtaaaggtcacccattttattccggaagcggtggtttcgacctacgttgcgcccggaggaaatccctggacagagatggcttttgtcagccagacggcgggcgggctggaaaatgccgttactggcgctttgtcaggggtaactgccggcggtgctaatccggcagatatgaagaacccggggcagcgtaaatccagtattcgcttcaaatacgccgatgccattgggcatccggccacgtctcttatcggtggcagtatcgccgggtattcctgcgacagcgccgccactcccatgatgccgtatttcctcagcacgctggactcgattgcctggcgaaccggtgtgccggaatcgctttatcccgaggcactggtccccggccgacgagaagtcggtagccaggtatccggcaacatgtggggcaacatttacccgcgctccgggtttgtcagccagaccgatgatgacaaagcgtcggcggtggtggcgcaacgtgtggcagacattatcacccggacaggccagccgcacgtttatcaggtgctaaaggggacccgacgcgacgggtactggccaccgggagaagtcacggaaaacactggcgctaagaaccataagtggcagcgtctggcacctcagatgactcaaagctgcgcggtatttccggacgggagccacagcgcggctactgataataacgaggcctttgcgctgtggcagccctacagctgctgcaagcgtatggggcaaagattcctgagcagcactgatttttga

SEQ ID NO: 147526 - DNA, 402 bp, Enterobacter cloacae
atgaaattacgcaattttctccttctgccggcattgttgccggtgtccgttctggccggcacggtggtatataccgacagccagcacttgcctgaaaatatttccccggatgtcgtggttgtgttgctggatgaaactgaacgtctgcaggcgaaagtgtttggtcagcttccggctgacccggagctggcagcaatgcaggccaggcaggtgatgtcctcccctcagtggcaacaaatgcagcaacaactggtcacggcatatcggcaggtagtgcatgcccgggaactcggtatccgcaaggtgcccgctgtagtttttgacgatcgggaagtggtttatggcacaactgatgtagcgcgggctcaggcactacggctgcaggcaggaggtggtcagtga

SEQ ID NO: 147527 - DNA, 4050 bp, Enterobacter cloacae
ttgcgggataaaatggcaggcatctggggtagcgcacagcaaagcggcgcaggtgatgcgttgcgcggtgcggcgaacagtgaagtgaatgccgcattaacgcaggaagtggaagcgtggttaaaccatactggcggcaaagcccgcgttacggcagatgtcggtatcggcgggagcgataatcgcgattttggcctggattatctgtggccggtcaaggtctggcaagacgacatcttgtttacgcagatgagcgcacatcgctggaacgagcgtgacattcttaacgtcggcctgggctggcgtcacacttttaacccgcatttgatggcaggcggcaatatctttttcgatcaggatgtcacccgtcatcataaccggatggggcttggtggtgagttgtggagcgatggcatacgtgcgtcggccaactactattcgccgctgagcggctggcgtcattctgacgacactgtctttaatgatgaccctgaacgctatgagctgtatgagcgtgccgctcgcggctgggatatcaatctggagaccgcgctttcacagcatgttgcgctcaaaatgggctggtttcagtggtatggcgataaagtggatgctaacggcagccgcagcgaggccagccgtaatccgcacgggctaaacctggggctgaactggcaacctgtgccgctggtgggagtgagcgctgaacagaatatgatcagcggccagcgtgataacttctccattgggctaaatttccactgggagtttggccgcaagctgtctgagatgctggcaagtgaaaatgcgacggcgttgccctcgttgatgcagtcccgcactgagttcgtcacccgtaataataatattgttctcgcctataagcaggaagaaaaagacagacgactctatttcagcccaacggaaaaagtgacacaggcaggtgtgcctctgcttcacgcggtgaaaggcggacagggtggtgtcattcgctatacctcgtctaatacagcaattgcgacagtagaggctgtcagcgggctggtaaatccaacgcatcggggagatgtcaccatcaccgcgacggaaacgtctcctgtcgatcctgagcatgtgttgagttccgccagctatcacctgaccgtcacgccgggtgattttgccccctctgttgaaaatgtaggtattgatggcggaatgtcgatcggcaatctcctaacggggtattacacctataaaaataacgagggcgaagatgaagacaaggaaaaaacccaacacagtatgcgctggtacgacgaggagtctggcgaattgcttgaggagcatagcgcaacgtatacggtgaaggcgagtgatatgtcccgcagcgtggtttttgaagtcacaccgatcaataaaaaagatgtcgcgggtacaagtggctcggcaaaagttactggtagcgcgacaatttcggctctgcgcatcgatcatctgctttcaccgggtgagatccgcaaggatggcagcgtgaagttttttgacgagggacacggcgcgatgctgctgcttgctgaggtgaaagacgggcaaggcgcgttgctggtggatcagatggtttactggcagagcaagaattcgcttggttcattgtccaaaaacagtgtgcgtaccgatggtaatgggcaggcgctggtaaaaatagaaaacatcatggcggacgggcaggacgaaatcacagcttctttaactccgccaaacggaacgctgagcagtagtacagccagcggcaatatcgttaagcacgagacaatgcctctggttgttgatttttctcaccctcttggcatcagctttattgagcctcccaaacgtgccgaagtcgccacggagaaaacgttcacgattgaagtcaccgatcaagatggtgagcttctgacagtagataaaaccgtaacgtggagcagtaacggtgaaaccctgagcagcaagacagatagcggcagagcatttataacgctcaccgcgccgcaaaaaaccaccgagaaatgggttgttagcgccacagtggataccgtcagtaactctgccgaaccggtaaaacttgacccaggtccggtggccaaaattgagttgaaggttccagaaagcgtggttgcaggcagtgcggatcaagaagtgacagcacaactgtatgacaagtttgataacgccatcattgagcgtaaagaggcggtaaactggcgcattgatggaagtcagttcagggaaacgcccagtggagacagcgataaagatggcaatgtgagcgcgatggtagtgatacctgaaaaagcgccatcgcagctgaaagtctacgctggcgatgaacagaaaatcatcaatgtgaatgtcgggaaggtagatcatgtcgagcttaaaggtacgccagatacgctggatgccaatggcagcagtacctcgacgctaaccgccatcgcactggatgagcacaacaatagcgtgccgaacgttcccgtaacgtggacgctaaccacgcagcagtttggcgagctgagcaacaagattgaaaaaacggatccggacgggaaagcgacggcaacatttactacggcatctgtgggtggtaatgcgcaggtagaggtcgacattgacggtcaaaaacaaacgacgctgctgacgctcaacggcactccgtcggtgagcggtctgaaaatcagcggcacgccggaagccggtgagacgctggaggcggagtacacctttacggcaaacggtgccggtacggatgtctcgacctttatctgggcgcggcatgagggaagcagctggatgccgattgacggcgccaccggccgtcagtaccgtctgactccggaggatgcgggccaccgtatcaaggtggtggtggagccgaaagggaatgtcgcgggctcgaaagcgggtgcggcgcagccgagtgagcccgtggaggtcaccctgaaggccgctgccagcctgaccggcccggcggaggtgaaaggaaacgagggcgagacgcagcagctgagcatcggcggcggcaacggcggcgcactgaccttcagctcggacgacgaggcggtggtgacggtgaacggcagcggtctgctcaccttcagcggccacggcacggccacggtcaccgtgcaccaggcggcaaacggaaatatcgccgcgccggcagatctgccggtgccggtgacggttgccggtatcccgtcggtgagcggtctgaaaatcagcggcacgccgacggtggggcagaccctgacggcggagtataccttcacagcaaacggatcgggttccgatgcctccacctaccagtggcagtggaaggacggtgaggagtggaagaatgcggcagctacaggcaataaggcaaaatcatttacgctgccggacagctatgcgggctacagcgtgcgggtggtagtgacgccgaagggcagcagtcagccgtcgctgaccggagcggtggagcgcagtaccccggttaccattctgaaagagttgagcggcagcaatgtaacggttaattttggtgcaagcgcaaccacgttgaaaatctctggtggcagcggaaaagacagaacatttagcagcgacaatacacgcgtagtaactgtcgaccaggctacaggacggttgacgtttaaacagccaggaaccgcaagaatcaatgtgacggaaaagtccggtgtgaaaccactgctacttaatgttaccgtccgtaacgtgcgggtggcgaacttacgttcttatggcgaacgtatcgggggagggtttggcgcctgggagtactgggtaacggctacagcgaaaaacgatctgaacgaaaccgttgaaggagtgaagatttgtattcaagctaacaatacctcgtatgaaaagtggagcactggtaacggtgaagggcaagtctatatagactggcttcgcggcaacttcaaagctaaagcatggatttgcgatatcatcgatgactacaaaaacaacccactagagatctacgttaacgcaaaagacgttagcaatagtcaatag

SEQ ID NO: 147528 - DNA, 390 bp, Enterobacter cloacae
atgatgacgctgaagtatccggtgccctgtgtctgcggtagcgacaacccggataacactgttttcaccctgccgccacagggtgaacccgggatgtccgtggtaacgcaggctaatctgcaacgtctgggcgaacacatccgacagcgactgaatggcccggtgagcgttacctgtcaccctcatcgggtagggctgagcagctgtgtggcggttacggtggagggccgactccgcagagcggttaatattcttatcaccgttagcgggcagggaagctggccgacagaggaggagtatgaacatccccgctggtatatcacagtgatggacgcggctgatatggtttacctggtactgtggttcaacagcttttttaactcgctttga

SEQ ID NO: 147529 - DNA, 1842 bp, Enterobacter cloacae
atggatatgtttccggaaggaacactgctgtgcatgacaattgttgtgcagccgcaggacaggctggaagaacagtttaaccgcctgtcgaaaaatgccgtcggggagaataccgaatccggccgtgtccgccaggatgtgaaaacggtgaaagagtatctgggaaaccggcataagctgtatcgtgccgggatcaccttcctgctgcgcggtgatgatatggataatcttaagcgtaaacgtcttgatttgaccaccgtattgcttggggccggcctgcagccggttcggccggagtttgatgtggggccgctgaatacctggctgcgggcgctgccaatgtgctttaacccggacagcgataaaaaacactggtacacccgtctgacctgggtacaacaccttgcggggttgctgccggttaccgggcgggaaacaggtaccggcaacccgggtttcagcttttttaaccgcggcggcgatattctgacgtttgatccactgaacaagtatgatcgtacccagaatgcgcatctgttgttgttcggaccgacgggggcgggtaagtcggccacgctgtgctatgccttttctcagctgatggcggttcaccggccacgactgtttattgctgaagccgggaacagtttcggcctgcaggctgattattttgaaagccttggactttctgtcaacaagataagcgttaaaccgggtagcggcgtcagtctgccgccatttgccgacgcgcataaactggtcgaagaagggctggcagcacatgctgttgatgaaagcgacctccccgatattgatgctgacagcgatggagagggtgaagacgaggataagcgggatattctcggtgagatggagatttcagcccggatgatgataacgggcggcgatccgaaagaagaagccgaaatgaagcgtgccgaccgggctatgagccgtgaagcgctgctgatggccgcgcatgcaacatataaagaagggaggcagatgctgccttctgacctgcagaaagcgttatacagcattgccggtgatgacagcgatgaggggcagaatgtccgtaatgcccagcgtaaggcgaaagccgcagagatggcggaggcgctggggatgttcactcaggaaggcagctttgaggcggagctgttcaaccgcgagggggaattgtggccggaagcggatgtgaccctggtggatctcggtcatctggcgcgtgagggttatgaagcgcagatggcgctgaccatggtgtcaatgaccaacatgattaacaatattgcagagcgggatcagtatatcggccgcgatatagtcttcgcggtggatgaggcgcatattgtgacggttaatccactgctgtcgccgtatatgaccaaagtggtcaaaatgtggcgaaagctgggggcctggctgtggctggccacgcagaacctgaaggatttcccggatattgcggagaaaatgctgaatatggcggaatggtggatttgcctcaccatgccaccggaggaggtgaaagacatcagccggttccgcgcactcacgcctgaacaggaagccgtactgctttccgcccgtaagctgtcaggttgctataccgaaggggtggtgctggccaaacgtattgaggcgctgttccgtgctgttccccccagcctgtatctcgcgctgggcatgacggagaaagaggaaaaggcggaacgccgggcactgatgcgcgagcatcactgtagcgaactggacgcggcgaagctgattgcctgcaaactggaccggttgcgcggactgactgacgcacacgatggggagagcacggcagcatga

SEQ ID NO: 147530 - DNA, 1023 bp, Enterobacter cloacae
atgttttctcttttcggccgtaaaaatgaagtgaaatccgatggcacggcaggacagccagaggaggagggctctcctctggttattcatggtcgggagccactgacgcgaccgggccggatgacccggcaggaggaggcaaaagtgtatcacgccagcccgtccatcattgattatctgccgtgggtggaattcctggatgaagagcagtgtcttctgcttgaggacggtatctccgtcggtgcggtttatgacgtcacgccggtggccacggaaggacgtacggatgaccgactggagcagatccgcgatacggtggaagatgccctgcaggacagctttgatgaatatgatgagaatccctgggtggtgcagttcttctgtcaggatgaagatgatgccgaagcgtatctggaccacttacggggttacgtgaaaccgcatgcgcagcgcacggcatttactgaggcctggctgggtgaaatggcacgtcatatccgcagtatctcgcggccggaagggctgtttaccgatgcgctgatcaccggtcagccgtggcgtggcctgcagcgtcgcacccgtatagttatttatcgctggatcgggaagtccgcgtcccgggacccgatgccgccggtggcgatgctcaaccaggcgtgtgaacgtgtggtcagtgcgcttggcggggccggtattcgttgtacccgccagaatggcctgcaggttcacagctggctgctgcgcctgtttaacccgtctccggactgggtggacaaatccaccctgtatcatcaggcggcgtatgccgatccccgcaacttcccggcaggcgtggcaccggtcagcaatgattttgctgaaacgctgtggtttacgccacccgtttcggatccggaaaacggcgtatggtggatagataataaaccccattgtgcgctgccggttgagagactgcgtacccctccggagccgggtaccatcaccggtgagcaggcccgcggtgagaaaaaatcaacgcactga

SEQ ID NO: 147531 - DNA, 399 bp, Enterobacter cloacae
atgctggccgctctctgcctcgctgttctcctggccggctgttccacgtcaaaagaagagatgctgccgactggcgatcataccatgcttgaactgtggagcggggcagacggagaagggggaaccacccgacagtccgctgttgcaagggacacgctgcggcgcccgttaaccgacgatgaacagcggaaaggtacacaggacgatcgcagctacagccgcacgcaggagagtgaaatttcacagcagttctcccgtttgcccaaccccgatatggtgatgtacctgtatccccatctggctggcggcaacacgccagtgcctggctacagcaccgtatttcctttctacagccagacacagtatgcgatgcctggtgaacgtacggaggcgctgtaa

SEQ ID NO: 147532 - DNA, 1506 bp, Enterobacter cloacae
atgcagattaagtccaatgccatggtgaaattcattgttcccgcagtggtggtggcgggcctggctgtgggcctgaaaagctgtaagggagagcggtcacctgagaatgcatcgggtgatgtgacgacggtactgaaaaatctctcacaggatgagcttaaggcgctcggcgtggaaggtgatacgccggaagatactctgcgcacactgataggccggctgaacgacgttcgcgatcgccagaaaacactggataaacagaatgctgatttgctgaaagagaatgagcaactgcgtaagcgcggcacgaatgtatccgggcaggttgacgaggctgtgcaggggctgcgtaaggagtatgacaaacgtcagcagcaactgcagaacgaacagaccagcctgctggcaaaagtgcaggcactgtctgaacagctgaaaaccaccggcagtggttccgcaggcgcaaaaccggcttctgacagcgatattccgctgggcctcggtctggatggtctgggtggcagtacccatggtaccgccatccggggcgatgacgggctcatgtgggtgacgccaggcgatcaaaaagcagtcgatccacgcgatgctgccagtggtaaggcttcaccgcagtttcccacctcctttctggacaacaaccctctgacccggcagaaagcagcctatgagcagcaggttaagggccacacgaacgagaagggggagcaggacagcgctgaacccgtctacaccctgccggaaaactccaccctggtgggcagccgggcgatgacggcgttactgggccgcatcccgattaacggcacggtgactgatccctatcctttcaaaatcctgattggcaaagacaacctcaccgctaatgggattgaactgccggatgtggagggggcgattgtctccggcagtgccagcggtgactggacactctcctgcgttcgtgggcaggtgaacagcatcaccttcgtttttgctgacggtacggtccgtaccgtgccccagccagatgccagcgggaaaaacacaggtaacggcaatacgcagaataaaaccggtaccgacggcggcatcggctggatttcggataacgacggtattccctgtatcagcggtacccgcaagtctaacgcgtcaacgtatctgccgactctttttgcgctctccgctgccggcgccgccggggaagcactcagtgaggggcagtacaccacgcagaacaatgttaacgggatttcatccacgctgaccggcaatgccggtgaagcggcgctggggaaagccctctcaggtggcatgagtgagaccactgactgggttaagcagcgctacgggcagacgtttgacgcgatttatgtaccgccgggtgcgaagctggccgtacatattacccgccagcttgccattgactatgaagataatggccgcagggttcgctacgatttcaccctcccgggtggtgtcagcgacaacggcggtctggattaa

SEQ ID NO: 147533 - DNA, 495 bp, Enterobacter cloacae
atgaaatgggagcgtatcccgttgcaaatcccgctgcaggtggggctggaacgggtggtatttgtggataaaaacgtccgggtgggttttcctccggcactcaacggtaagctgcgtgtgcagagcaccggcggagctgtctacctgaaggccgacagcgcttttcctcagacgcgggtgcagttgcaggatgtggaaagtggcgaggttatacttctcgatgtcaccgccggtgaaaaaggcccttccgagcccgttcgtctggtctacagcggagaggtgaacacggtcagtagtacagccgatacccatcgccaggcagaaaacagcggcagtggcattcagcctggaagtgatgatagtacgcaggcgaagcgtaaaaaggtacagtacagcgcccccatcccggtattgctgacccgttatgctgcacaaagtctgtacgcgccgctgcgtacggtcgaagccgtgccgggcatccgcccggacgcctga

SEQ ID NO: 147534 - DNA, 255 bp, Enterobacter cloacae
atgacaaataaatcaggtaccaacgggcattacggttatcttttcgaagagccggtagatgaaatatctggtgatatccttatcgatttagaaaatctaccgccagagttgaagcagactattctcttgctcgtgaaaaatgcagctgaccgtgatgcggcgcagaaggcgctgtccgacataatgaagcaaattgagtttgatgtaaccgctgctgaattggcagcatatctttttaaaccaggtcacgcttaa

SEQ ID NO: 147535 - DNA, 930 bp, Enterobacter cloacae
atgaagaagaaaagcagcacacccacaccccacgatgccacgttcaggcagttcctgacgcaaccggatattgcacgggattttatggaaattcacctgcccgcagaactgcgcgcagtctgcgatctcagcacgctgaagctggaatccggctcgttcgttgaggatgatctccgccagtatttcagcgacgtcctctatagcctgaaaaccacagccggcgacggatatattcatgttctggtcgaacatcagtcaacgccggacaaacatatggctttccgcctgatacggtatgcggtggccgccatgcagcgccacctggaggcaggacataaaaagttgccactggtgataccggtgctgttctatacgggtaagcgcagcccgtacccgtactccacccgatggctggatgagtttgacgacccggcgctggcaggcaaactctacagcagcgctttcccgctggtagacgttacggtcattccggatgatgaaatcgctggccatcgcagtatggccgcactaactttactgcaaaagcatattcaccagcgagacctggcagaactggttgaccggctggcgcccatcttgctggcgggatacttgtcttcatcgcaggttatatcgctggtacactatatagtgcaggcaggcgaaacatccgacgccgaagcctttgtacgcgaacttgcacatcgtgtgccgcaacacggagacgcacttatgaccatcgcacaacaactcgaacaaaagggtattgagaaaggtatccagcttggaagacaggaaggtcgttcagaaggtgagcgcgaagcgactctgaaaatagcccgtaccatgctccagaacggcattgaccgtaataccgtcatgaaaatgaccggtctgactgaagacgacctggcgcagatccgccactaa

SEQ ID NO: 147536 - DNA, 252 bp, Enterobacter cloacae
atgccaaaccttgatcgattcacacgccattttgcaacatacgccctggagctggcgaagcagtacgactgggtatatcacgtactcagcgacagtgagtggagcggccggcgtcagattcagccgcctgcgtcggtaaacagcatctttctgctgaaaagcgcgcttgatatcggttttgatgatgacgggaagcagattatgccggttccggccagaattggtggccgggctgacgggctgacgggctga

SEQ ID NO: 147537 - DNA, 804 bp, Enterobacter cloacae
atggacgcaaatgatcctggaaagctgatatggcatgtcgcctgcgatgagtcaggcatcgatggtcagcgattttatggatttggcagcttgtggatgaagtatcaaagacgtggggacttcgtgcgcatcattcgtgagcttagggaaaagcataactgtagcgatgaaataaagtggcaaaaagctcactcaaagcgaaatgctgctttttatcatgacctccttgaaacattcttcaagcaccaatggctggcgttccactgcatcattgttgaaaaatcaaaagtagaaaaatccttccatggcggcgactacgatctggctatgcgtaagcattttggcaagttgattgaaactaaaataggcaacgtcatcaaggctcatccagaaagggaatgcgagttccgtgtggaagtggacccacttccatctcggtataaaaaagctgatgaggcgtttgaagtcatcactaaccacacgttagcaaaaaggtttggccgcaaagatattatcaagagcgtcgtcactaaggattcaaaatattctgaacatattcaaattgcagattttcttctaggcgcagtgatgtgcgcctatcaaggcaaagcaacttcggaagcaaagttagcagttgcaaacaaagttgcgtcttatttgggatgggattcgcttatgtatgacacttggccaaaagagcgcaaatttaatatttggctttttttcgacagaacgaaaggaccaagggatatccttacgcgagatgtgaatttgaagtatgaattgcccaagtctaaaaaatag

SEQ ID NO: 147538 - DNA, 258 bp, Enterobacter cloacae
atgctgcatgaaaccgtgaaatcgattctgttaaatgaatgggattctattggtatcaatgagtttgaaaaggccaaggatgaatacgatgcatacgttgctcttatttgtcatatgatcgccgagggcaagagtgtctttgaatttcatagatttctctgttcggctattgatgcaatgggccttgatggtgatggtcaatccgaacaggtccttgctgaaaagctggcggctctcgttccggcccgtctaagctag

SEQ ID NO: 147539 - DNA, 654 bp, Enterobacter cloacae
gtgtccatcatttttaatggacactatcgcgtgaaacaccggacatggcttcttgaggtacttcgcctccactttgaagaaaaactgccgcgtattgaggccggacgtcggttaggcatccccaaaaccacggcctgcgatctctttgttcgcttcaggaaggccggtctgtcctggcctttgccgccacgaatcaatgcaaaaaatctggataaacgcctttaccgacagacatcccgaaaatcgtctgttcttcccgtagcccctgctccctgtgaaatcaccgtcacccgcaaacgaccacggcgtcccaacttcccccgcgacttcaaaatcgcactggtggcgcagtcgatgcagcccggcgtcagcgtggcacagcttgcccgcgaaaataacattaatgacaatctgctgttcaactggcggcgtcgttatcagcaggagttgtcagggactccggccagcacgccggcactgatccccgtggcgctgaccgctaccgaaaggccggtgagcccgctgacatcatctacggaagagtctccctgctgcgaactggttctgcccgccgggacgctgcgtatcagtggaaagctgacgccagagctgttgcagatgctcatccgggaaatgcagggagaatgccggtga

SEQ ID NO: 147540 - DNA, 294 bp, Enterobacter cloacae
atgcgcaacggcttaaatggccttgcatctaggatacagaacacattacgggatgacccgttcagcgggcacctgttcatcttccggggacgtcgcggcgacatgctaaaggtgctgtgggcggaccgggacggtctgtgcctgtttaccaaacgcctagagcgggggcgcttcgtgtggccggcgacccgtgacggtaaggttcatctgacgcctgcgcagctgtcgatgctgctggaaggcattaactggaaacatccgcagcgaactgaacgtcctagaatacgcatataa

SEQ ID NO: 147541 - DNA, 498 bp, Enterobacter cloacae
atggacaccttataccctgatgaaaacgcccggctcagggcactgctgctggagcagcagaccaccctccgcaaaatggcggagtataaccgtctgctctcacagcgggtggcggcgtacgccagcgaaatcaaccgcctgaagacgctggtcgctaagctgcagcgcatgcagttcggcaaaagctccgaaaagctacgtgagaaaacgcagcgccaggtgcgcgaggcggaggagcgcatcagcgccctgcaggaggagatggcagaggtgctgggcgagcagcatgacccggtccttccgcagccgctgcggcagtcttcctcccgtaaaccgttaccggcctcgcttccccgtaaacccgcacgctgtcgccggcagaaacagcctgtccggaatgcggcgacgaactcagcgtgctgggctgcgacgtatcggagcagctggagcttatcagctgcgcctttaaggtcatcgaaacgcagcggccaagactga

SEQ ID NO: 147542 - DNA, 1038 bp, Enterobacter cloacae
atgccgtcaaaacccatcgagcgcagctatgcgggtcccggcctgttggcgcgcatcgtcacggcgaagttcgccgaacacacgcctcactatcgtcagtcagagatatatcgtcgccagggtgtggagctgagtcgtgccacgctggggcgctggtccggtgcggtcagcgaactgctggagccgctgtacgacctgctgcgccagtatgtgctgatgtcgggcaaagtgcataccgacgatatcccggtgccggtgcaggagccgggcagcggtaaaacacgcacggcccggctgtgggtctacgtccgggatgaccgtaacgcgggggcacagctcccgccggcggtatggctcgcgtactcgcctgatcggaaaggcgttcatccacaacggcaccttgccgggtacagcggtatcctgcaggcggacgcgtacggtggctataacgagctgtacgaagacggtcgcataacggaagcggcctgcatggcccatgcccggcgcaaaatccacgacgttcgcgtccgtaccccgactgacatcacaaccgaagcgctgaaacgcatcggaaaagtgtatgccatcgaggcggagatacgcggcagtccggcagacgaacgactggcggtacgaaaagagcagaccgttccgctgatgcagtcgctttatgactggatgcaggaacagatgaaggtgctgtcgcgccactcagatacggcgaaggcgttcgcgtatgtgctgaagcagtggggcgcactgaacctgtactgcagcaacgggtgggcggagatcgacaacaacaacgcagagaacgcgctgcgtggcgtagctctgggccgaaaaaactggctgttcgccggttcagatgcgggtggagagcgggcagctgtgctgtactcgcttatcggtacctgccggctgaatagtgtagagccggaagcgtggctgcgttatgtgctgggtcatatccaggacttgccggtaaaccggctgcgcgacctgctgccgtggaaagtagatctcacatcgacttaa

SEQ ID NO: 147543 - DNA, 642 bp, Enterobacter cloacae
atgcttaaatttcatattgttaactacagtaaacgctccgcaagaataaataatttattcaaattacggaaagtcacttttaaagacaggcttggctgggatgtaaaatgtattaatggccttgaatgcgatgagtacgataatgaagatgcaacttatttaataggcgttaaggataataggattatatgcagtaaccgcttcatacccatgtcgaaacccaacatgattgaaaacacattttcattatgttttgatgacatttcaataccaattaataatcagattgaatcaagtcgcttttttgttgataaaaaaagggtgagtaaaataaaaaacaaagatttgatttgcaccttacattttatagcaatgatgagctatggaattatgcattcttatagtggcatatatactgttgttagtcatccaatgctaaagatattacagcgttccgggtggaatattgatgtaataaaaaaaggaaaggctcctgacaaagatgaatgcatctatattattttcatgccaactaccgaattacacagacagccacttattgagcgaattgacgaaagaatccagatgggcgatttatacaaatggccactatcatttaaactcacaacaatggaggaatga

SEQ ID NO: 147544 - DNA, 720 bp, Enterobacter cloacae
atgtttttttttgaaaacaaaatcattaattcagtgataacaagaaatttagccaatgctcttgctaactatggcccgctaaagtttgcatacactataataaataagagaaacatgtctgatatatccattttatcaaattacccaccagagtgggtttcttcttataaagaaaacggatttcaaaggatagatccagttgtgttgcaagcatcagtcactaactcaccttttttatgggggaaggatatccatgcaaacactaaattgataatgaaccgaatcttttcccaatcaaaaaaatacgacattgaaagtggatatacttttgttttacatgattataataaccatctggtaacactatcattaatcagcagtgataaaaaccaaggcaagttggtaaggggtatcagtgaatgtgaaaaagatatccaaatgctactcataaaaactcatgaagaaatggtatctttatataaagaaataaaagaaaaagattcgaaagaaaaagcttttcttactaaaagagagaatgaaattttatactgggcaagcacagggaaaacatatatggaaatatcaactattttagatataaaaaccccaaccgttaagttccatatggctaaaatcgttaataaaataggcgcactcaatgccaaacatgccattagcctggcaattgagtcgggaattatcattcctccattgttgtga

SEQ ID NO: 147545 - DNA, 891 bp, Enterobacter cloacae
atgtggtcacacaaaaaagtctgtttccgctgcaaaagccgctcctgcccgcactgtggcgtgaaggccggggaaatctggatacagtacctgctgagtctggtacctgacggggaatggcagcacatcacctttaccgttcccggagagttctggccgctgatataccacaaccgctggctgctagcggagatgagccgtcttgcggcagacgtcattctggaaaccggacggcgtgatggtttcctgccggactgtttcgcggtcatccacacctggggccgcgaccagcagtggcatccgcacattcacctttccaccactgccggtggcgtgactgacagcaacacctggaaaaaacggcagttttacgcccggaaagtgatgcccatgtggtgttaccgcatcacggacctgctgcgccgggaatactggcggctggacatgccggagagtctggcggcagaaagccgtacccgtcgcgaatgggggtactttgtggacaggcactaccgccggaagtggaacgtgcgggtgtcggcgctgatggacaacgccacgcatgtggcaatgtacttcgggtcttatctcaaaaagccaccgctcgccatgagtcgtctggagcactacgccggtcgtgacgacatcacctttcgctaccgcagtcaccggaccgggaaggaagagattggtgatgagcggaggcgaattcatggagcgtttttcctggcacgtgccggaaaagcggttccggatggtgcgctattacggatttctgagtccgtcaaaacgggatgtgctggatatggtgtacgtgctgacggaaaccgtgcgcagaacggcgcggaaaaccacctggcgggggctgtaccagcggctggtgaaagttga

SEQ ID NO: 147546 - DNA, 273 bp, Enterobacter cloacae
atgatcgacctgacggcagaacagcggcaattagcgaaaatagttcatgattacgccagccggtttcctctgacagaggatggtgacgcgcaattattgcagggttgttatgactacatggaggcgtttaaacgggcgatggacagcacatcaaaggtgcagatggactacatctgccagcaatatcctagatattttcgctttgctaaatggatggagcgactagctcagggcattgcggatggagttatcgaggttccgaaagatcactaa

SEQ ID NO: 147547 - DNA, 873 bp, Enterobacter cloacae
atgaaatttacagaaagtgatatcaaaaatataaaccagctttttgaagacccacataatgcaggctatgttctgaatttcacaaacaaatcaatgcgcgagtttttcgaatctgagctgtcaatcgatatagacaacgacatctatcggaaagatggcgactcaaaaatgaagcggttgcgttgccttttgaagcaagatgacagggaaacagttcttagagtggtcactcgactctgggaacacaggaaaacaatgcctgacaacgtgatcactgctcaggatgatgctgtctacggtagattgatatccaaaattcagggggcagacagtcttacagcagccggcaagacacccgcattgatcgtccccaccggcatcgataataattattttcttaaaggcttggaaaccctccataaccaaccgcctcaccaacggggtcacagctttgaattatggcttaacgaactatttaccgctttctatctttaccctaaaggcgcattcaggttgaagggcgaacagattgacggcagttttctgttaaataatgaaacctatcttgtggaagcaaagtggcatagcactaaaacaggaaacgctgatctccatgcatttcatggcaagctggatcagaaaatttcatgggctcgcggcgtatttatcagttgggctgggtttacaaaaagtggtctggatgcatgggggaggggaaagaaggtcatctgtgtcagcggttatgatcttgttctcatgttaaaaaataacatcagtttcagaatgttgatggaagaaaaaatcagacgggcagccgaaactggcaacttatatatcaagatagacgaaatttatccaaacataagcaaatga

SEQ ID NO: 147548 - DNA, 651 bp, Enterobacter cloacae
atgtacatttatgcgtatcttcgcgcgtcaacaattgagcaggatgcacttcgagcaaaaaccaggctgaaggagtttgctgctcatcatgggcaacgcatagctggctggtatgttgaaaacgcatctggagcatcgctcgaccgtccggaacttaatcggatgctgtctgatatggaatcaggtgatgtaattctgattgagcaggtagatcgtctttcacgtctgagtgatgccgactgggatacacttaaacggcggataatcgaaaaagaactttcggttatcagtctagatctcccaactagccatatagcgcttacccatgctgcttcagacaactttacacgcagcatgctcagggctgtaaatgggatgatgctcgatatgcttgcagctatagcacgcaaagactatgaggatcgtcgaaggcgccagaaagagggcattgaaaaggccaggcttgagggtaagtatgcagggagacagccggacatggccaagcatgaacttataaggacattacgtttattgaacggtaaatcattaaatgagacagcgcgtcttgcaggcgtttccaaaatgactgttattcgggtttgtaaaaacagtcagactgggcaggctacaatttacggtaataaagaatga

SEQ ID NO: 147549 - DNA, 225 bp, Enterobacter cloacae
atggattaccgttctcttatgaaaaactcattcagcgaaatgagaaagtacagccgtcaaaccgttatggttactcagtccctaacatcctttggtcgatataagcctcggccagcctttcaggactggattgagcgccttaataaaaatgatcgcttgccccgtggtcgtttctttgctggaaaaaaacctggtcgtcgcctttcgatttttgatgaaatttag

SEQ ID NO: 147550 - DNA, 867 bp, Enterobacter cloacae
atgaccctaaaaattggacccatcggaaaacttatcgttgtatgcagccagaagggcggaatcgttaaatcgcagtcatccagtgaaattgcacatgaccttcgtaatgctggcttccgtgtgcttgaaattgacatggattggacaacaggtctgacggagagagctttccccgatgacttaccttatgaaattgaacgtgaacctttaagtaacagtttttctcctggcgaggcgaacacatatcagcttttcttcccggatacagaggttagacccattgaacttcccggcgggcgcttctttattggtgctaccagtgaactaaatgaaattaactatcgcaacagcgattgcatgttcgacttcagggaccgtattgaagaactgaagaagcagtttgattttattattgccgattcagcaccatcatattcgaatgtcatgatcgcagctcatatgtcagctgattaccttctgatacctactctgctggagaaacaggcccgtaatgcagtaggtaaacagcttgcctatatgcagaaaattaagcggaactataacccttctctccagtttatggggacgtatgtgacccagacgcaggtgaaaaattacaaaaagccgctcaaagaagggtacctggggcctatagatacactgaacctgaatctcctcatcgagatccttcagggtaaggggtactccgaagaatacattctcgcgtatatatcatttgtacctgcagctgcaaaagaggcgatcgagcttggtctatcctttgatgaatatgaccctaaatgtcttcctgcaatccagtataaagaacttacacagaaaattattaagctcgctggaggtaagtga

SEQ ID NO: 147551 - DNA, 1032 bp, Enterobacter cloacae
atggctaagaaaccgttcatgaaacgactccaggcgcagcaggaaatgaaaaaaaatgcgactgctgtacctgatatcgaacatgtcattgtaaacaaacagccagatgagcagagccatgatatagctgcgcaccagattatggcggatatagcacgcccggacatcgagccagatgggcagataatccgtgtagatataaatcttgtgtatgctgaagaacaagtgcgacctgaagaagacttcgatgaagaagttatcgatggtatgtctgacacctttgaaactatagggatgcttaccccacctcgttgctatcctcgtgacagacgtggttaccagatatggttaggcgaaacgcgagttcgtactgctcgaaaacgtggcgatacccatattgatatatatgttggtaaaccaccgcgggaaagaaaagaacgcatcatcggccagctcattgaaaacctgcagcagtctggtttgaaaccattagcgaccgcaaaatcgttctatgagctcaagcatcagttcaatatgacgggtgagcagatcgcaaaaacaatgggtaagcctacctcatttgtcagtaagcatcttcggctcattgatgcaccggaaaatgttaccgcccttctccgtgataaagtcacatccgatgtcgatctggcatacacactgatacaggtaaatgaaaagtctcccgaagaggccgagaagctagtcgcagctgcgcgggtgtctggtatttcacgcgcgcaggttaaagcggttcttgatgaagtgaagaacaaaagcaaaggtgagatttcgcatgcgaaatctaaggctcggaacaaaaagcctaccaagcctttggacagcaattcagatgtgaaaacctggcaggttgttgtcgagttagacggccagcaaggagtcataatgactgaccgcgcgccagacgaagcggggtatgtgtgggtgaaactggaaattggtgagatttcagttgaggcttctgaactacgcgtcaaagggatgcgctgtcagtga

SEQ ID NO: 147552 - DNA, 324 bp, Enterobacter cloacae
atgacctttcaagagcttgatgcttatatcgcaggctcaggcagacgttctatcgcttctgcattaatcgcttttattcttgatgcgcttgatgacggacaggacggagtagatcttgataccttccagagccatacgcgcttcgttcgtaataatgtaaccacggtagccagttacctgcagctacatggaattatccatatactgtattaccgtgatggtgctgcagaacgtcagtatgagtccgttaataattacgggcggtgggcaaagcagcactatcgtccttctgaggctcttatacagctgcatcgacgtgattaa

SEQ ID NO: 147553 - DNA, 954 bp, Enterobacter cloacae
atgaaaaaatacacaacagacatattatttaacagtcaaaccagagaggacgtgctgaaatgtattaaagcaggaatagatattaatgaaataaatgaatacggtatgaatgctcttttcttttgccgccatatgaatgctgtaaaagcaatgattgaagcaggcatagaggtaaatcatacagactatgatggtaataatgcattgtttagcaatcacaatccacaagtgcttgaattactgatccattcaggcgttaatattcagcataaaaataataaaggccagtgctgtcttcactggcagcgctacgacatagattgtgcggaactcctcattaacgcgggcgttgatattcacagtactgataacgaaggacaaacgcttctttacaacctccacgatcataacatttttgattactgggtaaataaagggtctgacataaaccacagagattataatggcaaagcggtgctggagcttccgactgacgacgagtggtggatatatgatttcagtattaatgccctccaacgccatgttgatagaatagacagcacgccagttttatttaaacatatttcatctgcggcgttgcctctgattgctttgcttcatgaaaaagggcgtaatatccttatcgctgaacactgtaccttcgcattatatgtcaaaaacatgaagtccttctttacctcactgaaaaaacataccgatatcagtcatgttcagttttataattgttatcatgacagacatattggtgcgtatactggtattgagacagtaaaatggcttattcgaaatggtatccgagtggacgacgatatactgagacagcgtgctgactctgataaagtttttgactatataaccggaagagagaaaaaaaattttctcaaaatcatgaaaccagaaatcatccatgcaccgaagagaaaaagaatgtga

SEQ ID NO: 147554 - DNA, 441 bp, Enterobacter cloacae
atgaaaaaacaaaatcactcgacactaacaaactatcttgctaaaacaaataaaaatgcagatctctacagattatataatccacaacattctgtatttagcaaaacagccaatgaagaacaggatttttatttccgctacttctccaggcatatgattactcagagaaatatcttaacccttttttctattcatacctttctctcttacaacataagcaagaaagagacaattaaatcatttgttcattttctcagaaacgtcaaccgtgataccttcaacaatgcattccagtttcgcgggtgtaatatcatttaccaaaacaagaaaagagaagtaaaagagatctcatggttttcattttcacgagtctatgacgatatcgtaaaaataaaagagtatgaaaccaacaacaacacttacaacaaacttgtagcataa

SEQ ID NO: 147555 - DNA, 435 bp, Enterobacter cloacae
atgagcatgcagtcacgacaggagatagggacacaactttcgtttgccctctatggtgcggcgagccgcatgaaccggttacataagccgatgctggacccgctggggctaacctttccccagtatctggtcatgctggagttgtttaacggaaccccacgcaccgtgggtgatatcgggaataagctcggcatggataccggcaccattaccccccttctcaaacggcttgaggctgccggacgcatagtgcgcatgcgggatcgcgctgacgaaaggcgagttctcattacccttacggatgacgggctcgctttgcagagcgagctgtggcgcgtaaccgaaaaaatcaaatcagcctgtcagttatcggatgcgaagctcgaggagttacgagataccctcaataactttgcccatcccgctgatagctga

SEQ ID NO: 147556 - DNA, 735 bp, Enterobacter cloacae
atgaaaataggcattattggcgctggaaatattggtgcgactctggcacataagctctctgtgcagggccatgaggtcaaactggctaactcaaggggaccggaaacaattgcagagttggcgcgaagagcaggggcactggcggttgagcgtcaggaagccgtacgagatgtggatgtcatcatcctctctacgccctttgataagcatgctgaactggctgaactcttgcgtgatgttccggaaagcgtgatcgtcattgatacgtctaactactatcccttccgcgacggagacattgaagagatccgtgaaggcaaacctgaaagcgtgtacgccagtgaaatagtcaaacgccctcttgttaaagcctggaacgcaattctggccgagacgcttaaagataaagggctggttgccggttcaccctcccgtatcgctattccggttgcaggcgacagtacggtagcaaaatctgttgcacttgaactggtcagtcagaccggtttcgatgcagttgatgccggtacgcttagcgaatcatggcggcaacagcccggcacgccagcttactgtactgagctaaaaaccggagagcttgaagcagcccttaaggcagcggataaaactcgcgctccactaaacagagatgcgttgattaaggagtttatgtctgcaggcgaacaactcactcatgatgccatcgttaaacgtaaccgtgcagtaacggcctga

SEQ ID NO: 147557 - DNA, 765 bp, Enterobacter cloacae
atgattaattacgaaaagtaccggattgctgttctgggaaccggccatatcggtaaaacgcttgctcgcagtctcgcctctgccggtcactccgttaaggttgcaaattcacgtgggcctgaaacgatagcccccgacgtacttgaaacgggcgctgaagcagctgatgcagtcagtgcaatacaggatgcacaggttgtcatcctgtccatacctatggcaaaagttgcggatatcgcgcctctgatccggacattacccagtcatgttatcgttgctgatacgtcgaactattacccacatcgcgacggcatcattgatgggttctcagatggtcaggtcgaaagcgcgtgggtagcgcatctcctgaaccgtccactggttaaggcctggaatgcaataggttcagattctctcgctacaaaaggtaaagcagagggtacggcaggacgtatttcaattccggtggcagggaatatcgtagagcacaaaaaattgattatgcgtcttgtcagtgatacggggttcgacgccttcgatgcaggtacagttgaggagtcatggcgtcaacaacctggtgcaccttgctactgtactgacctcacatttgatgaaatgaagtcagcgatcgccgcaacggaaaaaacacggctgcctgcgcgtcgggatattgctgttcaggcaattcaggagcgaatgggcgataagcaatccaatccgactgcagattatattgtacgattacaccgggctctttttatgtaa

SEQ ID NO: 147558 - DNA, 321 bp, Enterobacter cloacae
atggtgataacgctgtacaacttcttcgagcatcagattaaaacgttatgcaccgaaataaacatactgcttccgcaggatatgagtgctaagtataaattcaatgatgtaagcattaaaaagtatcgtcaatttttgaggcgtgaagcctgttttgatatgaatcagggaaatttattgtggaaacgatgggaggatatgctgaaagtggaacaaatcaggcatgttctggttcactccgaaggtgagattgagaaacacagggcagagcggctagctgatatagaaaactactgtaagcaaaaaaaagtattaggttga

SEQ ID NO: 147559 - DNA, 471 bp, Enterobacter cloacae
atggctgaattactcacaaaagaagatattattgctttggttcagaatggattggaaatctataaagaaaaggaatttctagaagcctacggcatctttatgggcaaagcgcaattgcttgaatttggtctaaagaaagtgcttttatcaatgccaggcgttactattacctctgataaactggaaaaatacaccctgggtcgcacacgtgctgcattagaagacaataatttacgttctgattacattcatttattaaaaatattcgtcgaaaagcgcaacaatatggcgcatgatttcttggcagactttgctctcacacaacatattcttcagcagacaggattgcagcatatgttcatgggtgatttgttcagagccgcatatgaattagaacaactcatagtgctatttgattacatcaatgaagcaaatgatattactgcgtggctcgaaccagaagcgcagtaa

SEQ ID NO: 147560 - DNA, 588 bp, Enterobacter cloacae
atgcctatcggcaatacttgcgcagcaaacgcgctgcgcatatacaatttgggcttaccttttatcaaacgcttagactacatttcgccggccaaatttttggataaaagccatcattgccaaagcaacatcgagacatgcttaattaaaagtgctcacgcctgcatccccttaccccgtgccaggttaatcctgtcaacgcattccctaaacgctttgatttgctctggagaaagctcagattcatcaatgttggccagaagagcattgagggagcgctcaatatcattttttgctaaccgtaaacagataaccttaacccaacgtggcgagaacttgctgaggccgattgctcttgtgattcgtaatttcatgccatgcctctcaaccaccagtgtggaggttttcatactcgcttataacacgcattggataggccttctgttattatttcacctgcaagctgacaataggcattgcgcctgggaccaaccagctttcagcgaacatcaaatttggttgtccagcctgatgcgcaagcgctacgtcataccagagagttactggcttaacttatggcaattttaa

SEQ ID NO: 147561 - DNA, 1083 bp, Enterobacter cloacae
atgaccaatctcaaacataacctcgatgagctgcagcaaatagcaaaagaacgcacagtcaaaacgcaaactatcgaatatgatctggaaactttagtaaaaaaaataaaaagaaacgtcataaagcttaatcctgagtatcaacgcaaacaccgttgggatgatgaaacatcatcaagactaattgaaagtcttatacttaacataccgataccttttatctatatctctcaagatgttgatgttgatgaggaaatagattctgagtcatcacgtttctcggtcattgatggacagcagcgtctcactgcaatttataatttctttgagaataaatatcaactccaaggtttagaggttcttgataagctcaatggggcattccataaagatttacctccatttttaatgcggcgcctcgaagaaagaagcatcagatgtttgcgaattgactctacacttgacccacaagtaaagtatgacatctttgaaagactgaactctggatcggtaaagttggagtcacaagaactacgcaacgcaacatgcagagggccatttaaagacctcgtgaaagtattatcaaaaaatgaacactttaaattggcatgtaaattaacaccagatagttcccgcgtaaaaaaaatggaagatgaagaactcgtactgcgtttcttcgccataaactaccttgatagctatagggattacaaagggaaattcaaaaatttcctgactaataagatgaattcatttaacaatctacctatgaaacagttagaggaaatggaaaggttgtttaatgatacttttaaagctattggggaatctaatatagattatcctttcactaagtatcgggcaacacccggtggccttgagaagatgtctgattttaatgctgcagtttatgattcaattacacatctctttattgaaagtatgagaaaggaaacgcttgttacttccgaaaaaatactgggaatgtttttagacccggaattttttgcagcatgtgaaggtagtgtaaatgatgttgctaaattaaatacaaggattgataaggcaaaggaaactgcataa

SEQ ID NO: 147562 - DNA, 153 bp, Enterobacter cloacae
atgtctgggctgtttttaaaggtccgctttgtggctaaattaaaatgtccgtctgtgggttatgtttcagcttttgccaaagatttcctgacttcttgtctggagttgctgcagggcttcaagcatgtcgtcctggttcaggcttctttgtga

SEQ ID NO: 147563 - DNA, 162 bp, Enterobacter cloacae
atggtttttacattttttattattttgatatatttatatacaagatttgcgagcatcatttgtggaaatgtcttgtcaattttggcgatttttgtctttttaattgagatcttccttgtggtgatttttaaaaaaaatgcgatgcattatattaatctttaa

SEQ ID NO: 147564 - DNA, 1899 bp, Enterobacter cloacae
ttgttcattttaggccaaagcactcaaaatgactggcaggcagccaaaatgacagccaaccgaggcggtttcgcttatctttatgatgggcacgctaataccgttgtcccaaatgtgatggctcagcgcacaaaagaaattatcgggaaggagttgggtgcgaaccttaaaataatagcattgtacgaaaagattaacggtatggatggctcctcccctctgttcacatcctccatgggttctatgtttgcaaactataagacttgctgttatgcagattatcgaaatgggtatgtaggaataggatttaattctgacaaattacataatgactggggtgtttggcatgaattcggacatcagtatgagccagcacgtgaaagcttaaatcttttttctgagatacaagtgaaccgctactcaatagaagcctgcaagttgtttaaggggcatgaagtatcccttactaagtgccattctgatattgccgaagatgatgggaattgggataaaaaagcggttgaaaacttccttaaaggaaatatcgagtatcaagactacagcgccattaaggatcttttcaagcaacttagctttttctctcgcctgcgcttctcatatggagagaaatttttccccaaagttaaccagactcgtttaaaagctattcaggccgccccgggtaacaccttggcagataagactaactatcttttggggtcaaaagaaaaagtaattgactttagtgtagtagcctatagccaagctgcgggatatgatttacgtgaatacttcaaaaaatggggtttacattttagtgccacggccgaacgagaagtagcagaaatggggttacctcaaccgggtgaggaacaagtactgcaaataagtttgagccgagataaaatagcggctgtcgcgacttataacaccggttttgggtatagcattactgcaagaagtaatcaggacgatgttagttatcgctggcgacgtatcagcggagatccccgtatttatactaaaacccaagaaggtgccacggtggaagtcgttatccctaaaaatgttgagggcgtaagtacacgctttgaggtgatagctgaaagtctatcgggagaggataaaaagattattgaggtacaggcacttactcctgaggtaaaaataaccggtccaacggaaatttccactcacgaatcttctcagcttaaggcgctggccaactttgaccaggccacctatgactggagcctgaaacacaatggccagatcgtatccggtggtattgatgccagcggtcagatagcaaaaaacctgccagctggtgattacactgctgaggtgcttgccagaagtgacaaaggcggacgcaaggcatcggcagaatactccattaagatagaggaacaggcgcagaacaacgatcaggcatttatcagtgccctgaacctgtccatgcagtcaacggataacggcgacagcattacctttaatggtaacgtgacttcttcatctgccgcaaccagtagggcaaattatgcgtggactctgccatcagaagctcagggcggaagtaacggtcacccgcagcaacgcttcaccgtgaccaaaaataaacaggttcagaacctgaaagtaaaagttaaggttacggcaggtaaggaaatgcgtgaactggtgcgggatatcacagtacctgctcaaatagagaccggtcagtacccactctataagcccggtaccgcttataaggcgggtgatgtggtgaaaaacaaaaacggagatttgttcgaatgtaaaccatggccgtatacgggctggtgtggcagctcgtcggccctgcattatgaaccgggtattggccttaactggaaggatgcatggaatagtaaataa

SEQ ID NO: 147565 - DNA, 636 bp, Enterobacter cloacae
atgcactattgctacgctattatgaataagcgtgacacggattgcatgactatcgtaactaatttgccagactattttacagaagtttatttattaaatagttatcagtcagtcgaccctattattataaatgcattaaacagagtaactcctcttgtatgggatagcagcttgctaattaatgggcggtggcctgtaggcaagatttttgaatccattaaacctcatgatgtattaagcgggcaaacttttgttttacatgacccaaacaacaacctagtattattgtctttatatatcaatagatttttgaatcccaagcaacatgaactagctctaaactgcagaaacgagatacaagggattttaattgacgttcatgacatggtaatgcatatatatgctgatgagcctctccccccccaaaataatgacttcattctttctgcacgagagaatgagattctttattggtattgcgcagggaaaaattatgcggaaattgcccaaaaacttaatctaacagtgagcactattaaattccatatgagtaaaatcgtcaaaaagcttggtgtaaaaaatgctaagcacgcgattgttctggctatagagttagatctggttcatcggccgtaa

SEQ ID NO: 147566 - DNA, 591 bp, Enterobacter cloacae
atgaagtgtaggccagtaaaagattgtgaaattaattcagtaattgatttgcttacaaatgaatttttcgatgacccagcattaaaatacgctttcattgatgtcgatattgagaaaagaaaagatagcatgcgtttttttttcgatttatatacccgcttagctaaaaagaacgggggtgttattgttacagagggaattacgggggctttgatttatttcaatacactattcattgaaatgtcagaagatgaacgtatgataattgataaggagttgcgaaaagggtgtggtgatagttatgagtcaatatctaaatttatgaacggcttagacatgtttcatcctaataaacagcctcatatatatatttttttagttgccgtatccaggccttgcagaggggggcgtgttgtttcggctctattcatggaaatgaacagaatattggatgccagtaatttgccatgttatgcggaatgtaccacctatgctacaagaactttactcagaagatatggatactatgatgctgggtcccccttaaatatagaaggtttccctctattatatccaatttggagggggtga

SEQ ID NO: 147567 - DNA, 696 bp, Enterobacter cloacae
atgaagcaacaagcctatatggaggcactaaacagcaaaacaacggtgcgggttgatgcgctcagtgataataacagtccggagcgtggtagttcatccccagactatgcctcaattgcagagcaacttgccgccgcctcgaaagaggaaaacggagaattgtatgccaacatgcagcaaaacaaagaaaaatttgtgaatacagaacgtacctttggctactcaactcagacaagagaagccgcgttgtctcagacagaaatcaaggccagaatgattttaccggctgtacttgttacagaaatcaattctgatttaccaggattaattaccgcacagataaccgaagatgtgcgcgacagtttaacaggcagaaaaatactgatcccaagaggttcaaaactcatcggctcttatgattcacaagtagctatggggcaagagcgcgtgttagtcgtctggaacagagtccagttcctagacacttcaacacttgcccttggtaatatggggggaacagatggcatggggcaatccggctttaacgatgaggttaacaatcattatttacgcatctttggtaatgcaacgttacttgcgattattggtgcagggttccagctttctcaaccagacaataatagtaataacggtaacaatggtatgacggcagggcgggatcccacttttgaatga

SEQ ID NO: 147568 - DNA, 1092 bp, Enterobacter cloacae
gtgaatatcttcaaccacttatctgcaattccagacccgagaaaggacattaatgttaagcacaaccttcttgatgtgttatttctggttttagctgccgttctgagcggcgctcagggctggaaagatattcaggtctttggcgatgctcaactggagtggctgcaaaaataccgtgcttttgaaaatggcattccacggagacactgcattgccaatataattagcatgttagacacagacttgctggttcacgcccttctgggatggattaatgagcgacggcagtctgccggaaaatccatcattgcaatcgacggaaaaacgatgaaacgtgcatgggccggtgatatccataaagcgcttcatgtggtcagtgcttacgatgtcgggaacggtctgacgctttatcagcaatcttcggactgcaaaggtaaagagcgggaaacagcacgaaatatcatcgatatgctggctcttaaagattgtgtggtcaccatgaatgcccttcaatgccagacagaaaccctgaaccaggtcatttcacagcagggggattttgttgttcaggtaaaagccaaccagaaaaagctgtaccagcatgttaaggaagcatttgccagacattatgccagcccggaacttgcagagtatgtggaaaaaagtaccggtcatggacgtaaggaagttcgcagggtaatgcagattagtgcagaactgccagtgacgctgaaacagcgctggccccatattatcagtctgatagagataggcagtgaacgtacggtgaacggccagaccagctgtgatgcccgatggtacctgagttcattgtcagtagagccgaaaaccacagcacacataattcgcagccactggggtatagaaaaccagcttcactgggttctcgacgttgccttcagggaagatgagctcagtataagcgatacggcaggagccgcgcatatagcgctgataaaccgtgttgcactggctttactgaaacataaccctctcagggatagcataggcagcaaaagaaaccgtgcaggctggaacgcagacttcaggacggaattactgtttgcttaa

SEQ ID NO: 147569 - DNA, 1353 bp, Enterobacter cloacae
atggacagtggattcgtagatctcgatatacttcttacacgaattaggcatgcccagtcgaagacatactttcttgatgccgttaaggcctacaaagcgggcgcgttgaggggggcactaacctccgcttgggttgctctcgtctacgatctgatagccaaatatcgtgaacttagtgccatgggcgatgcagccgcgactgcatttcttaacacctgggacaacgcgactaaatcaggtgacatccctaaacttctccaacttgagggaggcattcttgaagacgcaacggccaatactcaggtagtcaaccggttagcccgaactcacctagaccgtcttcgcgaggataggcatctttgcgcgcatccggcattctcagcagaagcagatctattcgaaccttctcatgagttagtgcgacttcatttagtaaatgcagtggaattcgtcctatcgcaagaacctctacagggaaaagcaatattcgagttgtatgacgttgatgttcagtcgcccggctttcctacggacagtaaacgcattcttgattatgtagaacaacgttatcttactcgcgtacgcgctcagaatatcagtaacttcggcatggttctcgcaaaatcacttctcaaaggcgtgccagaacaatgggaaacgctttatcaccagattattacatcattagtcgccgtacgagaccgcgccagcattgcttggccaaacgtttcactgtcaattgttaggcttattgataatctagaaccacgacatcggcctagagcgatcgcatttattgccgcatttaatgagctttggatgcagcttcaggagccaacgcgaacagtcttgctagagactattgaaaatgccaatccagaaaatatcactgattaccgtattttgactggtgtaactttcgtaccgtttcaagcctcgctgcaaaggctaatagctggactaactcaacagcagttggcctcagcgatcatctttaacccacttgctgagctttgggataaggcaatagaatactatgcggaatcaggaagctggcgtggatctgaggggaactttatttctctcgtcataccattttctggtcgccttagtcagcaacagttcgaccaacttctagatgctatcatttccaatgggcagaattgggatgccgctgagacgcctaagcttctcctaggaatgctccgcaatgctttacccgccaacttaccaactatagatgcgcgtgctcgtttttatcatcacctagatcgccatcacagtattaataagtatagtgatgtactcacaattctacaaaccgacggctggcttctgccaccacctgaataa

SEQ ID NO: 147570 - DNA, 1545 bp, Enterobacter cloacae
atgccaaacaagagaatcaatatgcgtaaaatccgagatattttaagactacgttttgaggccgggctctccttccgccagatcagtcagtgcgccgacgtcagtactggtgctatccagaagatgctcaaacgtcttgatgccgtaggggtctcctggccgctaccagaggggatgtcagagagcaggctcgccagcctgctctacccggagtccgacagccgccccggtgagctcgaggatcctgactgggctgatatccacatggagctgcgtaaaaaaggcgtcacccgtcacctgctgtgggaggagtactgccagcgggtgccggtccgggcctacagctactcgcagttctgctaccgctaccacgcctggtgccagttacaaaaacgctccatgcgtcagcagcactttgccagtgagaaatgctttatcgactactgtggacccaccgtggcggttatctcgccggataccggtgaatgtcggctggcgcagatcttcgtggccgtactgggggcctcaaactataccttcgctgaggccacctggacgcagtcgctgcaggactggctgctcagccacgtcaggatgctggagttcttcggcggcgtccctgaaatcctggtgccggacaacctcaaaagcgcggtcagcaaggcctgccgttacgaccccgagctgaatcccgcttatcagcagctggcggagcactacctggttgcagtgatacctgctcgtccgcgaaaacctaaggacaaacccaaagccgaaatcggggtacaggtggtggagagatggatcctggcccggctgcgccaccaggtcttcttctcgctgtcggagctgaaccactgtatccgtacgctggtcgcggacctcaacgaacgtcccttcaaaaagctgcccggtaaccgcaggcaggccttcgaaaggctggagcggcccgcgcttcgcccgctgccggtgcatccatggcgttaccggcatattaaaaaagcgaaggtgaatatcgattatcacgttgagtatgagcagcaccactactcggttcctcaccagtatgttggccataaagtggaactgcatgccttcgataacctgcttgaggtctggataggtgaccagatgatagcctctcatcccaggcgcctctatccgggaagcagcacgagcgcagagcacatgccggagcgtcatcgccaccatcagcagtggacgccgggacggctgaaaaactgggctgccggcgtgggtcccgacacgctgcagtggatcagcgatcggctggcagaaaaggcgcatccggaacaggcctatcgcctgtgcctggggctgctgagcctgacacgtgagtatcctgcagagcgggtcaacggcagctgccagttggccaacagcgaagggctgaaccgcctgaagcagataaagtcgatcctgaaaaccaatcgcgatctcgttccgcggggcagcgaccagcatcagtcgccggagctcccccaggaacatgaaaacatccgtggcccacaccacttccactga

SEQ ID NO: 147571 - DNA, 231 bp, Enterobacter cloacae
atgccacatacgctgatgaaacaactgtctgagctgaaactgaccggcatggccaccgcgctgtcggtgcagatggaacaaccggggacttacgaggacctgtcgttcaaagaacggctggcgctgctggtctcccgcgaatcgctggagcgggagcagcgtaagcaaaaacggctgttacagaaagcgcggctgaggcttgaggcctcggttcacgatatcgactactag

SEQ ID NO: 147572 - DNA, 453 bp, Enterobacter cloacae
gtgctccggggtcagaacctgctgatcaccggtccctgcggctgcggtaaaacctacgtgggctgcgcgctgggcaacaacgcctgtcagcagggttacagcgtgcagtactggcgcctgaaccggttactgggcgagctgacgcacggtcgggcagacggcagttacagaaaacagctgacccagttgtcaaaaactcagctacttatcctggacgactgggggcttgagccgcttcaggcagcccatcgtaacgatctgctggagctgatggacgatcgctacggtaaaagcgcgacggtgatgataagccagctgcccacggaggagtggtacggcagcgtgggagataacacgcttgctgatgcgatcctggacaggctgatgcacaacgcccagcggctggatatgaaaggcgaatcgatgagaaaacgactggcacaggttgactga

SEQ ID NO: 147573 - DNA, 519 bp, Enterobacter cloacae
atggccattcacccagatccgatccagtgctttcaccgctgcggctatgatgtcgctggtatcctgcgtgggagtcatcagcttctcactggccacattcccgtaatacggttcgttcaccgcgaacggcgacgtcttcacaaatacagcaatatgcctgcagaactgccgctcgccgcgcagcttttcagctgcacgctcagcgtactgacagactgcctgccgcatagcttcatacgtcgtgacgcgctccccaaaggacctgctgcagacaatctgctgtttcggtggaggtgcttcttccagcgaaatacagctttctccgttgagttcccggacggttctctccagcataacgttgaaatttttccttataaatacagggttcgcgcgcgccagctgcagtgccgtagtgatacccatagtgcccaactttttcgaaattctccggcctactccccagatttcttccaccggctgcagggagagcagtttctccgttcgcttcggattgtttaa

SEQ ID NO: 147574 - DNA, 552 bp, Enterobacter cloacae
atgtggaatgcaaagccacgtactcctttgactaatgaatcattttgggggtatgttttatctatgggagctacggaaggtaatatgtatgctttgtggagtgcacgtgaatatctctataaactaagaaagtttggatatggcttgaaaaaaaacaacgtggatcctatagtcttcttttctgaagaatctcattattcaataaaaaaatgtacaaatattttaggtcttaaaactttccaagaaatgggaaataattgttacccaaatatgtgtcctataacagaagatgggagttggccttacgctattccagtcaataaatatggctctattgaaattgaaaagttatctaagttagtagagtttttttctcagtatggacatcaatctatatttgtatttaacatcgggtcaacattcaggggggcgtttgataacattcgagatatttggggggaaatatctaaaattcttgagaaaaatggtttttctattgaaacgggaaaaattccactccaaatttttggatgcatattgatggggctttag

SEQ ID NO: 147575 - DNA, 141 bp, Enterobacter cloacae
atgtgttttctggcggaagttattcaggatgtactgtgtaatttcctggatgcgcagtgggtgaagaaaacctatcagattgctgccaccgagcgaatcctatggaaaattaacagttcatttaccgcgaagaactggtaa

SEQ ID NO: 147576 - DNA, 315 bp, Enterobacter cloacae
atgaaagagtatcaacgcttctcgccggacagcgttaatggttctgacaatactgcaggccttaaaagaaatctggataaaaatgataataaaattatcgtcacaacgattcagaagctgaataacctgatgaaagcagaagccgacttaccagtctatcagcaacaggtcgtcttcatcttcgatgagtgccaccgcagccagttcggtgaagcacagaagaacctaaaaaagaaattcaaacgtttttaccagttcttcgcggtaaatgaactgttaattttccataggattcgctcggtggcagcaatctga

SEQ ID NO: 147577 - DNA, 2064 bp, Enterobacter cloacae
atgcatcgctctgtttctgagttttatcgcatcccccctctacttattcgtgcgctaaaaagcggagtcgcctccgtggtggagtttcatctcagcaggggattgccgaaagattcacgagattctctgggaaatagcccattgatgattgcggcccagaatgggcatttcgctatttgcgaaatgttgttgtgcgcgggtgtcgatgttgagcatcaaaacaacctcgggtttcgcgccagtgacctcgcgcaggagcaaacgctgcgtgatctgttagctcgttatcggaaatctcctccgtctgccgggcagcaactagcaggggggttagatgatgaggcaaacattgaggttgtaattgaagccgatgttgaaacagaactacccgaaaccgaagacgcaatggattttatgcagtgggatgctgaaatcgaatcggaacccgccgatgataatctgacattacgacacgcttccgctgaggctcagcgattgttatcccactatcgccctatagataacgcggctgagtggatcgatatcgaactctcgcttccagacccgccgacgccagtttctcactctccgcaaaattatccccatttctcaacgttgctcactagcgcactggatgccggtcgtgtctctgttcgtgacatccggtctgccggggaagatgatttcggcatgccgtggcctgaattccaggtcagcgtagaggcattgatcaaggacttacctttgattgtggatggcgatgatgctttcccggaaagtgatgcctgttgggaattcgcggcgagtgatgatctcgagccctggtttgacgctttcggtgcattgcggcagttcggcatcgttgaaaactatctcgtggatatccgccagtgggatgtcgtggataaaacaaaagaagaacgactcggccagcgcatggatacggcgctaatcaatctgataaaaatcctggcgggtttatccgaagcagaatatatgcagttgctgcagcccaattaccttccggcgccagcgcctgaggtttctgaagaggaagacgtcgcagaagaaacggatgaggaaatgcctcccgtatccgatgacgatgacgataatgatgaaactatcagctttatcgagctgctcgttctgctgagaagtgggaaagcaggcgagtatcaggataatcatatcccccgcccggagtatgccgacctgcaacagatagttgagcgcgcccgaacgctcatccctgatgaaggtcataaaataagtctttatgtcagcagttacagagaggcttgggaggggctgatccacgccaacttgcgtctggtcgtcaccatcgcgaataaatatcgcgggcggggattagatgtcgaggacctgatccaggaaggtaatctgggtttgatcaaggccgttgaaaaattcgattatcgacgcggatttaaattctccacgtatgccacctggtggatccgccacaagatcagccgcgcgattgccgatcaggcgcagctcatccgtttacccgttcacttctatgagcaattcaggcgctggcgaaacagtcgggatcaattgctgtatcgccaggggataacgcccacgatcaaacggctgcaagcattgactgaccttccagaaaatcaactcaagcggatggcaaaatatgaagaacagacggtgttgattggcgattttcatgctgacgcccaggacagcgaagcggcgctgtcgggagacgcgatcctgaccggaaaggatttcaccagtgctcccgttcagtctctcgagctaagagaatgtgtttcattggtgctggaaacgttgttgccacgcgaaaaacagatcataaaaatgcgttttggcatcggtatgacgcaagatttcacgctggaagaggtgggtaaacagtttgatgtcacgcgagaaaggatacgtcagatagaagccaaagcgctccgtaagctccgctatcacagccgggcgtcgaaattaggcggcttcgtcgaacagtgggaaaccgcgttgagcgagatgcaggaagaagaagaatga

SEQ ID NO: 147578 - DNA, 288 bp, Enterobacter cloacae
atggatacggcaacaaacagcagtgtcattgtgaatgattcccctgcggcaaggcgggcgggaatgagtgaaagcgagtggcgagaggcgatcaaattcgacagcaccgacacgggttgggtcatcatgagtattgggatggctatcggcgcggggattgtttttctcccggtacaagtcggattaatggggctgtgggtctttttgctctcgtccattattggttatcccgccatgtatttattccaacggttgtttattaacacgctggcagaatccccggaatga

SEQ ID NO: 147579 - DNA, 558 bp, Enterobacter cloacae
atgctttgccatcaggtcatccacatacaccttaagttccagcaccttgtcatccacatatttgcgggttgccagaaccacagcggggtcaattttcagggtgatgttatcggtgctgctggtaatcagtaccattcgcacggtctgcgtgcgcccgctcccttccgccagctgcggcttgtagctctcagggcagttaccgacggcaatcagagcgccggtgtcatcaaacagacctacctcacgaatccaccaaccgccctcagtttcggggatcacctgctcagcaataatctggctgctgttctgcggatcgatgtacagcatattgagggaagcgcggcgtttttcagcaaccagcgctgtctgctgcgcgcttggagtcggcagcacgccgccaccgtcgcccaccgccatctgggtaattttcaacgggacaccgagcgcggcggcgcttgccagtttcgccgcgccgatatccgtcagcagggtataaaattttgcgctcatggattcactctcattgtgtcaataacatggaccgccccgccctcgtaa

SEQ ID NO: 147580 - DNA, 291 bp, Enterobacter cloacae
atggcggttttaggcgtaaagttaactaaaagcagcaacatcaagcatgttgttagcgctttgctcttgatttgtggtcggatgggtgagggcgataacgtagcccaccttttcggcgatgaagcttccaaaatatccccctttgattgcgtccaggccttgcctgttcgtactgcaaaaatcctttctgaaatttcccgccgtggcatggcttttcacgttgcgccacacagcggaaaacacggcattttcattgccaaaaattacaaatctctggaaaagaacacgtga

SEQ ID NO: 147581 - DNA, 522 bp, Enterobacter cloacae
atgcacgattttgcgctggtatttcgtcatgcctgggagctggcaaaaaaaggggccgcaacttacggcgggtctgcgcgtcaatatttccgtgagtctctgcgtctcgcgtatgacggtttgaaaaggaacgtaacggcacgtgaccttgtgaaaataatgattaatcgcaggctttcagtaagccagatatgcgaagaggttaacgccagatttcagcgccaaacggctaagaatatcgctcgtcgaatctggaatatgtttcgatccccatatgtggaaattgaaaagaataaatgccctgagacagggaaattcctttatcacctgaaaaaagcacaaaagaatttctttgttagcggggccattactcgcgcattgaaatctgtcaggccagaaaaaaagaaagcagtgaaaccacgaccagccatgtcaaaagaagaaataaacgcatgcaggctggctaacgcattccataacgcgctgcgaactggcgtgtacgtcgaaccgaatttaatttga

SEQ ID NO: 147582 - DNA, 723 bp, Enterobacter cloacae
atgaaaagagcaacgcagattatccagtttcgcgcagatgaagacacttacgcccgtgcgcaagagcgagtgaagagtggtggtttgctgctgcctgacgtgatgcgcgcggcgctaaagtccgtggctgatgcggacgtctcgcctttggctgacttaatcaacggcgtttcatctggcagcgattatcttaatcaggcgtggctttttcaaaagtgtcacgaattatttgaataccgagacggcggtcttttccgtaaatccagaaaaggaatgggtgagaaaggtacgccagtttacgttagaacgcgtgagggtgaggagtgcgttttaattcagggaaaccattacccattaaaagatattgtctggctaatggcgaacggaagtattgccggagaggtggagtataaaaacccgcacaggttaaacatgaaacactcaattgaaaacctgatggtaaatgccgcgccagaaaaagaagtgtttctaacaaagtatttaaaaggatctgaaaagatcgacgttattaaatcaaaacaacgagcgtttgttttcgacacgtctaaagatgaaaacgcaaaaaaagtaattgagaaattaattaacacagaaaaaacagtgccgctacttttgcgcggggatgacgactgggttgcatcacgaacagcgattcacgcctttaagctggctgataaccaatacgttctaagcatttcataa

SEQ ID NO: 147583 - DNA, 486 bp, Enterobacter cloacae
atggaattcaccaaagagcagttaatcgcacacatcggcaaaatgacgctggttgctaatgaagtaattgaagaactaccggaggcgtacgcgctacgcgcacgccgggatattgccgtgtacgaaatcgcactggcagcactaacggggtcatcagcggagcgcgaacagattcggcacaagcatgctgagtggtcacaatctgcattcggcagtgttggtccggtcgggccgcttaagcatctgtcacaggaggcgttggaagccgccgcagcgccagaagatttaagcgagtgggctgacatgcaatttctgttatgggatgcacagcgccgcgcaggtttaagtgatgagcagattaccctggcgatgattgaaaagctggagataaacaaggctcgtcagtggccggagccaaaagacggtgagccaagattgcatatcgcagcagtacctcgacaagaaggtggtagcgatgctgagtga

SEQ ID NO: 147584 - DNA, 2115 bp, Enterobacter cloacae
atgacctgcttattcgcaccttccttagtaggcaagcgaatcgagtcacttgatattgatgatttgcctaaagattacctttctcaaggtgatttgtgtgtgcatcttaatggtgtcatagataaagcaacaatcgcagatcttgattctaaaataaaactaacaaactcatcttatctttctcctcaatcatttttaagctctcaatggaattatgtatttaaaagagatcttgagacagctagtgcagtgatctttgttggttattcaatgtatgatatggatgtgcaaagattgctttatcagaccgatagccttgttgaaaaaacttattttattgtgcatgaaaatgctagtttccaagaaacgttctttttaactgactttggtcatgttttaacagtgggtgtcgatggatttgctaagctaataactgatatgcctgttcctgaaaatcaggatgcaaaagatttatctttagattgttttgagcttaaggggattgattataatcacgatactattacagatacagaaataaaagattttttactttttggtaaacatgatgataatcagattaatacatctgtgagtaatgattttgttgataactttttaattaacagagagcttctcaacgatactataaaattaattcattcacggaataatgtacttatccatagtgagttaggaaatggtaaaacaatatttctaaaaatgatcacgtatttactttctcgtgagggttataatgtatatactttctgcgaaagaagtgagttcgatgacgaattatcagagattgattggattgtaaaaaataaagataatgtaattatagtcattgagggttataacaaggctgaaagactgttaaatcatattaatattaactatcctgatgatgtatgtgtcataatcacagataggagtgcggtagcattaagaactgcacattttattaattcattaaatattgaattttctgaaataagtttggatcaattgactgaacaagaaatttcagactttgttgatttaattgagaatcaaggcctttggtctgaactaacgtctctatctaaaactaataaagtaaagaaaattagagaggattataatggtcagatttcaggaatattattgggtttgcttaaaagtccgtcaatccaagaacgaataaagtccttaacggatgagttgtttaaatctcaggaatttaaggatacagtctttgcaatcgcgctatgtgatataattgatgtccgtaaaacatcttcaatcatttctgaaatcgcaggtaataatagtatatataaaatgaatcttaggtccagtgaccagtttaagtcgctgtatagatttactgagaatggcactgcaattgaaacaaaatccagtttgatgtcattggcaattattaataatagttttaatgagagttatgtaagacataagcttttatcaattgtaggtacttttaacgaactcagaaatgtaacttatgatgcaaacaaaattttcaagtctttgcttagatttcatgttttagaaattttgctaccacaaaagcaaagagcattagatagttattatatggaattgaaaagagtatgtccttggttaactgactctccacactattgggttcaatatgctatgtgtaggttgtcaataggagatttagattcagcgcagacctacttgaatgatgcttattctttagcaaattccaaagaagattatcatactgagaatattgatactcagcaggctaggcttttaattatgaaatgcttaaaagaacatgatccagctaagtgctttgatactttctttgcggctcataacattttaataggtttacctgatgatgggtataaatataggcagattattccctataaagaagtctatgaattaaaatataagggttttaataaaggaaataaggttcagtttgagcatgcctgtaaagctttactgtcccaagtaagtgctgtagattatcatcaagatgatcttacattgattaaaagagtatctttcattaatcgtagtaaggttattttagaagaaattgttcaagatattatttctaaaagataa

SEQ ID NO: 147585 - DNA, 1200 bp, Enterobacter cloacae
atgtggaatgatgttgaagcaaaagtagatctcttaaatttttctcatgtagctgcggcagcagcacaattaatcaaagactcggatggtcaacctttgacaataggtgtctctggtaactggggggcagggaaatcatctttagtaaagatgattggccaaaagttgggtgatgcacctgatggaagggagtatatttttctggagtttaatgcttggctatatcagggatatgatgatgcaagacaggcattattagacgcggtcgcagataggctgttagttttagctaaatcgcgggagaaaaacattgataaagtctatagcttcataaaacgtattaatcttcttaaattgggtaaaatccttgcacctataggtattcatgcattaacaggtggagcaataggtggtcctgttggcgccatacttggaacactgagtggaatagctcaggctggaaagattgctgagtcagatgtaaaagatatatcttcatcctataatgacctaaaaccagatattgctggtttattaaaagaaaaaagtgaacaatcactgccaaaggaaattgaaggattaagaaatgcatttgctgatttgttagtagatcttgatgtcactctagttgtacttgtcgatgatttagatcgatgtcttcctgatacagcaattaacacattagaggcgatgcgtttattattacatgtggaaaatacggctttcattattgcagctgacgaaagcatgatacgtagcgcagttagagcacactttaaagacacggaaataaataacgatcttgtcactagttattttgacaaattaatccaaataccacttcaagttcctcggttaggtacaactgaagtcaaggcatatcttatattattgttggccgatctagcatatagaagaaggaaaatatctgaatctgttttaaaagtagcacaggaaaaaattcttcttttagcaaagataggatgggcaggactctctgtaaaggatatccgaaatgcattcggaaatgaatcggataaaatttctagagaaatagatttggctgatcagttagcaccaataatggcaggtactgagcagatctctggcaatccaagattaattaaaagatttctaaacaatttagttatacgagaaatgattgcaaaatctcgtggaatgaccattggattcgaataa

SEQ ID NO: 147586 - DNA, 813 bp, Enterobacter cloacae
atgggtacatctgcttctagcaccggtcccggttctaacgtatcgtttgatcccccatggttgaacgatattcctattggtggtggagaagaaggaaataaaaattctgaaacttcccccacaggtacaccgggacttgcgccaacggctcgctttagagctgcacgtagaaatatgggagtatttgttcgcaatggtgatacaagagatttagctcgggctgctggtcattattccagaacaggaatgggtggcgctaaaaatgtagcttctcgaatgagaacttcaacgagagccgcagctggacttggttcatttttgcaaagtgttagagacagaacagaccttcaaataaacaattggatggatgacttacgtgcaaagaatccatctgctcaaactgtaattgatgcaatagtttcacaaattattcctgaaggaggaagtcgagatgaagagtcagcaaaagactctatggctcaagctctctccgagttgatagatcttaatccagatattgatttattagagttaaatgattctcaaatatggactcttatgcaaatttttattggacacgaagcctgtaatcggatgtatgcagatattggccaactattcgaaaatgcaaaatattccccagcaaaaatggttcagagaacaaatgaaatgagagggtttctaaaaaactctgttgctgcgcagttagagtcaatgcggcagtcattccctaatccgacgcatcaacagttagaggttttattaaatgatgctattcagatgacttttaatgtttttgagggtgaaatatga

SEQ ID NO: 147587 - DNA, 1269 bp, Enterobacter cloacae
atgaatagagttatttgtttgccacaaaacaaaatccctagtactctacagaataatgcaatatattattcaatgtttacacattcagaatttaaaggtgttggaagtatcgcaactggtttattagatgatccagtattgaaaaaattaaatccaattttagcggcatgggattttatgacttttgctcttgctgttaatgcggcagatttagcgatcaaacgatctaacagcgcagatggttggactcgaattatagagttagaggtggcacttcaaaatgttaaaccctatattataaataagtcacttatcgaggaaatgctacgctcgctgacaggggatttctggcatttgacattttctgaggggggcttaccttatccaattcatccagagccgatacagtttgatgcagattgtgtatgtttactctcaggagggatggatagtcttattggcgctattgatctcactgctcaggggagaaaacctctttttgtctctcagctggtaaaaggaaatcgcgaagatcaatattttttggcaaaagcgcttaaagctgaaaaacgacacctacttttaaatagtaatattcgatctcctgtaaaaaatgaaatatcaacaagagctagatccataatattttatggctttgcagcgttagctgtatcagtggtaaattcttcagagcctataaatttgtatgtcccagaaaatggatttattagcttaaatatgcctctgagcccagctagaattggttcattaagtactaaaaccactcatccagtttttcttagaaagttacaacaactttttgaagctttgaatataaatgccaaatttgtttccccttatagatttttgacaaaaggagaagcaatgcaacaatgccttgatattcccttaatgaatcaattgatgccaaaaacgactagttgtggcaaatatggtcgtttaaacgaacactgtggtcgttgtttaccatgtcttgtcaggagagcggcttttttcaaggctggtattgcagatccaactcccagctatcgttataaggatcttaaaaagggggctcctagaggtaatgctaatgatacccaagcagttgcaattgcttatcttcgttatctttctgatggtatagactctttaagtgctggatctttatctttctctacagcttctgagagaaataaatttaaacgagtattagagtcagggattaccgagttaggtgtttttttaaaaagtgagggggtcatatga

SEQ ID NO: 147588 - DNA, 753 bp, Enterobacter cloacae
atgattgatttccataatcatcttgatctttacccaaatgctttatctttgctggaaaaggtagctagaaataatcattttatattagctgtaactaccagcccaaaagcatgggttgcaacttctaaagttttttatggatattcgaatataaaagtagcactagggctacatccagaaattgctgatataaaatactccgaactagacttaatgataagtcttattaaagattctgagtttattggtgaaataggcttggatggttcttctcgttataaaaactcttttaaaaaacagaatgaaataatcagattggtattgtcagaatgtgaaaatgttggtgggagagttataagtttgcactctcgaagtgcagcggatcaggttatggatgtattggaaagttatcccaatgcagggataccgatacttcattggttttctggaacaataggtcagctaactcgagcaatcaatttggggctctggtttagtgtcgggccatcaatgttacaaagccaaaaaggaaaagttatcttaagtaagattccaattaataaaattctcccagaaacagatggtccctttgctactcgtaaaactggtgaaccatggacaccaggcgaaattgatgatgttattatgtcattagctaacattcatcatctaactcctgatgaggttcgttctcagataattattaatactaatgaagtcttgtttaagagcggatttaaaatctcaatttaa

SEQ ID NO: 147589 - DNA, 258 bp, Enterobacter cloacae
atgaaattcacgaaaaaagatagagatgacattgtaaatgacataaaaaattgggtggataactatccaaatatagaaaaaatggttgcagaaggtaagttgatttataagtctggatggtatgagcctatagatgaggagacatatttattaattggcaaatatatcaaagggataagagtgaataaaaatggaaaaatgcaaataaaaatatgtaaaagaagcaaaaagcttgaacgcatggttaatggcatttaa

SEQ ID NO: 147590 - DNA, 1266 bp, Enterobacter cloacae
atgatcagcgacattggcagccaggtggcggatattgccaggacgcagggtgatctgaacgggctgaaggcggcaaaggataaatacggtgatattccggctaacgcgacagaaaaggatcgccaggattatctggcgaaactgcgtgctacgccggaatataaagagacgcaggaaaagtatggtacgggcagcgccatgcagcacggcatccaggcggccacagcagcactgcagggactggcgggcggcaatatcggaggggcgctggcgggcgcgtcagcaccggagctggcgaacatcatcggccatcatgcaggcattgatgacgatacggcggcaaaagcgattgcccatgccatcctcggcggcgtaaccgcagcccttcagggcaacagtgccgcagcgggcgctgtgggagccgcatccggcgaactgattgcgacagctatcgccagacagttctatcccgatactgacccgtcgaagctgacggaagaacagaagcaaaccgtgagtacgctggcatctgtttcagcgggcatagctggcgggattgccgggggaaatacggctggtgcggcgactggggccagtgcagggaaaaatagtgctgagaataacaaccttgccagcgttctggcagctgcaaatgctgtaaaaccgggaacgacagaaaaatggcaggcagagcagcaggccgcgattaaagaagcctgcagcggaggcacaccggtatcctgccagatggcgatggcggctgtgggaacagtgatgtccggaggcattcttcctgaagcaatggtcatttctggtgtcatcagtgctggagctgtgggtggtgttgattatgtgatgaatggttccgttgatcctaaaaacgttattgctgcctactggagcggtgctttaacccgttatactggatttgaatcaacagttcttatcaatgctggtagcagcgccatcgtaagctacctggatggaaaaaatccattcctttacggaactatcggtggtttgggtggagcaattggttatggagtaggtaataaattaatagaaccgatattgggtgacgttgttaaccccatgtggaaatctttacagtgggaggatattggatatggtatatctcagccttatcgattgagtccagtgcctgggattgttggagctgcaggcggcggcgttgcaggtgaagtatttaatgtggtggtagacccatctactcctgctaataacaagaatggagcagcaaaatga

SEQ ID NO: 147591 - DNA, 339 bp, Enterobacter cloacae
atggctaagaccgcagcagaacgcaaagcagcgcagcgcgcccgccaggctgaagccggtgagcgcaaacttgagctgttgctcgacgagcaggaaatggaaatgctggcgcggaactgcgcagagcgccggccgggtcgtgagccatacgaactgagcgagtacatcgcgttgcttatccgccaggatgatgccagggtgcgtggccggattaagagtatcagcgcaagcagatgcattaagtgtggtgagcaaattccggtgaaaaactgcatcctgtcaggtgattcacagtgctgggcaacagccggatggaaaaaattaatactgacaatataa

SEQ ID NO: 147592 - DNA, 456 bp, Enterobacter cloacae
atgagcactattaccagagaacacgtgacgcacaatctgaaaatttggcctgaatactttgcagcggtccgcgacggacttaagcgcgcagaactgcgttggaatgaccgtgagtatcaggccggcgatattctcgacctttgtgagtgggatccgaatgaagaagcctttacgggtgatttcatcagcgtcactgttacgcacgtcgccgagctgggtcagtggatgccgggttatgtgctgctgagtttcgccccgccagctccgtttgtacctgatgagataaacgtgctgcaagccgctaatttggtgttgacgttaggtgttttggacaacggtattccgaccgtcgctatgaaagtatggaactcctgccgcgccgccatgcttcagggggccgaacctgtaacgacggcttacaagttgccattcgagcagtggctttcgccgtcgtga

SEQ ID NO: 147593 - DNA, 225 bp, Enterobacter cloacae
atggtcagactattgaaatcggtacgtgcagatgaaatcggaccaaacgcagtaatggaaatattcggagtttattaccgggtaaggaagcttaactaccatggtgacagaacgacaatattcttacaggaagagggtgaacctctctcatacttcaacaaaaacgacatcatcagcgttaccgttccgtgtgagttaaaaattgatatcgaggtgaagccatga

SEQ ID NO: 147594 - DNA, 396 bp, Enterobacter cloacae
atgagcgacatcgacaaacatgcgacagagctgctgattgaaaacggcgtacttgttgccgacacgctgaggcatttggctgataacgaaatcgactccgactactttgttatttgccacaccaacgaaaacggcactgaaattgaatgcgaactggcaattaccgattacgcgcgccaagcagctggaaccgttgatgagctggtaaaggcgctggaagccgcagagaagcggattgctgagctgtcagccagccatggcaatcttcgcgaggcaatggctggcattcacaacacaatcacggccggaggtgcttacacgccgatggcggcaattctaaattcttccaaacgcgcctacgaagagtcggctgcttcagccggtaaaggagagtga

SEQ ID NO: 147595 - DNA, 414 bp, Enterobacter cloacae
atgaataacaaagaattaatcaacgccgggcacgcactggctaaagccatcggcaatgacacgccgctactcgagatagcgaagatggtttccaacctcgccacacagctggatgtgcaactggctcgcggcaatacgctggctgcggagaatgcggggttgaaggaactaatagagcagcacgctaatagtgttgctgtgtgcccgaattgctctcatgaagagccgagcgaaactgacgatatcgttgcgctttatcgttctatggaaaccccagccacagacgctttccttgctgaagtgcgggcgcagggtgtggagatgttgcgcgaacatccggcgataaaactttgctctttaactcacgtatgtgatgagttcgccgcccagcttcgcaaaggagtgcagtcatga

SEQ ID NO: 147596 - DNA, 456 bp, Enterobacter cloacae
atgagaaagaaaacccttgatgcagttgaaactgacgcagctaaacgtctccgtgagatatggaatgcaaaaaaagttactttgcgccttactcaggaaaaggcggcggaggcccttggtttcagcacgcaggcttcggtaagccattaccttaacggtacgactcctttaaacacggacgccaccctcaaatttgcgtctctgttaggggttaagcctgaagctattcgaccagatctggccgaaatgatgaactatgtgcgtaagtcaggggattacgtcgaggacaggactgggccaggctggaagcttctcagcccagagcatgtggaactaataacactgtatgacagacttccgcaaagcgaaaaagaaaggcatttgtctgatttaaaagaaaaaatacaagattttgataagcttttcgaagagcttttagccgccagaaaacaataa

SEQ ID NO: 147597 - DNA, 990 bp, Enterobacter cloacae
atgattgtacgactttttttaagaaattttaaaatttataaaaacatgaattttatcccatttgtcacatctgaaaaagataggatgtctatttttgctggtgataatggagccggtaaatcaactatactagaaagtattcattgtttgatgaataacatagatagtaaggaatgggcttatacagtaggccaaaagaaagatagtgcacatattttccctttatttttaataaaaaaatcaaattgggatgatgatgatcctcaaatggcaaggatttcccactatttttgggagcatcattttaatgagatgccagcgaatgaagtcacaaaaagtttcataaaatatagaaacaagctaaaggaatggtatcacccaagcgattattatctcatagcgataggcaaagattatgaaggtaatatactgcttactacgacgttccataataaaattagtagtgcaacaaaaaaagatggtgtatctaaagataaaataataagtatatttaaaaggattttagaaagatatcgttacatatatcttcctgttgaaaacaagataagtgatgtactttctttgcaggcgcaagagatgcaaggaatgatggataaaaccgtgtcagatgagattaggcaattactttcatctaaagatcattcattaccgtcaaaagaaaacccaattcttaagccagggaggcctcgcaaaaaaccattaaaatatagcgttatagatttaatcaatcagaagttagaatcctacattgaaagtttaaataaaaaaatacctgaaggttataaattcgaatataaaggagcaattaaaagacctataaaacctacagatatacttgactcaattttcgttaaatatttctcacttaggcctttatcaaaaaattctaaaagtatcaataacttaagttctggtgagcaacgcttggctttaattgatattgcaacaaccttactatcaaagaagtaa

SEQ ID NO: 147598 - DNA, 294 bp, Enterobacter cloacae
atgaaaattgtaagggaggcgctggccggaacgcaggagtccagcgacctgatggtgaaaattgctcccgctcacggcgagctggagatcgtcatccacagcgaagtgattaagcagtttggcgagcacattcgccaggtggtcaacgacacattgcgcgccatgaacgtgcaccagggattaatcattattgaagacaaaggggcgctggactgtgtgatccgcgcccgcctgcaaagcgcgctgatgcgtgccgccgatgaacaggccatcaactggggggcgctgaaatga

SEQ ID NO: 147599 - DNA, 2598 bp, Enterobacter cloacae
atgaatcagatccacgtcattgcccatacgcactgggatcaggagtggtatttcacccgtcaggacagcatggtgctggcatcctataactttgcggatgtcatcgacacgctggagcgggaccccgcttacagctgctatcaccttgacggacagatggcggtagtggaggactttctcgccatcaatcccgattatcgcgccaggctggaaaccctcgtcaaagagaaaagaatctttgtggggccatggtatacccagacggacacctacaacgtgcatggcgaatcaattattcgcaatctcaagtacggcattttcgccgcccgcgcgctggggcatgctatgcaggtcgggtaccttccggacacctttggccacaatgctcagatggccaccattttgcagggctgcaatatcgacaatatcgtcttctggcgcggtatcgatcacgacagacaagcgaaaagcagccagttcctctggcgcgcgccgtctggggcgaccgttatcgcctgcgcgatggcattcggttatggcgcagctaaaaacatgcgttcagacgcgagccatctgcagggtaaaatcttcccgatggtcaatctcctgcgttcacgggccggtataaacgacctgctcctgccctgcggcggcgatcaggtctgcatcgacccggcgctgccgaaaattctgcaggtcgccagcgcacactctcccgatggggatcgatacgttatcagttcgctggagcgctacgtcgacattctgcgcgcgcagcgtgaacagtttgaaggctgggaaggggagctgaaatcgccgcgctacacccgcatccataaaacgatcggatccgtgcgctacgacatcaaaaagaaaaatgatgaagtcgagcagttcatcctgcggcggctggagccgacaatcgccatggcgcgccatcaggggattccggtcaacctctcggtggtcgatacgctctggaagaagctgttgcgaagccatgcccacgactctatcggcggctgtaatagcgataccactaatcgcgacatactgcatcggctggagcaaaccgaacagctgtgccacagcctgtggaacctggtggtaaaaaccctggccgccgcctgcgctcaggaaaatgacctgctgattttcaacccgctgggcaccccaacgcagcgcgtagtgataaccaccctgtatagccgtgctgataatatcgccctgacatatcaggggcagcccatccctttcgacgtcctgaaaagagacattctgcccggcggaacggcgatctcccttagcgctgaaggcgaatgtgaaacgccccttcctccctattatcgctggcacgttgctgtgaagacaccggttctgccgccggtcggctatctcagcgttaacgttaaggatgacccggtgcctttccagcagcaggaacagacaaagggcagcgagatagagaatgcgcattatcgattaacgctggacgccggaacgctcaccctgcacgacaaacgcagcggcagatgcattccctctttctttactctcgaagactgcgcggatgcgggcgacagctacgatttctcaccgcttgcgggcgacacgccgacgcggtgcgaccagttcacgctcgtcgactgcctgaaaacgccgcttgtcgaaaagctgattgtggaagccaccctgcttcttccgccggatctcgcagaccgtcaagaaaatgcccgaacgccgttatcccttcgtctggcgtgtgaattacgcgatcacgatccgaacctgtatgtggacagctcgctggaaaacagccactgcgatcaccggctacgtttgctgattaacagtgatattcacacccgccacgcaatcgcctcgcagcccttcgcgatcatcgagcgcgaaacggggtgtcacgctgaagagtggcaggaacactatcgcgaaatgcccgtggatatcgaaaccagcgagggaatcattgcagttgcggaagcgggcaaagcgctggtggtgaatagccgcggcatgaaggagtttcagataatcggcgacgcaccggctacggttgccctgacgctgtttaaatcaacgggcgtgctgggacgcagcgatctcgactggcgaccgggccgggcatccggcatcaataatacggtggtcgagacccccgatgcccagttgctgaaaccgttgcgcttctccttcaccgtcgcgctggccgatagcgccgatcatctcacgcttcgccagctggaaaatcagacagcgggacagcccttcacctatcaacggcaaacgctgcacacgctcgatcaccgtcttgagcgcttttcgttgcgtctgcccgaccgcaggcttccggcagaattctcattattgaacctgccggagccgctcatcctctctgccttgccccatgcgcagcagtcgcagggtacggtagttcgcgtgtttaacgccggcacggagcccgttcccgtcccggcaagcctggaggggtttcgtcagatcaactatctggaagagccggtgcagccggtaacggctattccccctttcgcgacctgcgattttttaatggaggcttaa

SEQ ID NO: 147600 - DNA, 288 bp, Enterobacter cloacae; identical to SEQ ID NO: 5767

SEQ ID NO: 147601 - DNA, 822 bp, Enterobacter cloacae
atgcgattagcttcccgttttggtcggtataattccatccgtcgtgaacgtcctttaacggatgatgaattaatgcagttcgtgccttcggtattttccggtgataaacatgagtcccggagtgaacgttatacgtatattccaacaatcaatatcatcaataagttacgtgatgaaggtttccagccattctttgcctgtcagagtcgggttcgtgatttgggacgccgcgaatacagtaaacatatgttacgtcttcgcagggaagggcatattaacgggcaggaagttcctgaaattatcctgcttaattcacatgatggttcatccagttatcagatgatccccggaatttttcgttttgtctgcacaaatggcctggtgtgcggaaataattttggcgaaatccgtgttccacataaaggtgatattgtcgggcaggttatcgagggagcgtatgaagtgctcggtgtctttgataaggtcactgataatatggaggcgatgaaagaaattcatcttaacagtgacgagcaacatttatttggcagagctgcactgatggtcaggtatgaagatgaaaataaaacgccagtgacgcctgaacaaataattactccccgtcgtcgggaagataaacagaacgatctctggacaacctggcagcgggttcaggagaatatgataaaaggtggattatcggggcgaagtgcctccgggaaaaataccaggacaagagccattacaggtattgatggtgatataagaatcaacaaggcgttatgggtgattgccgaacagttcagaaagtggaagtcatga

SEQ ID NO: 147602 - DNA, 510 bp, Enterobacter cloacae
atgaaaaaatggatgttagccatctgcctgatgtttataaatgagatctgccatgccactgattgctttgatcttgcaggccgggattacaaaatagatcctgatttactgagagcaatatcatggaaagaatcccgttaccgggttaatgccatcggtattaatccggtaacgggatatggcagcggactgatgcaggtagattcccagcattttaacgaactggcccgctatggaattaagccggaacatctgacaacagatccctgcatgaacatttataccggtgcttattatctggcaatagcctttaaaaaatggggcgtctcctgggaggccgttggtgcatacaatgccggattcaggaagaccgaacgccagaaccagagacgtcttgcctacgcatcagaggtttaccggatttataccgggataaaaagcagtaaaggtatccggattccggtcacgaagaaatcacttccggaaattaacagcgtgcagaacaattaa

SEQ ID NO: 147603 - DNA, 384 bp, Enterobacter cloacae; identical to SEQ ID NO: 5293

SEQ ID NO: 147604 - DNA, 672 bp, Enterobacter cloacae; identical to SEQ ID NO: 5292

SEQ ID NO: 147605 - DNA, 360 bp, Enterobacter cloacae; identical to SEQ ID NO: 33881

SEQ ID NO: 147606 - DNA, 312 bp, Enterobacter cloacae
atgtcgggagacgagaataaacttaagaaatatcgtttcccggaaacactgaccaaccagagccgctggtttggcctgccactggatgaactgatccccgcagcaatctgtgttggctggggtatcacaacatcgaaatatctgttcggtattggtgcagcggttctggtttatttcgggattaaaaaactgaaaaaagggcgaggcagttcctggttacgtgacctgatttactggtatatgccaacagccctgctgcgcggtatttttcataatgttcccgattcgtgtttccggcagtggattaaatag

SEQ ID NO: 147607 - DNA, 567 bp, Enterobacter cloacae
atggaacacggtgcccgtttaagtaccagtcgtgtaatggccatcgcctttatatttatgtcagtgcttattgttctcagcctctctgttaacgtcattcagggggtgaataactaccgccttcagaatgagcaacgcactgccgtgacgccaatgggatttaatgtgccctttgccgtgtcacagaacagtgccgatgcctcttatttgcagcagatggcgctgtcatttattgccctccgtctgaatgtctcaccggaaatcgtcgatgcctcacatcaggcgcttctgcaatatatccgcccgggcgcacagaaccagatgaaagttattctggctgaagaagcgaaactcattaaaaaagataacgtgaattctgcttttttccagaccagtgtccgtgtctggcctcagtatggtcgtgtggaaatccgtggaattcggaaaacatggattggtaactccgaaccttttattgatatcaaacattacatccttattctgaagcgggaaaacggggtgacctggctggataatttcggggaaacagacgatgagaaaaaataa

SEQ ID NO: 147608 - DNA, 729 bp, Enterobacter cloacae; identical to SEQ ID NO: 22193

SEQ ID NO: 147609 - DNA, 1452 bp, Enterobacter cloacae
atggccagtatcaataccattgtgaaacgcaagcagtacctgtggctggggattgtggttgtcggtgcagcctccgcgattggtggtgcactgtatctgtctgatgtggacatgtccggtaacggtgaggcggtggctgaacaggagcctgtgccggatatgaccggtgtggtggatacgacctttgatgacaaggtgcgtcagcatgccaccacagagatgcaggtgacggcagcgcagatgcagaagcagtatgaggaaatccgtcgtgaactggatgtcctgaacaaacagcgcggtgatgaccagcgtcgtattgaaaagctgggacaggataatgctgccctggcagagcaggtaaaagccctgggggcaaatcccgtcaccgcgaccggtgagcctgtaccgcagacgccagcctcaccgcccgggccggaaggcgaaccacagccaggaaacacccccgtatccttcccgccgcagggcagcgttgctgttccaccgccgacggcgttttatcccgggaatggtgtcacgccaccaccacaggtgacgtaccagtctgtgccggtgcctaaccggatacagcgtaaggtgtttacccgtaatgagggaaaacagggaccatcactgccgtacattccgtcaggaagttttgcgaaagccatgctgattgaaggggcggatgccaatgcctctgtcaccggtaatgaatccacggtgccgatgcagctgcgtatcaccggcctggtggaaatgccgaacagcaagacgtatgacgcaacgggatgttttgtgggtctggaagcctggggggatgtgtccagtgagcgtgccattgtacgtacccgcaatatcagctgcctgaaggacggcaaaactattgatatgccgattaaggggcatgtcagcttccggggtaaaaacggtatcaagggcgaagtggtgatgcgtaacggcaaaatcctcggctgggcatggggcgcgggatttgttgacggtatcggtcagggaatggagcgcgcctcccagccggctgtcgggctgggtgccacagccgcttacggggctggtgatgtcctgaaaatgggtatcggtggcggcgcatcgaaagccgcacagacgctcagtgactactacatcaaacgtgccgaacagtatcacccggtgataccgattggtgcgggcaacgaagtgaccgtggtgttccaggacggcttccagctgaaaaccgtggaggaaatggcgctggagcagtcacagagtacagcggaagagggtaacccggaaagccctgtgccgaatcctccctcggcagaaagccacctgaacggttttaacaccgaccagatgctgaaacagctgggcaatctgaatccgcagcagtttatgtccggagacaagaacccgctgggcggggatgccggcaaggagggcggaaatggcgggtga

SEQ ID NO: 147610 - DNA, 567 bp, Enterobacter cloacae; identical to SEQ ID NO: 75652

SEQ ID NO: 147611 - DNA, 318 bp, Enterobacter cloacae; identical to SEQ ID NO: 7542

SEQ ID NO: 147612 - DNA, 516 bp, Enterobacter cloacae; identical to SEQ ID NO: 105146

SEQ ID NO: 147613 - DNA, 414 bp, Enterobacter cloacae; identical to SEQ ID NO: 105145

SEQ ID NO: 147614 - DNA, 474 bp, Enterobacter cloacae; identical to SEQ ID NO: 33480

SEQ ID NO: 147615 - DNA, 219 bp, Enterobacter cloacae; identical to SEQ ID NO: 105144

SEQ ID NO: 147616 - DNA, 348 bp, Enterobacter cloacae; identical to SEQ ID NO: 75646

SEQ ID NO: 147617 - DNA, 2631 bp, Enterobacter cloacae
atgagtaataacccacttgaggccgtcactcaggcggttaactccctcgtcacagcactgaaactgcctgacgaatcagcaaaggccaatgaagtgctgggcgaaatgagcttcccgcagttcagccgtctgctgccgtatcgtgattacaaccaggaatccggtctgttcatgaatgacaccacgatgggctttatgctggaagccattcccatcaatggggcgaatgagtccattgtggaggccctcgatcacatgctgcgcaccaaactgccgcgcggtattccgttgtgtatccatctgatgtccagtcagctggttggtgacaggattgaatacgggctgcgtgagttctcctggtcaggtgaacaggctgaacggtttaacgccattacccgggcctattatatgaaagcggcagcgacacagtttccgctgccggaggggatgaatctgcccctgaccctgcgccattaccgggtgtttatctcgtactgttctccttcgaagaaaaaaagccgggccgacattctggaaatggaaaacctggtgaaaatcatccgggcgtcgttacagggggccagtatcaccacacagacggtggatgcacaggcctttatcgatattgtcggggagatgattaaccataacccggactccctgtacccgaaaagacgtcagctggacccgtattctgatctgaattatcagtgtgtggaggacagttttgatctgaaagtccgggctgattacctgacgctgggcctgcgtgagaacggcaggaacagcacggcccgcatcctgaatttccatctggcccgtaacccggaaatcgccttcctgtggaacatggccgacaactacagcaacctgctgaacccggaactgtccatctcctgtccgttcatcctgacgctgactctggtggtggaagaccaggtgaaaacccacagcgaagccaacctgaagtacatggacctggagaaaaagtcgaagacctcctatgccaaatggtttccgtccgtggagaaagaggcgaaggagtggggggaactgcgtcagcggctgggctccggtcagtcctccgtggtgtcctacttcctcaacatcacagcattctgcaaggacaataatgaaacggcgctggaagtggagcaggacatcctgaacagctttcgtaaaaacggttttgatctgatttcaccgcgctttaaccacatgcgcaatttcctgacctgtctgccctttatggccgggaaagggctgtttaaacagctgaaagaggccggagtggttcagcgcgcagagagctttaatgttgccaacctgatgccgttagtggcggataaccccctgacaccggcaggtctgctggcacccacctaccgtaaccagctggcgtttatcgatattttcttccgggggatgaataacaccaactacaacatggcggtctgtggcacctccggggccggtaaaaccgggctgatacagccacttatccgcagcgtgctggactccgggggctttgccgtggtgttcgacatgggggatggctacaagtccctgtgtgagaacatgggtggcgtatatctggacggtgaaaccctgcgttttaacccgtttgcgaacatcaccgatattgaccagtcagcggagcgtgtccgtgaccagttgtcagtgatggccagccccaacggtaacctggatgaagtgcatgaaggtctgctgctgcaggcggtcagggcctcctggctggccaaagagaacagggcacgtattgatgacgtggtggatttcctgaaaaacgccagtgacagcgagcagtatgccgggtcaccgaccatccgcagccgtctggacgaaatgattgtgctgcttgaccagtacactgccaacggcacttacggccagtattttaactccgatgagccgtccctgcgggatgatgcgaaaatggtggtgctggagctgggcggactggaagaccgtccgtcactgctggttgcggtgatgttctccctgattatctacatcgagaacaggatgtaccgcacgccgcgtaacctcaagaaactgaacgttattgatgaaggctggcgtctgctggacttcaaaaatcgcaaggtcggtgagtttattgagaaaggttaccgtaccgcccgccgtcataccggtgcctatatcaccatcacacagaacatcgtcgactttgactctgacaaggcctccagtgcggcccgtgcggcatggggtaactcctcctacaaaattatcctcaaacagagtgcgaaggagttcgcaaaatacaaccagctgtatccggaccagttccagccactgcagcgcgacatgattggtaagtttggtgcggccaaagaccagtggttcagttccttcctgctgcaggtggaaaaccattcctcctggcaccgcctgtttgtggacccgttaagccgcgccatgtacagctctgacggcccggattttgagtttgtgcagcagaaacgtaaagaggggctgagtattcatgaggcggtgtggcagctggcgtggaagaagtcagggccggagatggcttcgctggaagcctggctggaagaacatgagaaatacaggagtgttgcatga

SEQ ID NO: 147618 - DNA, 387 bp, Enterobacter cloacae; identical to SEQ ID NO: 5286

SEQ ID NO: 147619 - DNA, 633 bp, Enterobacter cloacae
atgagatgccgggggctgattgccctgctgatatgggggcagagtgtggccgccgccgatcttggcacctggggcgatctgtggccggtaaaggagccggacatgctgacggtgatcatgcagcgcctgacggcactggagcagtccggtgagatgggccggaaaatggatgcctttaaggagcgggtgatccgcaacagtctgcggccccctgccgtgcccggtatcggacgcacggagaaatacggcagccggttgtttgacccgtccgtcagactggctgcggatatccgggataacgaagggcgggtgtttgcccgtcagggtgaagtgatgaatccgctgcagtatgtgccttttaaccagacgctgtatttcatcaatggcgatgatccggcgcaggtggcctggatgaaacgccagacgccgcccacactggagagcaaaattatcctcgtgcagggcagtatcccggagatgcagaagtctctggacagccgtgtttactttgaccagaacggtgtgctctgccagcgcctcggcattgatcaggtcccggcacgggtgagcgccgttcccggcgatcgcttcctgaaggtggaatttattccggcagaggagggcagaaaatga

SEQ ID NO: 147620 - DNA, 993 bp, Enterobacter cloacae
atgaagcgaagcctgtggctgctgatgttattccttctcgccggtcatgtccctgcggcatctgcggattctgcctgtgaggggcgttttgtaaacccgatcacggatatctgctggagctgtattttcccgctctcgctgggcagtatcaaagtcagtcagggtaaggtccccgacacggcgaacccgtcgatgcccattcagatttgtccggcaccgccgccgctgttcaggcgtatcgggctggccattggttactgggagccgatggcgctgacggacgtcacccggtcaccgggatgcatggtgaacctgggcttcagcctgccggcttttggtaaaacggcacagggaacggcgaaaaaggatgagaagcaggtgaacggggcgttctatcacgttcactggtacaaatacccgctgacgtactggcttaacatcatcacatcgctgggctgtctggaaggtggtgacctggatatcgcttatctttctgaaattgaccccacctggacggacagcagcctgaccaccattctcaatccggaagctgtcatctttgccaatccgatagcacagggggcctgtgcagcagatgccattgccagcgcctttaatatgcctctcgatgttctgttctggtgtgccggttcgcagggaagtatgtacccgttcaatggctgggtgagtaatgagtccagtccgttgcagtcctccctgctggtcagtgaacgcatggcgttcaaactacaccgtcagggcatgattatggaaaccatcgggaaaaataacgccgtctgtaatgaatatccgtccccaatcctgcctaaagaacgctggcgttatcagatggtgaatatgtatccggatagcggacagtgccatccgttcgggcgcagtgtgatgcgctgggagacgggaaaaaatccgcccaacacaaagaaaaacttcggctacctgatgtggcgtaaacgtaactgtgtattcctgtaa

SEQ ID NO: 147621 - DNA, 306 bp, Enterobacter cloacae
atggcaacaatggacagtaaatatattcagcatctcaggaaaataagtgctgtactgctcaggctgataagcagaacattaaaattatttccttttggtcttgtaatggtgcccgttatattattttattttgcacctgacagttttctctctgaaattattcatgaatggaagaaagcagatatatcagaacaagtgacacttgtcagattatatctgaaggtgacatttacatgtgcgtttgtggctgtttttctcaattatcttttttctgatgagttcatacctgtaaatagcagaaagtga

SEQ ID NO: 147622 - DNA, 639 bp, Enterobacter cloacae
atgaaccggaaaatatttgcacttttggctctgacagcagggatgcatcttgctgttcatgcttcagaaaatgtgaacacaactgaaaaccgccagttcctgaagcagcaggaaacactgagtcagcagttacgtgaaaagccggacacacagttgcaggcatgggcagagcagcaggtcagggcgaatccccttcagcattccgataaccagtttctcgatgaactggtccgtaaacagcaggctgctcagaaggataaaccacagcagggcgccgtgtactttgtgtctttctccattcccgaagaggggctgaaacggatgctgagcgaaacccggcactacggtattccggccacactgcggggcatggtgaacaatgacctgaagaccaccgctgaaaccgtgttgtccctggtgaaagacggcgcaactgatggtgttcagatcgacccgacgctgttttcacagtacggcattcgcagcgtaccggccctggtggtgttttgcagccaggggcacgacatcatccggggaaatctgcgcgtcaggcaggcgctggagaaagtggccaccgcaggagactgccggcaggtggcccgggcgttgctgaataaccccggagataaacaaaaatga

SEQ ID NO: 147623 - DNA, 372 bp, Enterobacter cloacae
atgactttacctgccgggtattaccggattgacccggacatccgtgcactggtggccgcgatgaacgttcacggatttcgtacatatgcgtcctgtcaggggcatggtttccctgttacgaaactgccgccttatattgcctttgtctgtccggtaaaaaaggcggctcttcttgagcagcgactgcggcaggatgcggagtccatgatgccccggttgctgtggggctggtctgtcggggcttcttttaacagtgactttcagctctgtttccggcttcagcctgaaggccctcatcactggtatcaccggtactgtcgccgctcactgcgtgcagacttcaggacgctggtccgcttactgaatccgtaa

SEQ ID NO: 147624 - DNA, 423 bp, Enterobacter cloacae
atggcgctgacaaagaagctgcgggaaaaactgcgtatgaaattcggcggtcgttgtgcgtactgcggctgtgaactgccggaaaaaggctggcatgccgaccatgttcaggcggtgctccgcaagtcagagcagtgcatgaaggctgcagaaaagcgcattttcaggctgatatccaccggtgatgttttcagaccggaggccgactgtccggaaaacctcgtcccggcctgtgcgccgtgcaacctgctgaaaacaacatattcgctggagatgttcagaacgcaggtgtccctgcaggttgaacgggggcgcagaagcagcgtgaatttcaggaccgcagaacggttcgggctgattcaggtggtgaacaaaccagtcgtgttctggtttgagcaatatcagagggagagtgaggtatga

SEQ ID NO: 147625 - DNA, 1851 bp, Enterobacter cloacae
atgaaacgtcttctgccattgctgctggggctggcagtcagtgtggcacaggctgacagcaacagtgattaccgggcgggttctgattttgcccgtcagattcaggggcagggtacaggcagtattcagggccttaagccacaggagagtatccccggctataacgcgaatccggacgagacaaaatattacggtggcgtgactgccggcggggatggcggcctgaaaaatgacggcaccacggaatgggcgaccggtgaaaccggaaaaaccatcacagagtccttcatgaacaagccgaaagacattctttcaccggatgcgccgtttatccagaccggcagggatgtggtgaaccgggctgacagcattgtgggaaacaccgggcagcagtgcagtgcgcagcagataaaccgcagtgagttcacaaactatacctgtgagcgggacacgatggtggaagagtactgcacacggactgccagtatcaccggggactggaaatacacggatgaatatcgtgaggtgacgataccgcactcacagttccggttcagtatgaacggtctgaaactggtgttcagcgttaccgtacctgttgccgggacagtggaaagtgcctcgctatcggttcatgcagggctatatttccttaactcccgttacgactttatgaacacagcctttaatgtgcaactggttacaggacagagcgggactttcaccatacctgtgccctccgggttttctgtcacacaggggcaggttctgaccggtagtggctgtactgcaaacggtaattgcctcccgcacgggaatggtgacaggatggtctatgaatcgcttgtcagtggtgcttccacctttacgctgaaactcaggatgaaggtccgtgataaagaatgggttccccgggtggagtgggtggagagttgtccgtttaataaagcggatggcgtgctgacaggcactgagtgttcagagccgggtggtacgaaaaccggagtgatggaaggtaaaccctggaacatcacacaggcatgctgggcataccgggataaatatgtcactcagtccgcagataacggcacctgtcagaaatatgtcgataatccggcctgtacgctggcctcacgtcagtgcgcgttttattccgatgagggaacctgtctgcatgagtacgccacgtactcctgcgagtcaaaaacatcaggaaaagtgatggtctgtggtggtgatgtcttctgccttgacggtgaatgcgataaggcacagagcggaaaaagcagtgattttggtgaagcagtatcacagctggctgcgcttgccgccgcaggtaaggatgttgccgccctgaatggtgtggatgtcagggctttcacgggtgaggcgaaattctgccgtaaggccgcagccggcttcagtaactgctgtaaggatggcggctggggacaggatatcgggctggccaaatgcagcagtgatgaaaaggccctggctaaagcaaaatcaaacaaactgaccgtcagtgtcggagagttctgttcgaagaaagtgctgggtgtctgtctgcagaaaaaacgcagctactgtcagtttgattcgaagctggcgcagatagtccagcagcaggggcgcaacggtcagctgcgtatcagttttggccgtgcgaagcatcctgactgtcgggggattacggttgatgagctgcagaaaattcagttcgacagactggatttcactaacttctacgaagacctgatgaataaccagaaaatcccggacagtggcgttctgacgcagaaagtgaaagagcagattgctgaccagctgaaacaggcaggacagtaa

SEQ ID NO: 147626 - DNA, 258 bp, Enterobacter cloacae
atgaaagtcatattcacgtcgaaccgttttattgattttcttatccggcttttgattacagcgtttgtcatttccccggtaattatctggtcgtgggatacggtaaaagaaaccactgcaggtgagatgcttgctgctgctttcgttatcctttactccggtgtgcttctgtttattctgtatttttgtttttctgccctgactgacctgcagaaacctgatgaaagaaaaagtgatgaaaggaatgaagatgaataa

SEQ ID NO: 147627 - DNA, 744 bp, Enterobacter cloacae
atgaataaagcattactgccactgttactctgctgctttatttttccggcgtcaggaaaagatgcaggctggcagtggtataacgagaaaataaatccgaaggaaaaagaaaataaaccagtacctgcagccccccgtcaggagccggacattatgcagaaactgaccgcgctgcagacggcaacaaagcgggcgctgtacgaagctattctgtatcccggcgtggataattttgtgaaatatttccggctgcagaattactggactcagcaggccgggcttttcaccatgagcgccaaaaaagccatgctggcgcatcccgaactggactataacctgcagtacagccattacaacggcacggtccggaaccagctggcggcagaccaggcgcagcagcgacaggccattgcgaaactggctgaacactacggcatcatgttcttttaccgggggcaggaccccatcgacgggcaactggcgcaggtcattaatggcttcagggatacctatggtctgagtgttattcccgtttccgtggatggcgtgattaatccgctgttgccggattcccggactgaccaggggcaggcgcagcgcctcggtgtgaaatatttcccggccatgatgctggttgacccgaaacagggcagtgttcgcccgttatcatacggctttatttcacaggacgacctggcaaaacagttcctgaacgtttctgaagattttaaaccgaatttttaa

SEQ ID NO: 147628 - DNA, 342 bp, Enterobacter cloacae; identical to SEQ ID NO: 75636

SEQ ID NO: 147629 - DNA, 336 bp, Enterobacter cloacae; identical to SEQ ID NO: 5780

SEQ ID NO: 147630 - DNA, 285 bp, Enterobacter cloacae
atgataagtaaacgcagattctctttaccccggcttgatattacgggaatgtgggtattttccctgggtgtctggtttcatatcgtcgcccgtcttgtttacagcaaaccctggatggctttttttctggcggagttgattgcagccatccttgtgctgttcggcgcataccaggtgctggatgcatggattgcacgtgtcagcctggaagagcgtgaggcactggaagccaggcaacaggccatgatggaagggcagcaggagggcggacatgtctctcactaa

SEQ ID NO: 147631 - DNA, 546 bp, Enterobacter cloacae; identical to SEQ ID NO: 10993

SEQ ID NO: 147632 - DNA, 393 bp, Enterobacter cloacae; identical to SEQ ID NO: 15238

SEQ ID NO: 147633 - DNA, 1374 bp, Enterobacter cloacae
atgcttcgcattaaacctctttttattctttgcgccgccttactgacggccatacccacagcgtcagcggatgtgaacagcgacatgaatcagttctttaacaagctgggcttcgcctccaataccacacagccgggcgtctggcaggggcaggccgccgggtatgcctatggtggctccctgtatgcccgcacccaggtcaaaaatatccagctgatttccatgacgctgccggatatcaatgccggatgtggcggcatcgacgcctatctcggctcgttcagttttattaatggcgatcagttgcagcgttttgttaagcagattatgagcaatgctgccggttacttttttgaccttgccctgcaggcaacggtgccggaaatcaaaaccgcaaaagacttcctgcagaaaatggcaagcgacattaacagtatgaacctcagctcctgtcaggtggcgcaggggattgtcggaggattatttcctcagactcaggtgtcacagcagaaggtctgtcaggacattgccggtgagagcaatatttttgctgactgggccgcgtcccgtcagggctgcacggtcggaggacagtcatcgtctgttcgtgacaaggccagtgacaaagataaggaacgggtgctgaagaacatcaatatcatctgggactcgctgtccaaaaacaggatgcttgatggtaacaaagaactgaaagaatttattatgacgctcaccggtacgctgatttttggggaagacagcgagattacccccctgccggcgcgtaccactgaccgcgatatcctccgggcgattatggaggggggaacggcaaaagtttatcactgcaacgattcggacaagtgtctgaaggtggtggcggatgcaaatgtgaccatcgcccgggataaagccctgaaatcacagattacaaaactgctcaccagtattcagaataaagcggtgagtgatactccactggatgacagggaaaaaggcttcatttccagcaccaccgtccccgtctttaaatatcttattgacccgcagatgctcggtgtgtccagcagcgtggtttaccagctgacggactatatcggctacgacatcatgctccagtacattcaggaactgcttcagcaggcccgggccatgattgccaccgggaactatccacagaccgtgctggacagtgtgctggagaatctgaatcaggcacagcaacagattgcggttttccaggggcaggtaaaggtccagcaggatgcattgctggttgttgaccgtcagatgagctacatgcgccagcagctttccgcccgcatgctcagccgttaccagaacaactatcacttcggagggagcacgctgtga

SEQ ID NO: 147634 - DNA, 2826 bp, Enterobacter cloacae
gtgaatgaagtctatgtgattgccggtggtgagtggttaagcaataacctgaacgctattgccgcctttatggggacccggacgtgggattccatcgaaaaaattgcgctcacattgtctgttctcgcggtggccgtgatgtgggtacagcggcacaacgtgatggatttgctgggctgggtggccgtgtttgtgcttatcagcctgctggttaatgtccgtacatcggtgcagattattgataacagtgacctggtccaggttcaccgggtggataatgtgccggtcggactggcgatgccactttcactgacgacccgtatcgggcatgcaatggtggccagttacgagatgatattcacccagcctgacagcgccacctacagcaagacaggcatgctgttcggggcgaacctgattgtgaaaagcaccgattttctgtcccggaatccggaaatcatcaatctgtttcaggactacgtccagaactgcgtgctgggggatatttacctgaaccacaaatacacgctggaagacctgatggcctccggtgacccctacacgctgattttttcccggcccagcccgctacggggcgtttatgacagcaataataatttcataacctgtaaagatgcgtcggtcacgctgaaagacaggctgaatctcgatacaaagacgggaggcaagacctggcattattatgtgcagcagatatttggcggcagaccggacccggacctgttattcagacaactggtcagtgacagttacagttatttctacggctccagccagtctgccagtcatattatgcgccagaacgtcaccatgaatgccctgaaagagggtatcaccagtaatgcagcccgtaacggtgataccgccagcctggtcagtctggccacgacttcgtcgatggagaaacagcgtctggcacatgtctccattggtcatgtgctgatgcgaaacctgccgatggtgcagaccattctggtgggcattaccattggtatcttcccgctcctggtactggcggctgtcttcaacagactgacgctgtctgttctgagaggctatgtgtttgctctgatgtggttccagacctggccgttgctgtatgccattctgaacagtgccatgacattctatgcaaagcagaatggtgcaccggtcgtgctctctgaactctctcagatacagctgaaatactccgacctggcgtccactgccggatatatatctgtcatgatacccccgttgtcatggatgatggtaaaaggccttggcgcaggtttttccagcgtgtacagccatttcgcttcctctgctatcagcccgactgccagtgcggcaggtagtgtggttgacggtaattactcctacggcaacatgcagacggaaaacgtgaacggcttcagctggagcaccaacagcaccacgtcgtttggtcagatgatgtaccagaccggcagtggcgcaactgccacacagacccgtgacggtaatatggtgatggatgcaagcggagcgatgtcccggttaccggttggtatcaatgcaacgcgtcagattgcagcggcacaacaggaaatggcccgggaggcgtcgaacagagcagaaagtgccctgcatggtttcagcagcagtattgccagtgcctggaacacgctcagtcagtttggttctaaccgggggagcagtgattctgtcacaggtggtgctgacagcacgatgagcgcacaggactccatgatggccagccgtatgcgcagtgcagtggaaagctatgcgaaggcgcataatatcagtaatgagcaggcgactcaggaactggcatcaacaagtaccaggctatctggtggaatgtatgctgatgctcatgctgaatggggggttaaacctaaaattcttggtgttggtggtggggtaggcatcagaggtggatttaaggggagcctggatgcaacggatgatgactcacattcagcaagtagtggcagcagggctacccatgatgctcgccatgatatcgatactaaagccagtaaggactttaaagaggccagcgattactttaccagtcgcaaagtcagtgaatccggcagccatactgacaataatgccgattcccgcgtggaccagttgtctgcagccctgaactcagcaaaacagagttacgaccagtacacgacgaatatgacccgcagccatgaatatgcggaaatggcctcccgtactgaaagcatgagcgggcagatgagtgaagacttgtcgcaacagtttgcacagtatgtgatgaaacgcgcaccgcaggatgcagaagctattctgacaaataccagttcgccggagattgcagaacgccgtcgggctatggcgtggtcttttgtgcaggaacaggtacagcctggtgttgataatgcctggcgtgaatcccgtggggatattggtaaaggaatggagagcgtaccttcgggtggtggcagccaggatattattgctgaccatcaggggcatcaggccattattgatcaaagaacgcaggacagtaatatccgtaatgatgtaaaacatcaggttgataatatggtcacagaatataaagggaatatcggagatactcagaatagtattcatggcgaagaaaatattgtagacagacaatattcagagttaaaaaataatcacaaacaggaagaaattcagcaaaacaacagatataatgaagaaaataaacgacagaaattaatgccaacaccgtctgaagatgcgttaaaacagatggtggatgataagaaagaacgattgaaggggccattatga

SEQ ID NO: 147635 - DNA, 510 bp, Enterobacter cloacae; identical to SEQ ID NO: 75628

SEQ ID NO: 147636 - DNA, 738 bp, Enterobacter cloacae
atgacatcagacaatatcgctgaatatgttggtgagaataatcaatttactgagaagcctgtaactgaataccccccggtgatacaggataatacagtgaccactaaagactatctgtacagcaataatattgatactgaccttttagtggttatcggagggcttatggttatattgtttctcatgatgcttatcatgtactttattaattctctcaggcataaggaattaactgaaatactgacaaaaatatcttttcctgaaaaatccgggagcaatttgcttaaaccggaggcggtcagctgtaatttgttgtccctgtgtgtgctggcaccggtattctgtacacccagaaagctggctgaagtttccagggagatcatcgtggcgagtgcgcaggaaattgcatggacgccggggagcagtcgtattgatggccaccaggcggagaatatcacctgggcgatttcatcgcagtctcctgccgataagtatgatctcatcaataaaacgtcccgtgtttctcctgacagtggccgtttttatgaaccggacacagttctggatcaccgtgaacgggtacgcctttttattcagatccagtttccgcatgggagtgactggtctgaagtattgcgcctgactgacattgttacagagaaggtctcttccggcaggactgcaggcgggtatcaccaccggcatacagggtacacctggtctgtttctgtgaattaa

SEQ ID NO: 147637 - DNA, 5271 bp, Enterobacter cloacae
atgttgagtttcagcgttgttaaatcggcaggcagtgccggaaactattacaccgacaaggataattactatgtgctgggtagcatgggagaacgctgggccggtcagggggctgaacagcttgggctgcagggcagcgtcgataaggatgtttttacccgtcttctggagggcaggctgccggacggggcggatttaagccgcatgcaggatggcagtaataagcatcgtcccggctacgacctgaccttctccgcccccaaaagtgtctccatgatggccatgctcgggggggataaacgtcttattgatgcacataaccaggctgtggattttgctgtccgtcaggtggaggcgctggcctccacacgggtgatgacggacggacagtcagaaacggtgctgaccggtaatctggtgatggcactgtttaaccatgacaccagtcgcgatcaggacccacagttacacacgcatgtggtggtggctaatgtcacgcagcataacggcgagtggaagacactgagcagtgacaaagtggggaaaaccggattttccgagaacgtgctcgcgaaccggattgcgttcgggaaaatatatcagagtgagttacgtcagcgcgttgaggcgctgggttatgaaaccgaagtggtcggtaagcacggtatgtgggagatgccgggcgtaccggtggaggccttttccagtcgttcacaggctatcagggaggccgtcggggaaggggcctcgctgaaatcccgggatgtggcggcactggatacgcgtaaatccaaacagcacgtcgatccggaagtcagaatggctgaatggatgcagacgctgaaggaaaccgggttcgacatccgggcgtatcgtgacgcggcggatcaacgggcggagacccgcacgcaggcgcccgggccagcttcacaggacgggccggatgtgcagcaggcggtgacacaggcgattgccggattaagtgaacgaaaagtgcagttcacgtacacggacgtgctggccaggacggtcggcatactgccgccggaaaatggtgtgattgaacgggcacgcgccggtatcgatgaggccatcagccgtgagcagcttatccccctcgatcgtgagaaggggctgttcacgtccgggattcatgtgctcgatgagctgtcagtccgggcactcagtcgtgacatcatgaaacagaaccgggtgaccgtacatccggagaaaagtgtcccccggacggccggttacagcgatgccgtcagtgttctggcacaggatcgcccgtcgctggccattgtgtccgggcagggcggtgcagccgggcagcgtgagcgggtggcggagctggtcatgatggcccgggagcaggggcgggaggtgcagattatcgctgctgaccgtcgttcgcagatgaacctgaagcaggatgaacggctgtccggtgagctgataaccggacgtcgtcagctgctggagggtatggccttcacaccgggcagtaccgttatcgttgatcagggcgaaaaactctccctgaaagagacgttaaccctgctggacggtgccgcacgtcataacgtacaggtcctgataaccgacagcgggcagcgaaccggtacaggcagtgcgctgatggccatgaaggatgccggggtgaacacgtatcgctggcagggcggagaacagcgaccggcaaccatcatcagtgaaccggaccgtaatgtccgctatgaccggctggccggagattttgcggccagcgtgaaagccggagaagagagcgtggcacaggtcagcggggtacgggaacaggccatactgacacaggccattcgcagtgagctgaaaacacagggcgtgctcggacacccggaggtgaccatgaccgccctgtcaccggtctggctggacagccggagccgttatctgcgggatatgtaccgacctgggatggtgatggagcagtggaacccggagacacgcagtcatgaccgctatgttatcgaccgggtgacggcgcagagtcacagcctgaccctgcgggatgcgcagggcgaaacgcaggtggtgcgtatttcctccctggacagcagctggtcgctgttccggccggaaaaaatgccggtggcagacggcgagcgactgagggtgacagggaaaattcccggactccgcgtctccggcggtgaccgcctgcaggtggcatccgtcagtgaagatgcgatgacggttgttgtgccggggcgggctgaaccggccaccctgcctgtggctgattcaccgttcacggcactgaagctggagaacggctgggtggaaacgcccgggcattccgtcagtgacagtgcgacggtgtttgcctccgtcacacagatggcaatggacaacgccactctgaacggtctggcccgcagcggtcgtgatgtccggctgtattcctcactggatgaaacccgtactgcggaaaaactcgcccgccatccgtcctttacggtggtttctgagcagataaaggcgcgtgccggtgagacattgctggaaaccgctatcagtctgcagaaagccgggcttcacacgccggcacagcaggccattcatctggcccttcctgtgctggaaagtaaaaacctggccttcagcatggtggacctgctgacagaggcgaagtcgtttgctgcagaaggaaccggttttactgaactgggaggggaaatcaatgcgcagataaaacgcggtgacttactgtatgtggatgtggcaaaaggctatggcacaggcctgctggtttcccgtgcgtcgtatgaggcagaaaagagcattcttcgccatattctcgaaggcaaggaggcggtcacgccgctgatggagagagtacccggcgaactcatggagacgttaacgtcgggacagcgtgccgccacccgtatgatactggaaacgtccgaccgtttcacggtggtacaggggtatgccggtgtgggtaagaccactcagttccgggcggtgatgtcagccgtgaacatgctgccggagagtgagcgtccccgggttgtggggctggggcccacgcaccgtgcggtcggtgagatgcgcagcgccggcgtggatgcacagacactggcgtcctttctgcatgacacgcagctgcagcagcgcagcggagaaacgccggatttcagcaacacgctgtttctgctcgatgagagctcaatggtgggcaataccgacatggcacgggcatacgccctgattgcggccggtggcggtcgtgctgtggccagcggtgacacggaccagctgcaggccatcgcgcccggtcagcctttccgtctccagcagacgcgcagtgctgccgatgtggccatcatgaaggagattgtgcgtcagacgccggaactgcgggaggcggtatacagcctgattaaccgggatgtggaaagggcactgtccgggcttgagagtgtgaaaccgtctcaggtgccacgtctggagggcgcatgggcaccggagcactccgtgacggagttcagtcacagacaggaagcgaaactggcagaagcgcagcagaaggcgatgctgaaaggcgaggctttcccggatatccccatgacactgtatgaggccattgtccgcgactataccggcaggacaccggaagcacgggagcagacgctgattgtcacgcacctgaatgaggaccggcgcgtactgaacagcatgattcatgatgcacgggaaaaggccggtgagctgggcaaagagcaggtcatggtgcctgtcctgaacacagcgaatatacgtgacggagaactgcgtcgtctctccacctgggagaaaaacccggatgcccttgccctggtggatagtgtgtatcaccggattgccggtatcagcagggatgacgggctgataaccctgcaggatgcggaaggtaacacgcggctgatttcgccccgggaggcggtggctgaaggtgtcacactgtacaccccggacaaaatccgggtggggaccggcgaccggatgcgcttcacgaagagtgaccgggaacgcggttatgtggccaacagcgtctggacggtgacagcggtttctggtgacagtgtcacgctgtcggacggccagcagacccgggtgattcgccccggtcaggagcgggcagagcaacatattgacctggcctatgccatcaccgcccacggtgcgcagggggcgagtgaaacctttgccatcgcgcttgaaggcacggaaggtaaccggaaactgatggccggctttgagtcagcctacgtggccctgtcgcgtatgaagcagcatgtgcaggtgtacaccgataaccgtcagggctggacggatgccattaacaatgccgtacagaaaggaactgcccacgatgtgctggagccgaaaccggaccgggaggtcatgaatgcgcagcggctgttcagtacggcacgggaactgcgggacgtggcggcaggccgtgccgttctccgtcaggcagggctggccgggggagacagccctgcacggtttattgcaccgggacgtaaatatccgcagccgtatgtggcactgccggcgtttgaccgtaacggcaagtcagctggtatctggctgaacccactgaccacggatgacggaaacgggctgcggggattcagtggtgaaggacgggtgaaaggcagcggggatgcgcagttcgtggccctgcagggcagccgtaacggagagagcctgctggctgataatatgcaggatggcgtccggattgcccgtgataatcctgacagcggtgtggtggtgagaattgccggtgaaggtcgtccgtggaatcccggtgccatcaccggtggccgcgtgtggggggatatcccggataacagcgtccagccgggggccggaaatggcgaaccggtcacggcagaggtactggcacagcggcaggctgaagaggccatccgccgtgaaacggaacgccgcgcagatgaaattgtcaggaaaatggcagagaacaaacctgacctgccggacggcaaaacagagctggctgtcagggatattgccggacaggagcgtgaccggtctgccatatctgaacgggaaaccgcactgccggagagtgtgctgcgtgaatcacaacgggagcgggaagcggtccgggaggttgcccgggaaaatctgctgcaggagcgtctgcagcagatggagcgggatatggttcgtgacctgcagaaagagaaaaccctgggcggagactga

SEQ ID NO: 147638 - DNA, 747 bp, Enterobacter cloacae
atgacaacggataacacgaacacgacacgtaacgattcactggctgcacggaccgatacctggttgcagtcgtttctggtctggtcacccggacagcgggatatcatcaaaacggtggcactggtgctgatggtactggaccacatcaatctgatattccagctgaagcaggaatggatgtttctggccgggcgaggagcctttccgctgtttgccctggtgtgggggctgaatctgtcccgtcatgcgcatatcaggcagtcagccattaaccggttatggggctgggcagttttttcccagttcgcatattatctggccggatttccctggtatgaggggaatatcctgtttgcctttgcagtggcggcacaggtgctgacatggtgtgaaacgcgcagtgggtggcgtacagcagcggccattcttctgatggccctgtgggggcctttgtccggcaccagttacggcattgccgggctgctgatgctggcagtcagccaccggctgtaccgggcggaagacagagcggaacgtctggcgctggtcgcctgcctgctggctgttattccggcgcttaaccttgccaccagtgatgcagcggcggtggccggttttgtgatgacggtgctgaccgttggtctggtgtcgtgtgcaggaaaatcattaccccgtttctggcccggggattttttcccggtattctacgcctgtcatctggctgtgctgggcgttctggcgttgtga

SEQ ID NO: 147639 - DNA, 861 bp, Enterobacter cloacae
atgaaaattacggatcacaaactctctgaaggtattgccctgacatttcgtgttcctgaaggaaatataaaacatcctttgattatcttatgccatgggttttgcggtatcaggaatgttctgctcccttgctttgcgaatgccttcacagaagcaggattcgcaacgattacttttgattatcgaggattcggtgagagtgatggagaacgagggcgtctggttcctgcaatgcagaccgaagatattatttcagttatcaattgggcagaaaagcaggaatgtattgataatcagcgtattgggttatggggaacatcgctgggaggggggcatgtcttcagtgcagctgcgctggaccaacgcgtaaaatgtattgtcagccagctggcttttgctgacggtgatgttctggttaccggagagatgaatgaatcggagagagcgtcttttctgtccacgctgaataaaatggcagagaagaagaaaaacaccgggaaagagatgtttgtgggggttacccgggtactgagtgataatgaatcaaaggtattcttcgagaaggtaaaaggtcagtatcctgaaatggatataaaaatacctttccttacggttatggagacgttgcaatataaaccggcagagagcgcagccaaagtacagtgcccagttttgattgttattgccggccaggatagtgttaatccaccagaacagggaaaagccttatatgatgctgttgcttctggtactaaggaattatacgaggaagctgacgcatgccattatgatatttatgaaggcgcgttttttgaacgtgtggcggcagtacagacgcaatggtttaaaaaacatctttaa

SEQ ID NO: 147640 - DNA, 561 bp, Enterobacter cloacae; identical to SEQ ID NO: 5114

SEQ ID NO: 147641 - DNA, 525 bp, Enterobacter cloacae
gtgtgctgcgatattcaggattacctgaaatacaggtgccatttatctgatatggagaataacatgaggaaatatattccactggtattatttatcttttcatggccggtattgtgtgcagatattcatggacgggttgttcgtgtactggacggtgataccatcgaggtcatggactcacggaaggcagtgcggatcaggctgataaatattgatgcaccggaaaagaaacaggattatggccggtggtcaacggaaatgatgaaatcactggttgcaggaaaaacggttaccgtcacatattttcagcgagatcgttatggtcgtattctcgggcaggtttatgcaccagacggaatgaatgttaatcagtttatggtccgggccggggctgcctgggtatatgagcagtacaacacagatcccgtgctgcctgtccttcagaacgaagccagacaacaaaaacgtgggctctggtcagatgctgatccggttcccccctggatatggagacaccgtaaataa

SEQ ID NO: 147642 - DNA, 591 bp, Enterobacter cloacae
atgaagctgattatttttattctcattgttctgattattgcagcgttacttatccggattatcctcagaagtgtaaatcagcattctcctttgctgatgcagttgcatgcggcaggtatacggaccggtgatgcagagcgaatactgtccggcggtgaatactggcaacgtcagaagacgctgctgacagaaagggaagtcagttttatgaaaggactgttcagaattgtggatatgaagcggtggtatctgtgtccgcaggtacgggtcgcggatatcgtccagctgaacgggaatatccggccacgatcacgccagtggtggcagttattcaggatggtgtctcagtggcatgttgatgtggttatcgttgagcggcgttcgttcagtattgttgcagcagtagagctggatgatgccagccatttacgaccggaacgcagacgccgggatattcttctggaagaggttctgaggcaggctggtattccgttgctcagaagccacgatgccagaaaactgctgcagatgaccggagaatggctgaatacaacaggaactgatcagcaatcaccggaacatcgtagctga

SEQ ID NO: 147643 - DNA, 258 bp, Enterobacter cloacae; identical to SEQ ID NO: 14880

SEQ ID NO: 147644 - DNA, 858 bp, Enterobacter cloacae
gtgactgatcttcaccaaacgtattaccgccaggtaaagaacccgaatccggtgtttacaccccgtaaaggtgccgaaacgctgaagttctgcgaaaaactgatggaaaaggcggtgggcttcacctcccgttttgacttcgccattcatgtggcgcatgcccgttcgcgtggtctgcgtcgacgcatgccaccggtgctgcgtcgacgggcaattgatgcgctgctgcaggggctgtgtttccactatgacccgctggccaaccgcgtccagtgctccatcaccacactggccattgagtgcggactggcgacagagtccggtgcaggaaaactctccatcacccgtgccacccgggccctgacgttcctgtcagagctgggactgattacctaccagacggaatatgacccgcttatcgggtgctacattccgaccgacatcacgttcacaccggcactgtttgccgctctcgatgtgtctgaggtggcggtggcttccgcacgccgcagtcgtgtggaatgggaaaacagacagcgcaagaagcagggactggatgcactgggtatggatgaactgatagcgaaagcctggcgttttgtgcgtgagcgtttccgcagttaccagacagagcttaagtcccgtggaataaaacgtgcccgtgcgcgtcgtgatgcgaacagggaacgtcaggatatcgtcaccctggtgaaacgacagctgacgcgtgaaatctcggaagggcgctttactgccagtcgtgaggcggtaaaacgcgaagtggagcgtcgtgtgaaggagcgcatgattctgtcacgtaaccgcaattacagccggctggccaccgcttccccctga

SEQ ID NO: 147645 - DNA, 264 bp, Enterobacter cloacae; identical to SEQ ID NO: 7651

SEQ ID NO: 147646 - DNA, 300 bp, Enterobacter cloacae; identical to SEQ ID NO: 7650

SEQ ID NO: 147647 - DNA, 666 bp, Enterobacter cloacae; identical to SEQ ID NO: 7649

SEQ ID NO: 147648 - DNA, 564 bp, Enterobacter cloacae; identical to SEQ ID NO: 7648

SEQ ID NO: 147649 - DNA, 732 bp, Enterobacter cloacae; identical to SEQ ID NO: 7647

SEQ ID NO: 147650 - DNA, 726 bp, Enterobacter cloacae; identical to SEQ ID NO: 7646

SEQ ID NO: 147651 - DNA, 1191 bp, Enterobacter cloacae; identical to SEQ ID NO: 7645

SEQ ID NO: 147652 - DNA, 819 bp, Enterobacter cloacae; identical to SEQ ID NO: 7644

SEQ ID NO: 147653 - DNA, 855 bp, Enterobacter cloacae; identical to SEQ ID NO: 7643

SEQ ID NO: 147654 - DNA, 453 bp, Enterobacter cloacae; identical to SEQ ID NO: 7641

SEQ ID NO: 147655 - DNA, 354 bp, Enterobacter cloacae; identical to SEQ ID NO: 105124

SEQ ID NO: 147656 - DNA, 963 bp, Enterobacter cloacae; identical to SEQ ID NO: 105123

SEQ ID NO: 147657 - DNA, 927 bp, Enterobacter cloacae; identical to SEQ ID NO: 21442

SEQ ID NO: 147658 - DNA, 684 bp, Enterobacter cloacae
atgtcccgttttatcctgggtgactgcgtgcgtgttatggccacgtttccgggcaatgctgtcgatttcatcctcaccgacccgccgtatctcgtcggtttccgtgaccgttccgggcgcaccatcgccggcgataaaaccgatgaatggctgcaaccggcctgtaatgaaatgtaccgcgtgctgaaaaaagatgcgctgatggtcagcttctacggctggaaccgcgtcgatcgctttatggccgcctggaaaaatgcgggattcagcgtggttggccacctggtgtttaccaaaacctacacatcgaaggccgcatatgtgggctatcgccacgaatgcgcctacatcctggcaaaaggacgtccggcgctgcctcagaagccattgcccgacgtgctgggctggaaatattcaggcaatcgtcatcacccgactgaaaagcccgttaccagcctgcaaccgctcattgagagcttcacacacccgaacgcgattgtgctggacccgtttgcaggcagcggctcaacctgtgtggccgccctccagtccggacgccggtatatcggtgtcgagctgcttgaacagtatcaccgtgccggacagcaacgactggccgccgtgcaacgggccatgcagcagggggccgcgaatgataactggtttgaaccggaggctgcgtaa

SEQ ID NO: 147659 - DNA, 222 bp, Enterobacter cloacae; identical to SEQ ID NO: 5758

SEQ ID NO: 147660 - DNA, 435 bp, Enterobacter cloacae; identical to SEQ ID NO: 28525

SEQ ID NO: 147661 - DNA, 771 bp, Enterobacter cloacae
atgaatgaaacgctgaatgcactgatttatcgccacgccagcaacctgttgctggcgcagggctggccggaagagacggatgttgaccagcgtaacccgaagtatccgggctggatcagcatttacgtgcggctggatgcgccccggctggcgacgttacttatcaaccgtcacggcggcgtactgccgccgctcctggcctctgccattcagaaactgaccggaaccggagcggaacttgttctgtccggcagtcagtggcagtcgctgccggtacttccggcagacggaacgcaggtgtctttcccgtatgccggtgagtggctggcagaggacgaaatcagggccgttcttggtgcggtacgcgatgcagtatgcagtgtcagttaccaggtggcagaagatgcgcggcgtatccgtgcggcgctgaccaccaccggtcagacgttgctgacccgccagacgcgccgctttcgcctggtggtgaaggaaagcgatcacccctgctggctcgatgaagacgacgaaaacctgcccgtggtgctcgatgccatcctgaaccggggcgctcgtttttcgtcggtggaaatgtatctggtcagtgagtgtgtggagcatatcctgtccagtgggctggcctgcgatatgctgcgtataccggatgaaccgccccgccgctggtttgaccgtggtgttctgcgggaggtggtccgggaagcccggaacgaaatccgcagcatggcggattcactggcgaaaatccggaaatga

SEQ ID NO: 147662 - DNA, 426 bp, Enterobacter cloacae
atgcaatatgcgaaacctgtcactctgaatgttgaagagtgcgaccgtctctcctttctgccttacctgtttggcctggattttctgtatgccgaagcgtctgtatacgcgctggcgaaaaaaatgatgccggaatatgaaggcggattctggcacttcatccgcctgccggacggtggcggttacatgatgccggatggcgaccgtttccacatggtgaacggtgcaaactggtttgaccgtacggtcagcgccgatgccgcaggcatcattctgacttcccttgtgattaaccgccagttgtggctgtaccacgacagcggggatgcaggactgacccatctttaccggatgcgcgatgcgcagttgtggcgtcacatcgaatttcaccccgaatgcaacgcgatttacgcggcactggactga

SEQ ID NO: 147663 - DNA, 423 bp, Enterobacter cloacae; identical to SEQ ID NO: 12468

SEQ ID NO: 147664 - DNA, 192 bp, Enterobacter cloacae; identical to SEQ ID NO: 5763

SEQ ID NO: 147665 - DNA, 228 bp, Enterobacter cloacae
ttgacgtttcgcgggaacctgctgctgtattccctgtggtatgaacttcacccgtttgagaaccttcgccgcaaggggcatcactgccacggcctgacgcacctgtcctgggcagaacgcaaaattttttaccggtttttgggtaaaaaattttgtgggctgttcatttaccctggacagtcagtgcggcaggttgtggctgtctatgcccccggcgacagggcttaa

SEQ ID NO: 147666 - DNA, 231 bp, Enterobacter cloacae
atgacggtaagtattgtttcaccttccgcagcggctgtaaagccccgccgtcatccccgtttcagacgcgaagacatccccgcgccggaaattgaccccgtgctgaaagccttcgggcgacacattgcccggagttttcaccggggacgtagtgtacacatccccgccatgaaaaatacggctttcgggcaggtgctccgcacactcgaactgaaacgcgcttttaactga

SEQ ID NO: 147667 - DNA, 1362 bp, Enterobacter cloacae
atgacattagcagcaatcaccatgaccgccccggaagccgccagccctgtgcagatgtaccgcgcgacctactcaccggatgacaacaaactgcgcctgtatgccgcgtcacgtcttgacccggagacgtataaaaaagtgcatgatgccggttttcgctgggcacccagacaggcgctgtttgtcgcgccagcctggacaccgggccgggaagacgtgctcctctcacttgccggagagattgaggatgaagacagcacgctcgctgaacgtcaggaagcacgggcggagcggtttaccggatacagcggaaagcgggccagtgaatccgcacaggcacttgatgaagtggaaagactggccgcgatgatcccgcccggtcagcccattcttgtggggcatcacagcgaacgccgcgcccgtcgtgatgcgcagcgtattgaaaacggcatgaaacgtgccgtgatgctctttgaacgtgcggaatactgggaagaacgggcgcggtcggcactgcttcacgcgaagtataaagaacgcccggacgttcgctggcgtcgtatcaaaaaaatcgaagctgatttgcgcaaggctgaaaagaccatcgcacagtcgcagaaatatctgacgatgtggcgggctgaatcgctggatctgaatatggcaaaactcatcagcagtcatgaccatatcagcgcctgtttcccgctggatacgtatccgcgcccggcagaaaaaagccagtatgaagggagccggtcgttatggtcggccctggatgatgacatcatcaccacggagcaggcccgcgaaattgcgatccgctgtcatgaacggcagattcagcatcagcaacgctgggttaaccactatcagaaccgcctgatctatgagcgtgccatgctggacgaaagcggcggcgtggttacccggacacaggattttgagccgggcggacaggttttcagccggggcgagtggctgactatcatccgcgtgaacaaaagcaacggggcggtgagttcagtcacaacgccaaattacagttttctcgggtacagcggcacgatgaaagtgacgcccgatcgcatcacggactacaaagcaccatcggcagaagaggctgccgtcgccagtcaggccgcgaagcgtccgccggtagtcaactatccgggggaaggtttccgggaaatgacaaaggcgcagtgggccgccctgccccgggactgtaaggccgtgcgcagtgtggaagaagcagaagaccacggggcataccgctaccgccgcacaatggacaataatttccgtctggtgaatgtgtatatcaccgacatgaaaatcacggaaatcccacagaaataa

SEQ ID NO: 147668 - DNA, 564 bp, Enterobacter cloacae
atgcacagtcagttaagagaacgtatccggctgatgcgcgcaaggctggataacgccgcgccggttgctgaaatccgggctgaatctcagctttttgtgactcctgccccggtctgtgatcgcctggtgacgctggcggaaatcagcaaccgtgatcacattctggaaccctctgccggcaccggggccatactgcgggctattcgggataccgcgccggaggccatgtgtgatgcggtggagattaacagcgggctggtccggtatctgcgggaaaattttaacggtgtcagggttcagtgtggcgacttcatggaatggcagccggtgcagtattacagccggatcattatgaatccgccgttcagtcacgggcaggatatccggcatatcctgcgggctttttccctgttgcgtccggggggcgttctggttgccgtctgtctcaacgggccacgccagcaggagaagctgttaccgttttctgacgtccgcgaggagctgccgcgcggcacgtttgcttataccgatgtcccgacgatgattattcgtttgcgtgcctga

SEQ ID NO: 147669 - DNA, 2001 bp, Enterobacter cloacae
atgagcaatacgcataacaatcagattgagaataccattcccgccggatacacgctcgattacatttccaataagccggtaaaggaaacaaagaaggagctcgtccggcagcgcgtgactcgcgctttgatccacgaatacggattctcgccggaagatatggagctggatttttccattggtggccgcaagaaggtggacgtagctatcttccatcatggcaaggaacacatcattgagaatctggggcgcgctgtgctctgccgtcaggaaccgaatgtcggcaaaaatgccgtacgcatccgtgattttgaacaggccgctcaagatcttgatgaaattgaagctattatgcgcgaggttgaagccgttaagtatggtttgtggactaatggcttggagttcttctttgttgaaaaagagcaacagcgattcgaaacaaagtgcaacccaatcggcgactggcctatggcggaagagtctgttggcaccaaagaggttatctctgatgctcacacgcgcgtcgctgacaacgagatgcttaaaatcacattccgtcgttgccataacttcatccatggcaacgaaggcatgccaaaggacgccgccttctggcagttcctctatctaattttctgcaaaatgcatgacgaaaaccttcggggaatccaacgtcagtcatggaagcggcagttctgggcaggccctaaagagcagtttgaagttgagggccgaaaggccattcgtgctcgtattgagacgctctttaccgaggttaaaaagcagtataagaacatcttccggggcaatgaggaaatcaccctctccaaccgggcgttagcctttattgtttctgagttagccaaatacgattttacccgcacggacgttgatgccaagggcgtggcctaccaagagttagtgggcgtcaatctgcgcggcgaccgtggtcagtatttcactccccggggcgtagtcaagctagttgtggaaatgctcgatcccaaggaaagtgagatggtgctagaccctgcttgcgggactggcggcttcttggtcgccactttgggacacatgctgaagaaattccgtgaggagcagaacacccagagcggaaatgaggacaccagcgagtttctgaacgtccacgatcggctgaaagagtatgctgcagccaatgtgttcggagccgactttgacccgttcctgattcgcgcagctcagatgaacatggtgctggcgggtgacggtcggggtcacatttacaacatcaactctctggagttcccgctgggacatttgaccgatctgccctccgctaaaagggaaattccattggggtcagtggatatcatcgccaccaatcctccattcggctccgacatcccgatcaccgacaagcatattctggaacaatacgagttagcacatagctgggaatcagatggcgaaggtggtttccgcaatacggggtcattgaaaggcagtgtggccccggagattctctttattgagcgatgcatcaaatggctcaaaccaggcacaggtcgcatgggtatcgtgctgcccgacggtgttctcggtaacccagcagctgaatacattcgctggtggatcatgcgcgaaacccaggtgcttgcctccgtggatctgcctgtggaagctttcattgccgaggccaacgttaacatcctcaccagcctgctattcctgcgtcgcaagagcgaagaagaaaagcgagctgaagccttgggcggtatcgatgagtatcctgtgttcatggctgtggctgacaaggttggttttgaccgccgtggcaacaatctatacaaacgcaccccagacggagaagagatccttgagcccaagcagcatatcgaacgcatccgaatcggcggacgtttcgtggaacggaccctgactcgtaatgaaaagatcgaggacaacgatctgccggtcattgctgagaagtaccgcgaatttctcaaggagcaggactaa

SEQ ID NO: 147670 - DNA, 315 bp, Enterobacter cloacae
atgaacgatcaagacgacatcattgaagcctcgcaggatactaccgaagagagcgctccggataagatctttgatgagacccagctcactggcggccgcaaattctggatcaggggcgacgagcctttcaccgaggtgggtcaacagtctattgtcctgcgcatcaatgaacccattgccgtcgccaaagcttggcaaccaaacctgctaactcatggttgggagctgacgctggagccgtgtattcatgacgaactgcctttggtggcagagaaatacaaggaattccgtgcggctggtgaggtgacgttatga

SEQ ID NO: 147671 - DNA, 1416 bp, Enterobacter cloacae
atgagcagaaagttccaagtgaaagcggttccgagtacttggctggaaagtaatggacggcggttagactgtggtccttatatgtctggtgcggcagagattcgcgagctcctaaagaaacacaaaactgatgtacttcccgttttgacagcaggtcacgatggtgggatttacaacggccctcagttcgaaagaaattatgttgatgatgcgcaatacggtgttccgtttttaacaaccactttcatgatgcaggctgatttgagccggttacctcttctgagcaagaaggatgcgcactctaggaaactcaactacttgcgggttcatgaagggatgacgttaattacgtgttccggaacggtgggaaggaccatttatgcacgctcagacatgaatggtgtttggtccaaccaagacattctgaagatcgttgctgacccgaatcgaatactttcggggtacctgaatgcatatctttgcacgagattcggagtgccctttgttgtttctgggaaatacggttcggtaatcactcatcttgagccaaagcattttgctgatctcttggttccccgtctcggaaaaactatcgaacaggaggctcatgatcttgttgagcagtctgcggcactactcacccaattccaagccaatttaactgaggcaacggagctctacttcgattctgttggtctgaaggacctcactgcaagcgagtggcattcttgggggccagatcttggcttcacagctaaagccggagtcaaatctctacgggcgctaaattttaacccacgttttaaccaactttgtgaccgtattaagcaaggtccttggaaacccttgggtgagctatgcgtttccggtacgcttaaacgcggagttcgtttcagtcgtgtggatgctgaccctgaatatgcatatcggctgatcggacaaaaggaacttttctggttacgtccacaagggcggtggattgggaaaaattttgtcccgggcggcgtactcgttgaagatggctgtgtgcttgtggctgctcagggcacactcggcgaatcagaactttattgtcgtgcggaatttgcaaccggtaaggctttggagaacgcatattcagaacatattctccgtgtattggcggatcagagtttgattgaacgtggtgccctctttgctttcatgcgttccgagtctgctttcagaatgcttcgttccatttcggtgggcagtaagcttcaagaccaccattacgcgatgctcccctcgcttcccatcccttatccgtcaagtgacatcaggacgcgctgtaatgaccttgttattgcagcatatgaggcaagggaaaaggctatcgagctcgaagaccaagcccgcgcccttgtcgagcgcactatcgaggagggcggtcgctaa

SEQ ID NO: 147672 - DNA, 4158 bp, Enterobacter cloacae
atggcgaaggtcatacccatcggacaacctgcaaacgaatctgaacgccaggccatcggtttccttcgggatcatctacccgatggctggttgatcttccataacttcgagatgcgtcaaggggaagaggtgttcgaaatcgatattgccatcctcgcgcctcatgcgatttatttggtggatgtcaaaggaacgcgtggcaacatcgatgtgtatggctcaaagtggtatcccgaggggaggcaaaaatttcattcccctctggcaaagctgcgcaaccacgccaaggtgatgagcaccttattggctgacagcaataaaggaataatcgagttacgtaaagtgcatgtacatgcggttgtattgcttacagcagatgatgcccagctatatgatcctgctggcatcgatagcccggatgtgactgactacaagcgctgcttaaaactctttactgataaggggaaaatcccaagccaccgtctttctgatattcgttcttatcactcacatattgacaaagccattcaaggtagagccaagccaaaatcagctccccctgtgtttggaagttggcaggttatagaaaaacttggtggcacagaccgttacaccgagtaccgggcaaagcacaatttattgggtgcgaaggcgggtcaggttcgcctaagagtttatcgcgcagacccctatctagaggaagccgcccgcaaagacgaactgaaaaaaatcagtaatgcttttgtggctgttcagcacatgagtgctcattcgaatgtattggctgtgcgtgacctgattcaatctgacgatggtaatgaaattactttggtggctgatgatatttcaggtcaagcgctgcgtcagcatttaaaaaagcctacttttgcgctcacaacagatcaaaaataccaggtgatcaaaggtgtactttctgcattggatcacgcgcatcaacatcaggtcattcatcgaaacctcacaccagatgcgattctcatcactaaagggggtatagctcgcatcaccgatttcgactttgctcgagtaggtaaaaaccgatcgatttcagaaactattgctaatcaaattaccgaagatctcgattcggcttatcgcgctcccgaattagtgatatccgagcaaaagtctgagccgaaagaggcctccattgcttctgatttattctctgcaggcttagtattttacgagttgctaactggtgagctgccctacgaaaatattgatcaaatgatcgaagccgatggtaaattccctatcaaaccctcggagcacaaacctgatttccccaaaggcgttgatgagtggttgcaaaccttttgtgagttcgatcctgaagatcgttttgccagcgctgctatagctaaaaagcaatttgaagatctgatattacccgaaggcaaaagtgaaaaaaaaccttctgcaccagcttttaacattcctgatgacctaaccaacctgcctgccgattttgtattagctgagcgtttcagtgtgcaaaagaaactcggcagcggtggctttggggtggtctataaagtatttgatgctttaggcgatgtagttcgcgttatcaaacttgtgaccaaagaccggcgtagcgtttatgagcgcctgcgccgcgaatataagacacttaccagcctgccagatcatccacatgtcgttaaggttatctgggccgatcgaatggctgatgcaaatcaaactccttatatcgtctttgagtatgtggaaggcctggacgtgtctgatctgatcgatactgaagccttggcgttggatgatgctgttcgcattgttcgcgaagcagccgagggcttagcgcatctccataaacatggtatttatcatcaggacgttaaaccctctaatttgctatggactgataaaggtgttcgtatcattgattttaatgtcgcggtatccgaaagtgacgaggttcagggaggtggtggcactcgtcgctacctgccgccggattacgattacaattccgagccggatgcttctgaccgggtagaccgcgacatctatgctttgggtatcaccttctacgagtgtctgaccagcaagtatccgttcgacgatcccacgccgccgatcaagactcaacccaaggaccccaggcagttcaaaggctgtgccgacttcagctcgtcactggtcaacattctggtgaagatgatcgcgccggagcgtaaggagcgcttcacgtcagtcgatgagttcttgactgccatggctgaggtcaagcgtctgcgctcggtgctgaccaccggcgagattggagccggccccaaggtggtatccaggctgggcttcgagccgaccaagcccaatagcaacccctttgtcacccatctgctgaccctctacagccagagccaagtatccaacgcgggaacccgtggcctcgacgaagttggtaaggccacctatgtgccgacatatctggacgaaaagcttaagcccgccttgctcaaaggcgagtttaagctcgtgatcattagcggtaacgcaggtgatggcaagaccgcctttattcagcaggttgagtcctttgccgagagcaagggcgcgcagatgcaacgaggcgcgaatggagcagtgttccagatcaaggggcatacctacctgagtaactatgacggcagccaggatgaaggcgatgagcgaaacgatgcggtgttgcggaaattctttgctcctttcgcgggtaaggatgcctctagctggcccgaaaatcagactcgcctaatagccattaacgagggacggctagtcgattttttcctagagcatgaagaggagtacccgctgctcgccaggcagatccaacagggtttggctggggccgttccggaaggcggtatagcgatcatcaacctcaatttgcgctcggtagttgctgaccccgaggaaagtcagccttcgatttttgagaggctgattgcccgcatgacacaacaggaatactggcaagcctgcgagaagtgtgacatcaagggcaagtgttttgcctaccataatgcccggactttccaggatccggttgccggtcccaaggtgatcgagcgtctgaagatgctctacaccattacccaccttcgcgggagattgcatatcactatgcgcgacctacggtcggcgttggctttcatgttagtgggcacccaagattgtgacggtattcaccagctttatcagaccggtggtgaagaggtccaaaaccgtatcttggacggattctatttcaactcgtggcttggtggggaaaaaggctccaatgaccgacttattgctctgctgcgcgagatcgacattgctgaagtcagcaaccctgatctggaccgcgagttaggctttctccatcctagggctaaggctatgagtcgtttctcgtttgcagaacgagccggatatgacaatgaattggttgaagcgttgtttgacagcctgcctcgcgattactcatcgaaaaatcgtgcccgattgatttccagacatcggaattacatttcacatatgcgacgtcgccatttcttcgaacgaagggacatagggtggaaggagatgctgccatatgaaagcatcgatcccttcttggtctccacgcagcggacaggtacaaaaagcaacgatgaggtgactgcaattctccgcgccatcaaccgaggcgaaggtttaagcgaccctgcgaggttaggtaaccagttggcactgcgtgttcgccaagtggataaaggtaccattcgcagttaccggcttttcgacggtgactatttttcgcttcgtaccgaacaggagaccgcgtctcatcctttcctcgagtgcctgtctcaggcgttagtcctgctttatgactccggcgaagggcacaaggccagcctaagaatcaatctcgatatatatgaaatgctgatgcgccttaacgacggctaccgaccaagcgtagaagagcaagaaggctttttgttgagcttgtccgtctttaagaacttgttggcctctgtaccttacaacgaagtattgttaaccaaggctggccacaaattttacgaaatccgtcgagaacaagatggacggctagtaatggaagcatctgaaaagggggccgaatacaatgtcaattaa

SEQ ID NO: 147673 - DNA, 1683 bp, Enterobacter cloacae
atgtcaattaaaggccgtgacaaagagtttcgaatcccgaaagtttcttatctcgattttaaacatattgagatggatcgcgtactcaccatgttgtttccacgattgaaatacgatggctatggtagtcgcagacctcctcgcggtggtgatctttcagttgaggagtttctcgaagatttccttgaacatcccgagtggtttgctggtttcgatcaaaaccctgaaattgttcgagcttggattgaaacagatcttatggatctagtgaatagaggtaaaagcaaccaagctctagctgcaccacgtcctttgcatggaaatacctataagtttcgtaacgcaaagcatacccgagattacggcgctgcagagcaaatctactggatgcttttctatgcccgcaaaggcaagggccaagcggcgcgagatgccttgaagcgtttcttcttcccggggatcgacttggtgacggaccgttacgatcccaacgcttccgtggatgtggaaacgcaggccatcttgcgattagaccaacaggttacgcaggatatgaaggattccaaggagcccgcacgtttccaacctctgtgtatagggcaggccgatattttggcagacgatattctgcgtttactcgcctatgagccttatatcccgcgctcggtgttggttgactatctcaaaactctgatggctttccatctggcactttatcacctcaaactactgcaaatgctgcccaagctggtgaaccagcgctctggtaacgatctctgcaccgccagggaatgtccgatcaacccgggtctcgacaatgctctggaaggttgcccttaccgcttggcgttgatagtagatatgggggacgtcaacaatccgcacatggttgagttagctcgaaaatccactgaccggctctatcgtcagatacctgcttttgtgcaggccaattttgtcgtcaagaaactcgatgaaatggcggaatacctgagcaaaaaaactggtaaattggctcctcccggaggcggtgtgttcactgttagtgatctgatatccctgctgaagcccgaacacgacaccgagcgtcaagcctacttcaaattccgcttggcgagcctcattgaagaatcggcctccaggaatgaggatttagacccagagatcagggacgtcaccgccatgggcttgggtgaattcgattccttcattgaaatactgatggcctatcgaggtaaatatcaccgccaatacatcactgagtgcttggattctcttctgctgaagaataaagaaagtgggcttttggctcaggcccggactaagggaagcccacgtcgatttgtgttaggaagcaagctgctcgaagtgctcctccaggtagctgtactcacccaagacggcgggcgttttgtgacccacgaggttcgcatcgaagaattgttagcctttttaaggaaccgctacggtctttacatcgaccagttaccagaaggaaccatagctaacagcagcatactagacaaacgtgccctgcgtcttaatctcgaagccttcaagcgccgccttcgtgaaattgggttctaccaggatttgtcggatgcttatgttacccaaaaagtatcgccccgatatgcaattgaaagatttgatagaactgataagaatgggagacacacatga

SEQ ID NO: 147674 - DNA, 5454 bp, Enterobacter cloacae
atgagtagcgcgttcataaagcttccacaggataaattgaatgcggcgttggctggagtgctgtgtcctcgtatcgaagcgatcctgagtgatcgtggcccaggccactgtgtgcgggtcactgaccttgatgacgaagttatggagtcagtatgctgggaaattaggcgaatctggcctgacgggaacatatttatactcggcagtcatgaccaagaaggcatgccttttcgagtaacttccagcaagttggtggaactgcgtaatcctgacgcgaacggcgagctgcgccagcctttgctagtgttcataccgacctcgctccgtactagtgccgaggattcttttggcgtggcgaccttcgaggaacttaccttcaccgatatctacgaggatctgatcgaatcgctgtttgaccggctcccggctacgctggctagctatgttcgcgatcttttgggtattctcaccgaggaggaatggctatttgccgacgatgtttctcgcgtgcggtatctacttaccgcgctcgaaaacgggattgatggcgaaacgcttggggccagtctgtatgaattggcattgattccggacttcaagctctttgccgatccgggcatagtcattggaaaaattcgccgtaatcttgtcagcgtccgcagtttgataacctcgcacaagtcggttcgtggtcgtattgctgatcttgggctcagtgataaggcattggagtcgcgtctattcacctattttgaaaaacacgatatccatgagtcagaatcttggacgccacccattgcgacagacaagagttggtggagcatttctttcgataaatggatgttcaaagaagagctatcactggacaaggttcttctgactgtgttggaaaccgacttgccggtcgttgcggacgatgaaaccgacgagcaactcactggcctcatcgggcaacaggttctggttccgaacgaccgtcgtaaaatgaacgtggtgtttgaggttaatcctcacccctgcaaggtcagtgggcttgaccattttatggtgcaaatcatttcgcagaatgacggcccggtagggaaatctaaaaaggtaaaggcctggaccccgaaccgcctgcaatgtactacaagccttgctaaactcaataaaatcgaattcgatgaaggatggcatttcatccgtgtaatgccctggactgccgatggcgacccgattccgctggaagcggattccacctccgagggcgctaagcgctcttacgagagcgagcctttctacgtcctgcccggtggcaacattgaagaagagccccctcaacgtgccgttcctattgagcagagcctggagcatgcacttttccgactgcaattgacagccttgggcgatgaacgtgatcccgatgatatcgccatcagtggtgtcgcctggtccgagggcggtcgtaccaaaaagacctcctgccttgaaaccttgcacgcaaaattcggtcgtgagggggctgttcagattccgctatcacgtacgctcaaaattatcgagcaacgcatcttagcaaagcctaaacacccgtcaggctggcgaatgcagataaacctggataccgctgagccgccctccgaggtcgggctcatgctgccctcttctgctgcgatggcatctttcctggctgcccgtgaagagttttttgcagcggtgcgcaaagacactgccgaactgatcatgcaggggctgttgttccaggacgctgaaaaggaatgcctcgcgtatgctgaaagctatcttgacttggtcaggaatctcatccgccaggccgagatgacttctggtgtcgagcgccagcaacacctgcaatcgctaagaaacatactggccgttgattcaatccatgtcatcctgaccgacttccgtggaaggcatcgcgaggctgttttggtctccccaacccatccgctccgagccttgtggctgaacagttgggtcactctgggcaaggattggatcgggaagatcaagtcaggtgggaaagaatatattcctcacgtccgttccgcactattggatagccttgtgccctcagcctatcctgtcggcattcccgtagaggatggtcgtatcttcacgccggtggacaatctaaatacgttttgggctctatacgctccaacaaccgaggataattctcgtggtctgatggcggagatctgttcggcacttggcttggccgagccctctgcggcgggaactgatatttccggaaaggtcattgcggataagattgagcgctatctctcccagcatccttatgtgagagagctatcgctgaatatctttaaccccggagctggttcgctaatagcagaggctcttatagcgcttcagcagaaaggtgagtatgccaatttacgctatgatatacggctctttacctccgagcctgactcgccagttttgggtgaggcgcttgaatccatagtccgtcccggagcgacggtgaatgaggctgcagacgcgtttacggcatcaactggcaatcatctgttttccaagctgaacttggccaagcacgcgctgaatgaattccatgcaaattccaaggattttccagcgcacatcagcgttcttttggatgtgttccccgccgaggagctttccatttccgagaggccgatgggggtgactccgttgtatgggttgatacagggttttgacaccgaattcgttgacgacgattcgggtaccttctggaataagcagcctattattgggcgctccttcggtgcgaataaccacgctgcgtgtttcgatttgctgtcgtcgctgagccgtcacctctgttttgcaacctcagcggttgctgcttctggtgctagtttcaatgccgtacccgttgtaacccttggcctcgatgtggcacaacgagaactgatttacgaggttcaccagatcagcgattgggtgttcactatcgaccgaaatatggggattgagtttttcgaccatggcggtcggaagaacagaccggattatctgattgactatgtgccaggaaccagctcccaggcgacacataatctgataatctcctcgcgctctaacgatgaattggagaccatgctgaagccggtgctgcttgagcacggtttgtccgccgacggcgagcagtcggttcagatacttgcgaacctacgctcgctttctggtcagcttgccttgaaactgatttccgcacgtacgcaacaggcggaggctcttggcctggctctggcgaggctctatctcgaatatcaaggcgcgttaagcaatcagatcattgtgccattagacgcacacacggacctctaccgctcaagcggtgagtcagacgatgttaacgatgctatcagcctacaacgtaccgacttgggtttgtttgatttagatttaaacaccaggacgatcacctgtaatctggttgaggtgaagtgttattcgcaggttggtgcctttgcggctttcaaccaactgaaggaacggatctccgcccagataaatcagagtgagcgcatcctccagcgtcactttgacccggccctgaaaaaaccggatcggccggataggttgctcaagagccgggagttggctcagattcttaggttctatctggaacgttcactgcgttatgggatctttgaagagactgccgcgcacgaagcgagaggactacttgaatccattgagcagggctactcgcttcaattcaggcggtgcgctttgattttcgactttgacaagtctggaacagaatctccggataacgaggttggcatcgaattccatcgtattggcaaggatctcattcatgccttgctcgagagctgccgcaagcctgtgtctgtcgagagtgaggaagtaccgaccgctcctaatctgagcgaacagttcatttcgaacgtaccgaagctcgagactgccgctttcatcgcacctaacagggtccgcccgacatcctggacggtggacgagctctgggacgatgagcgggagacaccagtcaccctgccaacaccttctgtctcagtggaaaccatcgcacgtgttcaaaaggaagcgcaggtgaaacccgtcgagcaatcacctgaacctaccaccattgtgcccaaacaagaaaaagatgacgaacaacccgccaccgttgatgtggaaccggaggaagctgttcaacccgagcttgaagtgcaggagcatctgacatccgtgcctcaagccgaagtcagctacgacatcatgctgggcgttaatggtagttcaccgcaatatggattgctcggagaggtttccggacggaaaatcgcgctggacctcaatcatacccacacgatcagtctctttggggttcaaggcggtggaaagagctacacccttggaacagcaattgagatggcctcaatgccgattcagcacattaatgtgctgccaagcccgctcgccacagtcatttttcattatagcccgacgcaggattatgcgccggagtttacctcgatgattaatgccaactcggtagaggatgagatctgtatccttcgtgagcgttacaaggccaacccggaagcattgaaggatgtcttgattcttacctctgccaacaaggtagatgagcgtagggccgagtacccggatattgaggttaagccaattgctttttctgccgctgaactcaaggcagcacactggaaattcctaatgggagcgattggtagccagagcatgtatatgcgccaaatcaatctcatcatgaggggactgcgggataacctgactttggattctctgcgagcaggcatcgataactctggtttgtccgatcatctaaaggagctggcccagacgcgcttactgtttgcaagcgaatatatcgatgataaccagcgtctccaggatctgattcgtcccggccggttgattatcgtggatctgagagatgaatacatcgagaaggacgaagctctcggtttgttcgtggtgatgctacaggttttctcagaagcaacctacaagggaagcgccttcaataagctggtggttttcgatgaagctcacaaatatatcgagaacgatgatctggtttccggccttgtcgaggttgtccgtgagatgcgccacaagggaaccagcattatggttgcctctcaggatccgccatcagtcccgatctctcttatcgagttgtcttcacagatcatcatgcacaagttcaactcgcccgcatggttgaaacacatccagaaggcgaataccgctcttggtgagttgacctccgataagatgagccgtctcggtaccggcgaagcctatgtatggtcgagcaaggcctcggacgactcattcacccgggccgcggtgaagatcaagtgccgtcctcgcattacccagcatggtggcagtaccaaaacggccgtagggaggtaa

SEQ ID NO: 147675 - DNA, 216 bp, Enterobacter cloacae
atgcgcgtactgaaatgttacctggcaaatgaccgcgaaggtcactttgtgacggccggtgcgctcatgagcgcaccggcgcagatatggagctgtgcttcctgtggatgccgtctggtgctgtatgccggcacgttcagcgacccggcgtggtttgagcacgatacgcagaccgtggcttgggagtgcagacgaaaaaccatggttctggcatga

SEQ ID NO: 147676 - DNA, 423 bp, Enterobacter cloacae
atgtacgccaaatctttcatagcccttgacggtaatggtcgtctcaccgcagccagaacagcacaacagtatccgtatgaccgctacacctgccacctgtgtggcagtgccctgacgtaccatgctgaatacaacacagaacggccgtggtttgaacatgtgcacgggatgctgacagagaacgggcggcagcactgtccgtatgtcagaccagaacctgaggaggcccgccacacccgccaacttaaatgttatgtacctcatgcccgccctctggtttaccaggatgactggcactgcagtggctgcgacagcagttaccatggcgagcgctactgcctgagctgccggaccggtgagttcagcaggacactctctggtgctgaaatccatactgcagaggtaacaacatgcgcgtactga

SEQ ID NO: 147677 - DNA, 228 bp, Enterobacter cloacae
atgaccgtcacaacaccgacagcgcagccattatttaattccgaagacccgcttatcgacatgaccttcatcaccacgtacaccggaatgacggacaagtggttctataaactgatcggcgacggcttgttcccgaaaccgattaaattagggcgcagttcccgctggttcaaaagcgaggtggaatcctggatgcgacagcgcattactgattcccgtggcatctga

SEQ ID NO: 147678 - DNA, 321 bp, Enterobacter cloacae
atgcacattgacgatttaattcgtgacatgctggaagtactgccgcacattaccggcacctctgacatgcaggattttcttaatcgctattccgaatcagatcagttagcgatgctttccgcgtaccgcataggcatacgctactacggctatgattcagccacgctcaaacaggatgatgaacccgtcaaccgtgctgttgatgctcacatcagtcctgctgactatgcgaaagtgttgttttcaaaacgcggtgagctcagcaagggcttggggtcttttctgcgttgcacgacgcaacagcagcgaaatgatttctga

SEQ ID NO: 147679 - DNA, 594 bp, Enterobacter cloacae
atgacgattaacccaccagtgattcctcgttatacaatggactggtatctcttatcaaatattaactatcatatcgatatgatggtgaaccgatactcctgcctgtattcattgcgctttgacttatgctatcgcagagactcttatcggtatatgaacagtacccccagaacattggaatgcgaagtccgtgtattaatggccgagatggagaagctccctgctgtcgttggatatttctgtgtaatggaatggacccaggaccatggctttcatgtgcatgctgttttatggcttgacgggcatattactcagaaaccttttgtctgggctgaaaaagcgagtgccatttggcagaagattacacagggggaagggcatttatatcgttgtgagagaaaagaatcctatgtagcggacatcagcattccggtccggtacaacgatgcggcgagcattgccaatattcgctatatcctgagctatctggcgaaggcagagcaaaaagaagggctttgctggcattactgcaacgaggttccggcccgaccatctgctggtcgtcccaggcagcctgcattcacatctggttga

SEQ ID NO: 147680 - DNA, 987 bp, Enterobacter cloacae
atggctatacgggacagcgatcctgtgctgggaagttttcctactctgggagtgacacagttaaaggcttgcttgtattatttactgattaatcaccctgaactttccaattgctttaggcctttcctgatttatcccaacaaagatatggagaaaatgcctgtcggtattaaggtcgatgagaaatacattcataccggttcgctgagagattcactccacaacgcaattaaatcgctcggcatatccgacgacaaaaaaaagaacctcttcagagacatgtatcggtcagcagatattcttacactgacaaaaaaggatttaacatggcttatcgaggataaaagagcgtgttactggctttggttgcatctgctgcatgacaatatctttgcgctggataatgagaacatatctttgctgaaaacagtcttcaccataataaatgataatatttacccttcagaagatgaacgtctcaatatggtcattgagtcttttcattcggttattatgcctgttgaagataaaaaacacctcctcatttattttaagaaactttggaatgattttattgctaaacagcctagcatcaggtggatagaccagaaaaacaaagagatgggagagtttttgtggcgctatctcaaaaaagacggtgaactgatgcttgcgcttccgtattatttcaccatgcctcatacagacaatgaaagctgcacgtcatttatagcagccctggattattgttcgcttcctgaaagtaacagaaaactgtttataatcagggcacagaaagcctggcatcagcataaactcagagagaagcaaaagaaagaaaagcgcaagccgatcaacatcagcatttctgatgaggcaaaacgaaaattgacgggtctggcgaagcagaacaacaccacaatgggggggatggtggaaagacttatactcaatgcgtctgactcatcatccgaaaaccacaaataa

SEQ ID NO: 147681 - DNA, 663 bp, Enterobacter cloacae
atgatttttaacgacgagatggtgcgcgccattcttgatggcagcatgacgcaggctcgacgggtaatgaaggtgcagccagtgttgaatggtaatttctatgaggtatatggggcgatgtggagcaaaggaatgacatctgttccagcagttccgggccacagcctttcaacaagatgtccattcggcactataggcgatcgtctttacgtcagagagccgttttcacgcctcgactcatttaactttttcgaccctgccgtaccacgcgaggtcccggatttctggtattgggctgatggggagccaacatggggtgactggacgcggccacagtccggcgcagtaatgccgcgggaagcaagccgcataaccctcgaagtaaccgacattcgcgtcgagcgcctcctggcggcggatgaatcggctctcctggataacctgggcgacatgctcgagaactgcgattccgttgctggtcgcgccttcgaccatgcggaacattatgcgatcgctggcgtatcggtgggaatgtgcccggaaatgcatggctttaaagcgtggtgggacaaggttaacggtgctggcagttttgattccaacccctgggtctgggtgatcgattttaagcgtatcgaaggtgatgaccatgaaactgattaa

SEQ ID NO: 147682 - DNA, 1131 bp, Enterobacter cloacae
atgacctatcaactacacgtcgggcgttgcgaggaggtcctgaaaacgctgccggataactccgttgacgccatcgtgacggatccaccgtacgggctgagcttcatgaaccacaaatgggattacgacgttcccaccgttgagcagtggcaggaatgcctgcgcgtccttaagccaggcggacacctgctggcgtttggcggatcacgtacctatcaccgccttgtggttaatgcagaggatgccggtttcgaaatccgcgaccaaatcctctggatttacggcagcggcttccccaagtcgcataacctcgatggcgattttgatggctggggaacggctctgaagcctgcgcacgaaccgatcgtcatggcacgcaagcctttcaaaaaaactgtgtcagcgaacatggctgagcatggtaccggggcgatcaatatcaatgcctgccgcatccctaccgacgaggcgctaaatggcggtgctggcagtctactttcacaccagcgtgatggtaccgagcctgttgctgattatgagcaggcaccggaggggcgctggccagcaaacataattcacgacggaagtgatgttgtcgtgtcagcgttcccggatgcgaaaggccaacaaggagcgcttaccggcaatgagcccagctcgaaaatgggtgcggcgaattgctatgggcaaatggaccggcggcacgaatcaactccgcgcatcgatagcagtaagagcgccgccaggttcttctactgcgccaaggtaaaaccgaaagagcgcgatgaaggtctcgagagattcattgcgacgtcagccagcgacatgaccggcggccgcaaagaaggaagcgtcggcattaacgacccgcgcgccggtgccgggcgtaccaatggcgcgaagaacaatcaccccacagttaagccgatcgcccttatgagctatctctgcaggctgattacaccgcctggcggtaccgtgcttgatccatggatggggagcgggagcactggccgggcagcaatcgaggaaggtttcaacttcattggcatcgacctgaacccggattacgtaactattgcttctgcgcgaattgctcactccttcaaaaagacgacggaggccgcatga

SEQ ID NO: 147683 - DNA, 348 bp, Enterobacter cloacae
atgcgcaccgcgtgctcccctgacggcctttgcagtaacaatttcggcctcgagttgaaatgcccgttcacctcccgcgacttcatgaaattccgcttaggcggattcgaagcaattaagtccgagtacatggcccaggtgcagtacagcatgtgggttaccggaaaagacgcttggttctttgccaactacgacccgcgcatgaagcgcgaaggtattcaccacgtagtcgttgagcgggatccgcagtacatgtcagatttcaacgaaatggtgccggagttcatcgacaagatggatgaagcgctggcggagatcggcttcacgttcggggaacagtggaaatga

SEQ ID NO: 147684 - DNA, 540 bp, Enterobacter cloacae
atgactgatcgcattatcgccttttccattttatgtctggtatttgggttgccgttaggcgtggccgccctctttaccggcgagctgattctggattttgtgttcttctggccgctgttcatgtccgtgctctggataacaggcgggctctatttctggtttcagcttgaacgccactggtcgtgggataaagagacgcccgccccgacgctcgccggtgagccgctcatctccattcttatcccctgcttcaacgagggacgaaatgcccgggagaccatcagcgccgcgctggatcagcggtatgaaaatatcgaagttatcgccatcaacgacggctcgtctgacaacaccgcgcaggtgctgcaggcgctggcgcaggagcagccgcgcctgcgggtgattaatcttgcggaaaaccagggaaagcgctggcgctcaaagccggggcagcggcggcccggggcgatctgctggtctgcattgacggcgacgccctgctcgaccgcgatacggcagcgtatctggtggccccgctga

SEQ ID NO: 147685 - DNA, 924 bp, Enterobacter cloacae
atgatcaagcgttatgtgaaattgctagtcagagcattcaatagcgagtgtgacgccgcaataggaaaaatcaaggcaggaaatgttgaacaactaaaaaaacgtattgaaagcgcttttgatgcactcaataaatttggacaatcaatgaatataagtatcacttatgattatctgaatttgcggctggaagaattactgctttgccacgaaaaagaacttaaaattcaggatgagaaagatattcttagagaagaacgtgagttgcaacgagaggaagagaaagcacagcgtgaatatgagaaagctattcgcgatgagcaaaaggcagagaaagacttccagaaggcaatggaaagagcaagaaaagagcttgaaaaggcaaatgctgaagaaaaatcccgtatcgaagccaaaattgctgatctcgaacttcaggttgaagaggcaagggccttgtctgagcgcgcaaaatctcaggctcagttaacccgaagcggccatgtctatgtgatttctaatattggtgcgtttggtgagaatgtctataaaattggtttaactagacggcttgaacctgaggaacgtgttaatgaactgggttctgcatcagtgccgtttaaatttgatatccatgctttgatttattctgatgatgctccagcacttgaaaatagcttgcataatgaattttcttcgcaccgaataaatatggttaacaatcgcaaggaattctttaaaattaaattgtcagagattgagagtaaggttaaatcacttggttttgatgcgtcatttacagagtatgcacttgctcctgaatatcgtggcacgctctctattatgaatgaaaaagacaaagcaaaatcaattgcagatgcagtggagaataagattggagaattgttcccagaaatgacttaa

SEQ ID NO: 147686 - DNA, 1287 bp, Enterobacter cloacae
atgaatttccctaccggcgtagagttacataacggaaagatccgcataactttttactatcgaggggtgcgttgtcgtgaggtccttcgcggctggctggtgaacaacagcaatataaagaaagctggcaatctgagggcaatgattgtcagtgaaattcagatgggtactttcgattacgcaacccgctttcctgaatcaaaggcgttgagcaagttcggtaccacaaagcggataaacacttttgctgaattatgcgagctctttactgactcaaaggcgctggaggtatctcatgccactatgctcacgatccgctcaacggtaaacaccctcaggcgcgttgttggcgacatgacagccttaactgacatacagaacgccgacatactttcatatcgtcgcgagctgttgtttggtgaggtggtgaatcccggtttaccaaattttaagaagcagggccgatcaccagcacgcgtaaatactctaatgagcgtcctcaaagagatgctcaggatagctcaccgcagccagttcatatctcatacaccatacgaaggcatatcgactttaaaggtatcgaaacgaactcctgatcctcttacatatgacgaatatcaggcattcatcgcgaacctttctaaacagcactcgcttttatggattgtggctattcataccggtctgaggcacggtgaactctgcgctctcgcatgggaagatattgacctgttaaatggagagattcatgtttcacggaacctgacccggaaaggcttattcgtaccgcctaagacggatgccgggatcaggacaattaccctgctccagccagctctggatgcactgaaaatacagttcgaaattacaggccatctgccgcagcacgagatcgtctatcatcatcgtgagcatggtaaaactgaaatgcaggttatcaggccagtattcgtcccatcgagtcgatcgacaagaaaggtcgggtactattcgaaaaattctatatcctatggatggaagaatggcttacgtcgtgcgggcgttcgtaaccggcatccgtaccagtccagacacacctacgcatgctggtcgctttctgctggggcaaacccttcctttattgcaactcagatgggccatgaggattcaaggatggtttatgaggtttacgcgaagtggatcggtgatatggacaaggaccaggttgccatcataaacaagagaattcttgccaacatgcccccgttacgcccccaaggcgatttgaagttgaagaaaatcctttga

SEQ ID NO: 147687 - DNA, 216 bp, Enterobacter cloacae
atggcacaggtcattttcaatgaagagtgggttgttgaagccagactcaccgaaagaaccggtctcacagaaggccaaatcaaaaattaccgactgaaactgtgggttgaaggtgttcacttcaagcatcttacagcccaggggcaaaccgacaattccaaaggattgctctggtacaacctacctaaaataaaccagttagtgcaggatatctga

SEQ ID NO: 147688 - DNA, 660 bp, Enterobacter cloacae
atgatttttaacgacgagatggtgcgcgccattcttgatggcaggaagacgcagacgcggcggatcgttaaggtccagccagacactccagagtttggcctgcgacgcattattgagtcgtccatagctaatgagatcgggatgtatttctggtctcaagaagacgcccgtggaattaaagcgcgctcaaagcagttttattgcccatacggtgacgtcggcgatcgcatctgggtgcgtgaaacattcagcccggttcctgataatgaagagcctgctggttgttcagcccttctttacgcagctgacggtaacggtccgtatggtaaatgggttccttcgattcacatgccgcgctgggcctgccgactcaccctggagattaccggcgtgcgggttgagcgattgaatggcatcagcgaaacggacgcagaggcggaaggcatcgacatggaggcgctttttgacgcccaggactgttacgactgcattgcagaccacaacatgacaggaaggccaacggcaacaggcgcatttaagtacctgtgggaatccatctacggcgaagagagttggaaatccaacccctgggtctgggtaatcgaatttaaggtggtgcccaatgttcaagctaattcaacggggtcagatttacgctga

SEQ ID NO: 147689 - DNA, 222 bp, Enterobacter cloacae
atggctgacatcatcgataccgctgcagagattgaagagcttcagcgtaacgctgccctttccgctcaccgcatcgaccgtaatgccgtgtcagctgagcattgtgaagaatgcgacgaaccaattcccgagccgcggcgcgctgccgttcccggttgccagacgtgcgcggattgccaatccgtcatcgagctgaagaataagcaaagggggttccagtga

SEQ ID NO: 147690 - DNA, 909 bp, Enterobacter cloacae
atgaaagaagcatcgaagatgttagtccagatgacgtgtcaggatttgcacaatgtcattggtttgcaggagttgcagtctggtctcattccctgcgcctcgccggatggcctgacgataaaccagtctggaccggctcctgcccgtgccagcctttcagcgcggcaggcaaaggagatgggtttgctgacgagcggcacttatggccccacttcttccacctcatcagcgagcgcacacctcagcatgtctttggcgaacaggttgcaagcggtaacgcaaacacatggttcgaccttgttcaatcagacctggaaggaatgggatacgccttcgggcttgtgccgtttacgtcagcgagcatcggcgcgccgcacatcagagaacgagcttattgggtggccgagtccattagcgagcaatgtccaaaattgttatcaggactggctaaaagtaatggcgcggaaggaggcaggacgtcagccaaaccttcaagattttgcggtgctggctgcatggcctactccaaccacggaatcagcgatgagggagaaacgctacgcacagggcgggatgccgttctcgatggcagcagcgctaaccggctgggtaacaccaacgtcccgcgactggaaggactcgtcagggatgacagcgctgcgggatgggaaggacaggctggaccaactgccgaggcaggcttacacatgcggacccttgaggttaacggtttttggcgagatgcggactggctcttttgtcgagatggcaaatggcgtccagttgaacccggcacattcccgctggttgatggggctgccgcgcgcctgggacgagtcgagtccggggtggcaagagtggcaagcagcaaccgcgtcggcagactcaaaggctatgggaacgccataa

SEQ ID NO: 147691 - DNA, 552 bp, Enterobacter cloacae
atgacagatgaattgcagccgcactgtgttgaatgcggcgttattcttcccggctctcattcgcacaggaaatactgttcaggtaagtgcaaggcgagatggagaaagaaaaatccatctcccaaaagagatgcaggccatgcctgtagggtttgcggaaagatctttccgatagggccaggtcagcacaataagtggctctgttctgatgaatgcaggcgagcaagcaatgctttatctgttagatcatttcatgacaggcgtcccaaaatggaggcgatttatagagccagaacaaaagctaaactaccgccagactctcaaaatcgtcgtttttatcaattaaatcccgacgcaccaagagcttgtgaggcgtgcggagaaagtcgtgttacggaaatagctcataaacctggacatgaaagatttggccagcgtaggtcttctgcgaatatgaaatggccggaaatggtttgggttctttgtccaacatgtcatagattgatcgatagaatgcattacccgcctgaagatattgggctaaagctttag

SEQ ID NO: 147692 - DNA, 153 bp, Enterobacter cloacae
atgactcacgctcacgacgacatcagggttggcacactgtgccttcccttcattggtaacggctggctaatgccatggggtgaagtagtcagcaatccattaaaggcgcagcgactcgccgaggaatatcgggaaaggcaggaggcggcatga

SEQ ID NO: 147693 - DNA, 429 bp, Enterobacter cloacae
atgaaacgcacacccttctaccgccggcccgggcgaaccgggcaattctctggcctacgtgaacgcgttatctggatgattcagacgcgcggccgcccggtgaccggtagcgaaatcgctgagaagtttggcgtaaccctgatcgagtttaaccgggtcgacaacggcatcacccgcggctccggacagatagcgcagatcgttgagtcgaaaaaatggctcaacgaggacggcatctgtgaccggacatttgacctggttacgaagccaaaggtcgtaacaccacagggtaaatcgcgccttttcacgcggcgcgctatagagcaatcgcaagaaggtagacggcaggaatgcatagcgcgtgccgcccgccgtcgccgcctgattgctcatggcctctacatcgacgaaatggagtccatcctatga

SEQ ID NO: 147694 - DNA, 348 bp, Enterobacter cloacae
atgcgcaccgcgtgctcccctgacggcctatgcagtaacgatttcggcctcgaattgaaatgcccgttcacctcccgcgacttcatgaaattccgcctcggaggtttcgaagccattaagtccgagtatatggcccaggtgcagtacagcatgtgggtgaccgggaaagacgcctggttttttgccaactacgacccgcgcatgaaacgcgaaggcattcaccacgtcgtcgttgagcgggatcctcagtacatgtccgatttcaacgaaatggtgccggagtttatcgagaagatggacgaggcgctggcggaaatcggctttacgttcggggaacagtggaaatga

SEQ ID NO: 147695 - DNA, 1032 bp, Enterobacter cloacae
atggcgttaatcagctgcttcaccggccctcaggggctggagggggtgctcacctgtttgcgcgataccgagggcatgaccgctattctggtcgtcgttgcgctgctcgctgcctggattgttgttcagtacgtggcatgtgcacggcgtgaacgccggatgtgggagagcagaccgggaaaatccctccctctcccacaatttggtaatgcccgtcatgcaactgctgtgcatgactttgcaaaccggaattattaccaggtgatgctggccgagatggaaaaagcgctgttttcggcaggctatgaattgacgcgggatgcatcgcgcagcacacggctggcaaatacagaccgtcgtgacatcagccggaaagtgacccgtgtgcgccaccgctatatgaccccgctcatctcagaacagatgctgaatgacagcattgatgatgccatgaaaaatggttccgcagatgaatggctgaatctgcttatccagggcagtgagcgggaagggtggtatatcacccggaccgcagaggcggtaggagcggtactgagcaacaggcaaaaatgtctctggccgctcaggcaggtgatgatcaccctgaagtcagacagcctcgccattacccgtgatttcgttcaggggctgaacgcagcggccgacgctgtaagcaacatggcgttccccgacatggctgatgaacccgacttcagcgctgtgcctgtgaacatctgtggatttcaggtgacactgatgcgccagctctgcagcaccccgccgggatttttcccggatgaaagcgtcagcagtgtactggacgaattgttcagtcagatgcctgagctaaagtacggtgagaagcgtattgtcgtctttgcgcagataacgtcagcacctgcgaaagacgtcctggcccgattcatcagaactgtcggtgaccgtattgcggcaggagaggaatatgcggctgattacgatgacgacaacggttatgcctttatcgtcctgcggaccagcagaccccactga

SEQ ID NO: 147696 - DNA, 279 bp, Enterobacter cloacae
atgtcactgaaacacaataccgttgtgccgtctgtgtctcagcaaatgacagttcacaacactgacaccaaaggctgtgacgaagccgttaatcaactctgtcagctgtaccctgagatcgcttcatggcaaccggagcttatcgccggtgcctggcatcagtggtgcgcggagaaccagcgtcagctgatagcgccggaagaacgtgatgaggcgtttaccctgtacctcgtcaggcttatccgtaacagaatggaggagatgaacgcatggcgttaa

SEQ ID NO: 147697 - DNA, 351 bp, Enterobacter cloacae
atgatctttctgcttgtactgtccggtatagcggggatcgcaggttgtgtgattacaacagcatggttaccggcgaatctgcgctggcagggagcccagtgcgcagtatttatcctgattattcaggaatgcattcttaaggtcataccactcgacacggacggtagcggacttttgattgctgccggactgatgctttcccagtggttcgccccccttatcgccagagaaacagggaaattgaaagtgcatttcaggataccttcagtgcccggttatctgctgatgtacatcctgtgcctggtgctgatcggtgccagctggtttcccatctggatggttttgagatga

SEQ ID NO: 147698 - DNA, 414 bp, Enterobacter cloacae
atgagtgagcaacaggacaagccgtatgacggcgacaccgtccgcgacggtgtaacaatcgccagcaaaacatcccgctgggttaaggccggcatgctggggctggcgggacttctggttatgacaggcgtggcatatgtgacggcgaaagccgtcaccccggaggtggtggtcttcgacatgaagggtacggtggacctctttaagcagcagtccgcgcagctgccgctcgatgaaagtcgggcaaaagcgatgacagtgcagttcaacgcggcgctgacggacagcctcacggaatggcaggcttcacataacgccatcatcctggtgaaaccggcggtgataagcccgcagcgcgatatcacgaatgaaatccgtgttgatatcgcacgacgcacccgggggggccagtga

SEQ ID NO: 147699 - DNA, 453 bp, Enterobacter cloacae
gtgggcaggatcgcaggcggcggtttttcggcagccgacccggaaaaatttatcgcgccgattattgaccgcggtccttaccgctatcaaaaaatcaacgtcgctgattcgctgctccaccgcaactcgctcctgcaccgcatcattgatatcgccaatacccgctcggagttccccgaaattgccgttgcgccctttcggctcctcacgatcgatagtgacgcggtgctggggatctattacgagaccgaagaacgcagcatcctgacctttgttaacttcagtgaccagccggtgcagttcaccgtgaaggggatccgcaacacgacctggaccgcctgtctcgcggacaaacgctacgatgacgcgctggtttgcggtaaaaccgtcgagctcagccttggcggctacagctatcgctggttctggacgcaccgcagcgcgctgcgctga

SEQ ID NO: 147700 - DNA, 516 bp, Enterobacter cloacae
atgagttttgagatcccattctctcatattgcagagattattatggggcaatcccctaaaggcgaagaggttaataatgaggggataggactccccttattgaatggacctacagagtttactgaccgttaccctgcacctgtgcagcatactgcatatgcaaaaaaaatatcgctaccaggagatattttattttgtgttcgtggttcaacaaccggcaggatgaactattctgatcaaaaatattgtataggtcgaggtcttgctgcaataagaggtcgaaacggatatccgacaccttacgttaaagctgtattagagacttatcttcctaaattgctggcagctgcgacaggatcaacttttcctaatgttagcaaagaccttattaataatattccagtaagtgttttacctgttgagaatgcttgtaatattagtaagctcatcgaattgcaggaagagaaagtattcacgaataatcagataaaccaaacggtcgtgacgctgatttag

SEQ ID NO: 147701 - DNA, 282 bp, Enterobacter cloacae
atgcttcgtaatcgtccacaggttattcctcattcagttcactttggcggtgcggtggccggtgctgatcttcggcttgtctcggtggactgcaattcaccgcaccccaaagggaacttactgacccgtattgccgacatcctgtcccgccacggtcccgacgcatggcttagagtcgcgccgttcgacttgtggttaaatctacaatttgagttgtattatgtaaaccacaaatgtggtattttgtggtgtgaaaataccacgttattgatatttaagtga

SEQ ID NO: 147702 - DNA, 162 bp, Enterobacter cloacae
atgaaacgcgtgattatatttttactgctgtttagtcaaagcgtattcgcgaactgttgggataacgccggacattattatcatgtcgatccgtggttattgtatgcaattgccggtcatgacgccaacttagtgctgctgtatacttcgccttttggataa

SEQ ID NO: 147703 - DNA, 354 bp, Enterobacter cloacae
atgcgataccggcgtgaagatgaaaacggcgactacaccttcggacagggtgacgacaccttcctggtgaacagcccggaatgcgtagcccaggccgtgaagacacgctttgagctgtggaaaggacagtggtttctggatgcagccgagggcacaccgtacatccagtcggtactcggcaagcaaaggccggaagtttacagcctggccatacgggatcgcatcagcacgacgccgggtgtcctgtccattctctctttcgatactgtgaacaacggcaatacgcgccgcgtaacgttcacggcctctatcaatactatctacggacaaaccacggtcacaagcgaggcataa

SEQ ID NO: 147704 - DNA, 753 bp, Enterobacter cloacae
atgccagtatcaccacgcgcgcaggatggcagcgagcagcacgcctttgaagcgcagaaattgtcaatcttcaccggcctgcgcgttgccatgcccggtatcattcaatcgttcgaccccagcacagtgacctgcaccgttcagccagccatctacggccagaaagtcggtgaagacggcagcaccggctctgaggctatcccgatcctccctgacgttcctgtggtgttcccgcggggcggcggctgcaccctgacctttccggtcaagccaggcgatgagtgcctgctggtcttctccgatcgctgtatcgatttctggtggcagaacggcggcgtacaggaggcggtggacccgcgccagcatgacctgagtgatgccttcgccattgtcggcccgcagtcgcaggcaaaaaaaatcagcagcatcagcaccacagctgcgcagttccgcagtgatgacggcagcacctacttcgaaattaacccgacaacgaagaaaatcaaactggtcgcgccaggcggtttcgacgtgttctctccggagtccaccttctcggcgaaggtgacgataaccggcctgttaacgtggatgggcggcatggtcggtagccttgcgagcggaaccgcggcgaagatcacaggcgccattgagttcttcggcacgctgaaatccaacggcaaagacatcagcgaccagcacacgcatagcggcgttcagtctggtaacagtaactcaggcaaggtgaactaa

SEQ ID NO: 147705 - DNA, 723 bp, Enterobacter cloacae
atgaaaaagtttgtggtgctttcgtttattttgcctatcttcctggcttcatgtagttgggatccttcaggcgcaaatgcccagcgagaatggattgcgcaaaaaaagacagagcaagtagagcaggaaaaaagggacgcagaccggcagagggagaggctggcggaccaaaaacaaaaggaagcggattttaatgcttcgcatcccgaggtgaagattgccgatctgcctgttgatgataaaaccagtgcaggaagagctcttcaaaaagctgctaatgacattggtttcgttacacgattccctgaatcaaagacaccggataacgtttatgtaagggttggcagctataacctaaccctgcgcacgttccttgtgtctattcagcgctactcagaagattgcaaacgagcttccgcgtacaccaacgttaattacgataatgcttgcacctctgcactggctgaatctctgtctaattttgcgagcatgataaaggacgacagcataccgaatctgaccaaatcaacagctcttagagaagcgatgtatggcgattacattgaattcgaccatgctgcaaggctcgcaaaaatgcacaccactatctgctcaaagcaaggtggtaaaggttacgccgaaatgatgacgttagcggtgccatgtagtgggaagggagatgttctctactcgcatcgtgcaaggcaaatgggcctgatttaa

SEQ ID NO: 147706 - DNA, 1062 bp, Enterobacter cloacae
atgaccattaactggatgcgtcacttcgaattgaggctgctcgacgatgccggaaaggggatatcactctctgattttaaggtgacgttcacgatcgactggttcaactccatgtggccgcgcgttgcaacgcttaagatttacaacctaaaccgcgacactatgagccgcataaccggttctgagttctcgcggatcaccatcattgccggatatgacgggctggcaccgccggtatcggaaagccaggtaggacaggtaatggatgtgtcgcctgaccaggccggtcagactcgaggccagaactatggggagattttcaacggtgagatacgctttacgattaccgggcgcgataacccaaccgacatcttcaccctgattcaggccattgatgggcatcaggcgtttaacgaggccgtttcatccggcagcctgtctgccgggtataagctgtctgatgttcatacagtgcttatgcgtgatttctctccgttcggcgttacccagggcgttaccggagagttcccggatcgcgtaatgccccggggccgggtgttctacggcatgactcgtgactatatgagcaacctcgcggcgcagtgcaacgccaactggcagtttgtggacgggcaggcgcagatggtgcctgaggataaatatctgcacgaggctatcgtgctgaatagcaataccgggctcatcgggatgccgcaacagactatgggggctggcgtcaacgttcgctgtctgattaaccccaacatcagggtgaacggcttaattcagctcgaccaggcatctgtctaccgcacccagttgccgaacgatgagattcaaagatcacaggcaagaatcacagagtcgagcaatgatggtaacctttcccttggcggcactatagcgcagcccgccagtgtggccactgatggcgtctacatcgtccagtcaattagctacaccggcgatacgagggggaatccatggtatatggatctcatgtgtggggcgcggggagccaaggatttacaaagctcttccgctattattagagcaacatga

SEQ ID NO: 147707 - DNA, 312 bp, Enterobacter cloacae
atgaacgtaactgaaatccctcttaccgctgataaccagcaatttcgcatccagttaggtacggtgacgtatacattgcgtgtgctgtggcgtgatgaagctggctgggtaatggacgttatggacactggcgggcagccagtattacttggtgtgccgctggtacctgaagtcgacttgatagagcaatatcctgagctggggatcagcggcgtgctggctgttctggttgataacggcgcgccggaataccctacaaaaaccaacctgggatcttcttctcacctctattttgcgcaggtgaccacatga

SEQ ID NO: 147708 - DNA, 609 bp, Enterobacter cloacae
atggatgttctgtcggctattttccggctgcaatcgaggaagattggcatctttgtgcctgatgtcgtggtatctgaaaagcacgttgatactctggagattactgagcatcccgtagaaacgggagccccaattaacgatcatgcttataagcgggccagcgaagtcactattgagtgtgggttcgctggtggcggctctattctcgacttccttgatgtctctggaatcggtctggggattggcctaagcccaaaggaggtttaccagcagttgctggaactgcaaacctccaggattccgtttgacgtggtcactggtaaacgcacatacagcaatatgctcctccgcgccattgaggtgacaactgagaaggccacggaaaatgtactgtcatgtgttctcacgctgcgggaggctctcatcacccagacccagcaaatttccgttgctgataaatccagtatgtcggagggggttagcacagcagcagtccagagccgtggtaataaatcacccgtccctgttaacgagtccctcctctcttcgtccggtttttttaacggactgaaaggcaccgggattggaaatgcgctgaggatcagatga

SEQ ID NO: 147709 - DNA, 2208 bp, Enterobacter cloacae
atggctgatactatccgtgattacctggtctctctggggttcgatatcgacggcgcggggcaggcgaagtttgaagccacgctcaagggcgtagcggcgaacgttgtaaaactgggggctgtggtggaatccacggcgctggcggtggtgggctttaccacttcgatcgccaacggcctggacaaactgtactgggcctcacagcgcaccggggcgacggtcagcggcattaaggcgctgggatatgccgcatcgcaaaccggctccagcgccgaggctgcgcagaactcactggagagcctggcgcgattcatgcgcaataatccgggtgctgaaggtttcctgaaccgcctgggtgtgcagacgcgggatgcctccgggaagatgcgtgacatgtcggcgatctttaccggcgtcggccagcgcctcagcagcatgccgcagtatcgcgctaatcagtacgcgcagatgctgggtatcgacgaaaataccctgatggcgatgcgccggggactcggagaattcagctctcagtatgccctcaccgctaaaattattggcttaaataccgacgccgccgcggaaaaatctaacaggttcatgacgtccatgcgtggattggtcatggtgcttggccaggcaagagacaagataggctcaaatctggctggcgggttgacaggcagcgtcgataacctcaagaagcaacttctcgacaactggccgaagatagaagcagttattacgaaggtagtgaagggaattctctttgcagcggatgctatttcccgtatggcttggcgagtttcgcaagcggtcggcggcctgattgagtggttcaaaagactcccccctcaggttcagcagctgatcggtctgtttgctgcgctggtctcggcgtggcgtgtgcttaatacagagtttctcaagtccccgatcggcatcattatcgctctcggtacggcgattctggcgctgattgaggactatcagacctggaaggagggcggtaaaagcctgattgcctgggagaagtgggagcctgaaattaatgcagccattaagtcgctcggcaagctccgggattccgtggctgagattggcgctgagatcgccaaacttctcaacatcgacctgaaaaactggtccatcaaaggtgacatcgacaatctgaccaggcagtttggtgagttcggcaagatgatccagatgattggcgatctgataaacgccctcaacgagggacgctggtcagacgccgcgagcatcggtaaaaacctgctggggcagggccgaggtagccccgatgctattcctgcggtctcagacagcgccaataacacggctgattggataaaagataatgttggatttgacccaagaagcatcgggaagaccgttaatggttggctttttggtggcagcgggcaaaaaagtgagagcagaaatgagcgcgacccccaaattgatgaactgaacggtacccaggagagatcgcgaaaagaagcggcagactaccacgggcggagcgccggagtgctgggtaaaatcgcggatggcatcaagcaaattgctgacggcatcctcccacccgcaggggctgcaaccattacgccagcaattggcgagaattcaccattgccggaggtaaagcgcccgcaggccagcgcccagggtaaagtgctgctcgactggatgcagccgatgttcaaccagctggagtcgctttatcggctgccagaaggtctgctgaagagcgttgcgatcactgaatcgggcggcaaccagttcgcgacatcaggcgctggcgcaaaagggctgtttcagtttatggacggcacggcgcgcgacatggggctgcgcggaaatgacgtgttcgatcccatgaaatcagcggaggccgctgccaaatatctcagccagctgctgacgcgtaatggcggcgacctgagcaaagcgctggcgtcttacaactgggggatcggcaatgttcagcgttacggcatggatttaatgccgcaggaaacgcgaaactacatcccgaaagttatgagcaacatgcccggtagcggctcgcaactgagccaggaaaccactatcaatatctatggagcaaacgacccggcgtctacaggccgtgaggttgccgatcggcagtctggcgttaactcccgcctgacccaacaacttcaaccgaggatctactga

SEQ ID NO: 147710 - DNA, 153 bp, Enterobacter cloacae
ttgcgcccggcgctcgccttcaacctcgatcagaaagacctcgacagcggcgccgtggacctgtgccgcatcgcgctgcttaacgattacctcgatatgcgtgacgataacgacgcgcgcatagccaaatggagagccgataacaatggctga

SEQ ID NO: 147711 - DNA, 426 bp, Enterobacter cloacae
atggaaattaccatcaaggatcagcagtaccgtatcggcaaattgagcgtattcgagcagcttaaggtctcccgcaagctcctgccggttctggcgggcctggtatctgacttccgcaccgtccaggcgaaagttaatgcaaaagacaccgaaggggcgctggaaagcattctcccgaagattgctgatgctgtttcaggcctcagcgatgctgatgttgatgcgatcctgtttccctgtctacaggtagtggcgcgtcagcatggcaaaggatgggtgcaggtgtgccagcagggcagtatggcattcgacgacattgacctgtttgtgatgctgcaactggtggcgcgggtggtcgcggattctctgggaaattttttgcaagaactccctaccagcgggacagccacccaatcagcggcataa

SEQ ID NO: 147712 - DNA, 441 bp, Enterobacter cloacae
atgtcaacatatagctttatcgatgtctccgcgtccatgaccgggccgaccggggtgattgacctcggttacggctctgccaactcggaagaaggcattacggtcaccatgaccgaaaacaaaaacaccatgacgatcggcgctgacggcgaggtgatgcacagcctgcacgccgggaagagcggaaccatcacagtgactctgctgaagacgtcgccagtaaacaaaaagctttcgctggcgtacaacgcgcaaagccagtcttcagccctttggggaaacaacgtgttcgtgatccgcaatagcgtttccggcgatatcaccaccgcccgcgcctgcgcattccagaagcagccagaccacgccaacgccaaagagggcggtaccgtggcctgggtctttgacgcgggcaaaatcgaccagttactcggggaattttaa

SEQ ID NO: 147713 - DNA, 1494 bp, Enterobacter cloacae
atgcctaacggcttatctgtatcacgcgtcgtgcgcgtgcaggtttcgctcgcgctcagggcggcgcaggggcgcgacttcggcgctctgcttatccttgggacgtcaggcgtcattaccgcaccagaagtcatgcgcctgtacaacgacatcgaaagcgtggccgctgacttcggcaccacctcggaggagtacaaggccgcaaacctttacttccagcagtccccgcagccgctcaatttgtatatcggtaaaatggataagacggcgatccccgccactgctggcacgcttaccggggccaaactgaatgccagcgagcaacgagtggacaatttcagcgctgtcacagatggtgcgctgaatatcacgattgacggcaccgccaggaacatcactgcgatcgacttatcctcggttaccacacttgagcaggttgcaacggcaatcaccaccaagctgaccagtgccgtcgtgacctggaatgcagtcacatcacatttcgtgatcacctcgtcatcaaccggggccacctcggttgtgggtattcctactgctgctggtgcaggtactgacctggctccgctaatgggtatcgacgcaggcagcaagccggtagctgttaacggtactgcggcacagtctggttctgctacgccatccgtgtctgccgcgctgaattactctgctgactggtacggactggttatcgctgataagacgatgacggaccaggatcatctcgacgttgctgcgctgattggctctgcaagcgattcccgcgtgtacggtgtcaccacggcagactcgaaagtattgagcgccaccgatgcaactgacattgccagcaagctgaaagttgcgggctatggtcgggtgttctgccagtacagtcaggtgccgtatgctgcggcgtcggcgttcgggcgcgcgttcaccgtgaacttcctcggcaataacaccactatcaccctgaagttcaaacaggagccgggggttaccgccgaaacgatcaccgcgcagcaggccgacacgctgaaggccaagaactgcaacgtgttcgtgcgctacgccaacgataccgccatcatccaggaaggcgtgatgtcgaacggcgacttcttcgacgagcgtcacggtctcgactggctacaaaactacgtccagaacaacctctggaatctgctgtatacctcaaccaccaaaatcccacagaccgaagcgggtgtgactcgactgcttacgaacgtggagcaatccatggatcaggcagtgaataacggcctggttgcccccggaatctggagtggcggtgctgttggtcaggtgcagccgggcgacacgctgacaaaagggtattacgtgttcgctaacccgctgagcacccaggcgcaggcagatcgcgaagcacgtaaagcgccggtgattcaggtagcaaccaaactggctggtgcggttcattttgccgatgttctaatcgatgtggttcgctaa

SEQ ID NO: 147714 - DNA, 543 bp, Enterobacter cloacae
ttgaatgacaccacgcaacctggctacctgacgccgaccaatccggtaccgcaatacgaccaggcgctggaacgtgagctgagccggtggattcgcggtgtttctggtctgcctgacggtatggccataccgcgattcactgacccgcagcccgctatcccgccgctgggcaccaactggtgtgggttcggtataaccgactttcaggatgcagccaacccggatttcatcaccaaagatgatgacaccgactaccagtggcagtttgaaagcctggtggtgctctgctgcttctacggccccggcgggcaggcttacgccaagacgttccgcagcggcctgtttgtgtcgcagaacaacgcagagctaaaccgggtcggactgactctgggggaggttgggcgcatcattccggcgccggagctcatcaacaaccagtggcagcgccgctatgacctgtccgtaacgcttcgccgcaaggttgtccgcgagtacggcatcaaatctttcctctcagtcccagtagaatttttcggagattaa

SEQ ID NO: 147715 - DNA, 387 bp, Enterobacter cloacae
atgccttttctcgatgtcactgaggtgttgtcggatcctgatttctgcgattacacgctggtctgcacccgcaaccaccaggcgaaagacgctgacggattcgcgaccaataccaaagaggagatccccttcaatggcgtggtgacggttgaccgttcgctggaagccagacgcatggcggcaggtcaggttatcggcggtgcaatcctggtggtgaccactttccgcttaacccagggcaggacaactctggatgctgacgtggtgctttacaacgggcggcactaccgtgtcacgtttgtggatccgtacacctcatacggcgctggcttcgttcaggcgcactgtgagctgatggagttcgacggaggtacgccagttgaatga

SEQ ID NO: 147716 - DNA, 513 bp, Enterobacter cloacae
atgagcggcgtgaaaatcagggcggataatgccgcctcggtgctggctggtctcgacaggctatcgaagatggatgtgctggtgggcatccctgaatccaacgcgacacgtgaagacggggaagagctcaacaacgccgagatcgcctatctgcaatccaccggggcaacggtccggctcggtgggcaagaggtgacgttgccgccgcgcccgtttctggacatcggtattgaggattcggcaaagataaccgctgagcatctcaaggcggctgctggtcatgcgctggacggcaacttcactgctgctgagcgcgaactcacgggcgccgggcaactggcgtccgatgccgcaaagcgtgtgattaacgatggcgacaggctggcaccaatctcggatatgaccaaagagttacgaagaaaggcttcgccgcctatagccggagataagccgcttcgtgctcggggctatcttgtccgctcgatcaccttcgttgtgagaggtaaaaaataa

SEQ ID NO: 147717 - DNA, 408 bp, Enterobacter cloacae
atgccaaaaaacagccttctgccaacaagtgaccagttccgcaccgactttcctgagttcgccagcaccacccgctacccagacccctcggtaaatttctatctcggccaggctgatgtgatccttaatcaggacgtgcagggagatcagttcgtttatctggctgagctgttcactgcgcattatgttgagctgcgcggtcgcgcgctggcgggcgcatcgggcggctttgtcagtagcggtggcagcggcgtagcgtcgtcgaaatctgtcgataaggtcagcgtcagttatgacaactcgggcaccatcaatcccgacgccggattctggaacaaaaccggatacggccaggagtttttctggtggtggtcgatgttcggcgctggtgggcgtcagctgttatga

SEQ ID NO: 147718 - DNA, 387 bp, Enterobacter cloacae
atgaaatatctcgtaaatactcccgcggtactgcgcttcaccgacggcacgcaggtcgaattgacgcctggtgttcacagcttcgataagtacgtaactgagcactgggcatttggtgcgcatgcgcaggccatcagtgaagatgagctgaaacagagccagggcgacgaggacctcgcgcttaaggtctcagggcttgaaaccaccatcaccggcctgcaacagcagctggatgaaaaggccatcaccatcgccgatcagctgaagcagatcgaagagaaagacggcaccatcaccggcctgcaacagcagctggatgagctgactgagaagcttgcatcacaggaggctggcaatgccaaaaaacagccttctgccaacaagtga

SEQ ID NO: 147719 - DNA, 945 bp, Enterobacter cloacae
atgtttacaatcgataaagccaccgtagacgctgctggcgtattcctggttggcgaacttgagcgccttgaccagacgcttaacctgccgctggtaagttataaatggtcgcgtgatatgccgctgcgcagcgacgtttctatcgctgacgagcagtcatccttcaccaacaccgattttgcggccgccggtggcgtgaacccgaacggtaagaactggattggcaagaactccaccgcgatcccgcagaccaacctctacatcgagaagaccgcacagccactgagcctgtggggtatggagctgggctggaccctccctgaattggcatctgcgcagcaggtgggccgcccggttgacagccagaagtacgatgccatgcagctgaaatggaacatggatatcgatgagcaggtatacatcggtgacagcgatctgggcatcaccggcctgctgaatctctctcaggtatcgccaatcagcgctgctaaagcatgggctaccgcaacaccggatgaaatcgtgcaggacttcaacctgcttctttcccaggcatgggttaactcaggctacgcgatttgcccgaaaaaagtcggtctggcgccggagctgttcggcctgctggcgagcaagaaagtatctgacgcgggcaacatctccgtgctggaatacgtgaagattaactgcatcgccttccaggagaatggcgagccgctggaaatcgtgtccatgaagtgggcgtccaagcgcggggcgactggcgcacaccgcatggtggcgtacacccaggacgagaagttcattcgcttcccgctggtaccgctgctgaataccccgctggaatatcgcggcatgtaccagctgacaacctactacggccgtctgggccaggtagaaactccttacggtaacaccatcgcctacatggacgtgcctgtagcgtaa

SEQ ID NO: 147720 - DNA, 519 bp, Enterobacter cloacae
atggctggtaaagcttatttgactcgcatggggattggtttcccaggctcagttactcgtccgcaggatctcaccgcagagcctgcaatcctcgatgccacaaagccattcccttcctatgggctggctggcaaaaacgtcagcggtaaatttgtgccgctcgaagcaggtgatgacatcaaggatgtcgccggcctgttcattcgtccgtacccaaccactaacccgaccgatgcgcggtcgttgggggtcaccgctggctataccggtgatgtgctgaaacgtggctacatttgcgtggcagttcctactgctcaggccagtgccgccaaaaagggcgacaaggtttacatccgcgtcgccgccccgaccacctccagccctctgggctccattgtgctcacccaggacagcaccgccgcgaacaccccggagctgaccatcgctaaggtgatgggccccggcgatgcagcggcaaccaccacccacggcaacgttgaaatcgcctacaacatctaa

SEQ ID NO: 147721 - DNA, 1257 bp, Enterobacter cloacae
atgaaatacttcttcactacccgcctgggcgaaacgcgctaccagctggcggacggctccctgctgtgcaaagacgtcccgatcgcccgcaccgggacgcaaacctatctgcctgaagaaatcggactcgagcctggcgctgatggccttgtcgtcgtctaccgcactgaggacgaggttttctccccagaaacgatggcgagcttcgagggcatggcagtaacgctggaccacccagaagacggcgaaggcaacatcgtattcgttaacccggcgaacttcggggagctggcccacggtcatatccagaacgtccgccgtggtaccggcgataaagccgacctgctgatcgccgatgtgctggtgaaacggcaggagggtatcgatgcggtcagcgctggaaagaaccaggtgagctgcggctacgatgcccagtacgtgcaaatcggcccgggcaagggcaagcaaacagaaatcacaggaaaccatctggccatcgttgataagggtcgggcgggttcccgctgtgcaatcggggattcagccccatcaaccaaaggaagcaatatgaaacagcagacgtggtttcagaagctggccaatgccattcgcaccaaagacgatgatgcgctggctaagctggtggacgaagcgccggatatgccgtctgatggcatgagttccatccccggctcaacgatcaatatcaacctcccttcacaggctaccgcgctgccggcagaccaaaagactacgaccgacgaagatccggacgacgacaagaagaccggtgatgaagaggtgccagcctgggcgcaggcgcttattgcccgcctcgataagctggaaggtaaaactggcgacgctgatccggatgacgacaaaaaaaccggtgacgaagacgcagaagaagacgccaaggtgaccggcgatgcggcgtataagcgcaacatcatcggcgacgctgagatcatctgtccgggattccagcctactggagataaaggcctgaagcgtcaggtgctcaaccaggcgctgcgcacaggcgacagcctgaaggccttcggcattgccgacttcgccacggcgccgaaggcaaccgttgatgcggtgttcaaggctgctgtcgagatcagtaaagccaagaaccatatcaccccgccatctggcaaaccaacaggtgaccgcgcccgcggccatttgaccccggctgagctgaacaagatcaacgccgatttctggaaacgcaaccaataa

SEQ ID NO: 147722 - DNA, 204 bp, Enterobacter cloacae
atgcgccaaagttattttagttactacgaagcctataacgctcgtggggaggttcttctcaacggcaatggtagttttgaggtggagggtggagctacacggcccgagaacgtcggcgagcatctgcaaaaaatccttgctgatgtgcaagccataaaccccaccgtgacgcgagttgtcataaaaaatctaaccaagctatag

SEQ ID NO: 147723 - DNA, 534 bp, Enterobacter cloacae
atgttcctgcaagttgagcaggaggagtggaaccagtggcgctcggtatcgcaagaaatctctgaggggctgcgtgatgtcgtcggcaatacgccgatggggttcgtggctcaggacatcgtatcccgacaggtgcagttgattaagtcgcttccgctggaggctgccgaccgcgtccgtgacatccaggcgcgcgccatggaggccgtcatcaacggtgagcgccccgacgcgctctaccggatgattatggagtccggcgacgtcgcagagagccgcgcgaagatgatcgcccgcaccgaaatcggcagggccacgacagcgctcacccaggcgcgcgcggagtcgattggctcagagggctactggtggcgcattgaaggggccggaacgcgtgattcacatcgacggatgaaagataagtttgttcgctgggataaaccgccgacgctggacggcatgaccgggcatgccgggtgcctgccgaactgcaaatgctggccggaagtgcaggtgccagcgccgagaaaatga

SEQ ID NO: 147724 - DNA, 1479 bp, Enterobacter cloacae
atgtcccgaaagaaacgccagagcggcgcacaaaagcccgtccggactggtgacgggtataacaacttcgctgccaaactcggcgggtacaccgccaatattcaaagcggcgggagttatcagccgggctacatctcccgcaaccgcgtacagctggaatttgcatatcgttcatcgtttctggtaggcgctggcgtggatgccatggctgatgatatgacccgcaaaggcatcaacatcagctctaaacttcagcctgggcaaaagggaaagttcgaaacgttctgggatgacatcgctatctgggatggcctgaacgacactcttaagtggtcacgcctctatggcggcgcgctgctggtggttctgctggaaggccaggacatgtccactccgctgaagcttgaccgcatcaaagagggccagtttaaaggggtgatgtgcctcgaccgctggcaggtcagcccgagctattacgatctggtgaccgattacggccccgagttcggcaaaccgaaatattacaaggtggtgaccaaccagcagggaattcccccctggaagattcaccacagccgcattatccgcatggagggcgactcgctgccattccagcaggctcagaccgagaacggctggggtatgtcagttgttgaacgcatcttcgagcgcattcaggcattcgacacggctaccgttggcaccacacagctgattcacaaagcgcacctgcgcacgtacagcattgagggactgcgcaagattctcgccaccggcggcacgctggaggatggcctgatgaagcacatggacatgatccgtgagttccagaccatcgaaggcatgaccatcatggataagtcggacgagttccagacccacagttactcgttcgccggcatcgccgacgtcatcctgcgctttgctgagcaggtatccggcgcaactggtatcccgctggtgcgcctgttcgggcaatctccgtccggtttcagtactggcgacggggatctggagaactactacagccgcgttaactcgttgcaggaacgccgcctgcgccgccatatccgctggctgctggacatcacctggcgctcgctgttcggtcagccattgccggaagacttcaccttcgagttcaacaagctctgggagatgtcggacaccgaccgggcgacgatggccagcaacgtggccaccgctctggcgacagccgtgcgcgatgtcggtatgccgcagcacgccgcgctgaacgacctgcgcaacctgtctgacattatcggtatcggcggctccatcaccgacaaggatattgaagatgccaaagcagaatgggaggaggctgaatctgaaaccgaacctccgccgcaaatcggaacgccagtatcagaaaagcctacaggagatagcgcgccagtgcggagcgatagtaactggctattacgatggttcggaggccagcgccgagcaggttaa

SEQ ID NO: 147725 - DNA, 1206 bp, Enterobacter cloacae
gtgctcgggacgctttacgacgcaccgataggctctgtccgctggcgctggacgtatggcggtcgtggtggcggcaagtcggtagagattgcccgcgcgctggtattgttgggcgctatcgagccgatgatcatcctctgcgctcgtgaattccagaactccatcaacgattcggtgctggcgctgctggacgctgagattcactcgcttggcctggcccatttctacaaggtcaagaataacgagatagagggcagcaacggcacgcggttcacgttcaaaggcctgcgcaacaacatccagagcattaagtcgatgcacggcatcaaaatatgctgggtggaagaggcgcagaccgtatcgcaggacagctgggacatcctcgggccgaccgttcgagccaacaaatcggaagtgtgggtgtcattcaacccgcgcgaagccaccgacccgacttacgccatgatggagcggcaccgcgccgatccccctgatggcggagcgattatcacctgcgtcaactactgcgataacgcattctttcccgacgtgctcaggcacgagatggaatactgtaagcgcatcgacttcgaggcttacgaacatatctggctgggcctgccgaaggcgcttagcgaggctgtcatcttctctggcaaataccgggttgaggcattcgctgacgacctgtggcaaagcgcagaccgcctgtttttcggcgctgacttcgggtttgcgaacgacccatcaacgcttgttcgctgcttcatcatcggcactcgtctgtacatcgagtacgaggcctacggtgtcggcgttgagctggatgaaatggcgtcgttctatgactcggtgccagaggtgaggcgctggcccatccatggcgactgtagccgaccagagaccatcagttacctctcgcgtcagggtttcattatcgacggcgcgaccaaatggcccggaagtgttgaggacgggatcacctatctgaaagggttcgaagaaatcatcatccatgagcgctgtaagcacatggtcgatgaggcgcgcctttactcttacaaaacagaccgcatgacgggcgaagtgctgccggttgtcgtagataagcacaaccacctgtgggacgccgtgcgttactcgctggatggctacatcacaagcgttggcgatctcggtgtctgggccgccctgggcaaacaataa

SEQ ID NO: 147726 - DNA, 708 bp, Enterobacter cloacae
atggcaaaaccggactggggagcgctgcaagaccagttcctcgccgagcatgccaaaacgggtatatcgccgaaagagtggtgcgaagcgcagggactgaattacacatctgcgcgcaggtacatcaaaaagccagctgcgcaaaaaactgcgcagaaggaagtgcgcaaaactgcgcaaagtcagatgccacacgtggttgtggttgaggctacttcaccgcctgacggcgatactgcgcaggaaagcgcgggcatcctgaagccacagcatgagcagtttgcgcagaacattgcgcgaggtatgccacagaaagaggcggcgatatgcgcgggctattcgccatcgcgcgctgactctcaggcctccatcctgtttaagcgcccggacattcgcaggcgcatcagagaacttcgtcaggatgccgcgctgctcgtatctttcgacgcgaaggacctagctgaactctcctacaaatcggcgaaagaagcgctgcaagataagaaatttggacaggtagccccgaacatcaagaacgccgcgcagctcaccggcatcgacatgagcaacaaaacggaagtgaatgtcgatctggccggcctgagttacggaaaggtctgcatcgtcacgccgtcgagttgtccgcctgaagcgtgggcggcgcacatggacaagctgcgcgagggaaagcagacagcccaacaataa

SEQ ID NO: 147727 - DNA, 519 bp, Enterobacter cloacae
atgaataatccgtcagttattccggccttcgacttccgcgaaatggtcacgaccctcgacaacaagataatcaccacatcactcaaggtggcgaattactttggcaagcgacacaaagacgttttgcgtgccatacgtaacctgaaatgctccgatgacttcacccagcgcaattttgcgcccattgatttcattgataaaaatggcgatgttcagcctatgtataacatcacccgtgacggatgcatgatgctcgtgatggggttcactggcaaaacagctgccgcagtaaaggagtgttacatcaatgcctttaactggatggccgagcagctaaaccgacgcatggcgatgggtgaagaaatgcagcaccgcttcgccatcaaagaaactcgctcaaagctgaaaggcacgatcggcagccggttaatgaacgagcggaagaaagagaagcgcgttctggagctcgagcatgagcacatcatgcaggtaacgcagcccgagttgcttattggctga

SEQ ID NO: 147728 - DNA, 471 bp, Enterobacter cloacae
gtgattggcgcgctggttaagcgttactggctgcaactgattgtggtgtcggtaatcggcgtgctggctttcttcgtgaaccactaccgcaacaacgctatcacctacaaagaccagcgcgacaaagccaccaagaatctccgcctggctaacgacaccatcaaagacatgcagacccgccagcgtgatgtcgctgcactggatgccaaatacacgaaggaattagcagatgcgaatgctgagaataacaggcttcgtgctgatgttgtcgctggtaagcgtcggctgcaaatcgccgccacctgctccaaagacgaaaccaccggatcctccggcctggttgatggctcaagccctcgacttacagcagatgctgaactcaattattggcgtctcagagacgggatcgccgccgtcacaaagcaactgaccggcctgcaggaatacgttcggactcagtgcctgaaataa

SEQ ID NO: 147729 - DNA, 1296 bp, Enterobacter cloacae
atgtccgaaaacaactacggtgccatgatgataaaatccgccgttggtgtcagcgatgacattaacgcaattttgtcgcccggtatttacatcattcctccaggcaatacttcctcacctgacaccactggaggtgctctaatcgttcactccggcattcctgtcaggcgaacatttacatcagattcggttatcgctcttgtatccaccagaaacgggaacacgtggtcttcatggtctggacctctttccagaaaaaatccttttggagacattaagtctgatggagcaacggcaattgacaaagccctcgaaaatcttggattagtcgacactgtcaccaaggccgccggtgctattcagaggtccggcgacgatatggatggaccgctcggcctgacacgaacatcctcttttggtgtgggtactgagaacgcgctcggcggaaactccattgccatcggtgacaacgattcagggtttaagtcaaatggtgatggtaacattgcgctgatggcaaatggtgttcttgccgggtatttctcggaaaatgaattacagcatcacgaaaaggtactgacaaaaatctttcgggctatttctaccggaaacgcgacagagggggctggagggtttggttctcaacttaccagcggcgcaccattttatagcccggcaatagtgcgtcaaaataatgataacaattactttcctttgtggaagcaaattgtaagccttcagtcaggttatccggtagccgcgtcaatgggattgcttactacaggtaagccgaatttcccacagattgtgctccatgcgaaaacagattttgaggttaacgataaactttgggtttttgatgtggcgtcaggagagttcagaagcccaggccgtttgttaggtactgaaatatttctttcaggaaagacgcgaattgggtccgatggaaacattaacggtgaggtatggggaggctggctgaatgattatttatacaatacctataataaaaaaaatacggcaacactggggttctcaggctggagtcgtgatgagtcaacggggctgattatgcaatggggcaacgttgataaagctaacggaacatactcctttccacgggcatttatagacacctgctttgctgttttcgcgacaaacaaagatggccagcttggcgcaattgataatgcctatggttatcctgtgagtaaaacgcaattccgactcgcaagtaaagcgaacagtggatcggatactgcgtgtggtatttcttggtttgcactggggtattaa

SEQ ID NO: 147730 - DNA, 366 bp, Enterobacter cloacae
atgatgaatgagcaatattattacagctattccgcaaaaggttttttctggctgggcgaagatgagctaaaggggaatgatattcccgctgaccttatacccgtcagcgaggaagagcacgccgcaatgtttcttggtcaggagcggggtaaatacattaaccatacgcctgatggaccagttctggttgaccagccggattactcgccagaagaactcattgcgcaggcggaaagcaaaaagtcacgtctgatgcagacggctaacgcagagattgctccattgcaggatgcggttgatttggggattgcgactgctgaagagacaaccgcacttaccgaatggaaaaaatacagggttatgtga

SEQ ID NO: 147731 - DNA, 834 bp, Enterobacter cloacae
atgtttgttccatttctcattatgttacgtgaagggctcgaagccgcccttatcgtgagcctcatcgccagttatctgaagcgaacccagcgcgggcgctggattggcgtcatgtgggtcggggtcttccttgccgcggcgctctgcctgggcctgggcattctcattaacgaaaccaccggcgagttcccgcagaaagagcaggagctgtttgaaggtatcgtcgccgtgattgcggtggtgatcctcacctggatggtgttctggatgcgtaaagtctcgcgtaacgtgaaggtgcagctggagcaggcggtggataacgcgctgcagaaggggaacaaccacggctgggcgctcattatgatggtctttttcgccgtcgcgcgtgaaggactggagtctgttttcttcctgctggcggcgtttcagcaggatgtggggatctggccgccgctgggggccgtgctgggcctcgccacggccgtggtgctcggcttcctgctgtactggggcggtatccgcctgaacctgggcgcgttcttcaagtggaccagcctgtttattctgctggtggcggcgggtctggcggcgggggcgattcgcgccttccatgaagcgggcctgtggaaccatttccaggacgtggcgtttgacctcagcaacgttctctccacgcactctctgaccggcaccctgctcgaaggtatcttcggctatcaggaaacgccgagcgtcagcgaggtggcgatgtacttcatttatcttgttccggcgctggtgctgttcgccatgccgccgcgtaccggcacgcaggcgtcgcgcgttgcgccgtaa

SEQ ID NO: 147732 - DNA, 204 bp, Enterobacter cloacae
atgaacataaaaaggatgatatccaacatacgcaccaaacccatttttgccagcgactctgccacatacgaaaccactgacaacatccccggactcctggttcttgtccatgttgaacctaaccattttgaacttggcgctatccgggtccatcaacccatttgcaatttcttgctgcccaagttgaatcgctttttcctctga

SEQ ID NO: 147733 - DNA, 144 bp, Enterobacter cloacae
atgcaaaacgagaaagacaaaactatcaccctgactgaggatgagcgcaaattactcatgcttgccatgatcgcttatctcttgtcaggtgagatgaccaaagaagacgctcttatcgcagagcggataattaataagctctga

SEQ ID NO: 147734 - DNA, 651 bp, Enterobacter cloacae
atggcaaaaccggactgggaggctatcgaatcggcttaccgggctggagtgctatcggtaagggagttagccggaaaatatggcatctctcaccaggccatcagcaagagagccaaaaaggatggatgggagcgagatctaaaagccaaagtccaggcaaaggcagatgcgctggttgccaaacgtgaggttgccaggcaggttgccaccgaaagcactatttcagagcggcaactaatcgaggcgacggcagaggtgatcgccactgttcgaatggaacaccgaggagatatccgccgggctcgcgaactgaccaacacgctattcgatgagttggccggagagtgtggcgacgtggccgcgcttgaacagctcggggaactgatgcgacgtgaagatgacaaaggtatggataaactcaacgatctgtaccacaaaataatcagcctgccttcccgtgttaaatccatgaaagacctgagtgacagcctgaagacgctgatcggcctcgagcgtgaggcgtacagcatcgagaataaggcggaaacgaaagaggtaacgcataacgtcatgctggtgccaaccagtgacagcgtggatgactgggaagcggcggcgcagagacaacagggcggggtgctcggtggatga

SEQ ID NO: 147735 - DNA, 519 bp, Enterobacter cloacae
atgaataatccgtcagttattccggccttcgacttccgcgaaatggtcacgaccctcgacaacaagataatcaccacatcactcaaggtggcggattactttggcaagcgacacaaagacgttttgcgtgccatacgtaacctgaaatgctccgatgacttcacccagcgcaattttgcgcccattgatttcattgataaaaatggcgatgttcagcctatgtataacatcactcgcgacggatgcatgatgctagtgatgggattcactggcaaaacagctgccgcagtgaaggagtgttacatcaatgccttcaactggatggccgagcagctaaaccggcgcatggcgatgggtgaagaattgcagcatcgctacgccatcaaagaaacgcgctcaaagctgaaaggcacgatcggaagccgtttgatgaacgagcggaagaaagagaagcgcgtcctggagctcgagcatgagcacatcatgcaggtaacgcagcccgagttgcttattggctga

SEQ ID NO: 147736 - DNA, 387 bp, Enterobacter cloacae
atgattggcgcgctggttaagcgttactggctgcaactgagtgcggtggcgttaatcggagtgctggcgttcttcgtgaatcactaccgcgacaacgccatcacctacaaagaccagcgcgataaggcgacggtcagggccgacacatcagaggcgatcaccaataacgtgatcaccacgatgaacctcattcgcgatatctcacaggctacccagaatgcaaagaacgaactggcccaaaaaggcgaaacgcgcattgtctacatcaggcaggcacttgaaggcgatccgtgtgctaaccagcttgttccttctgccgctactgacagcctgcgggaatacgcagacagtttacgttccggccccggtggtgccgataagcgctga

SEQ ID NO: 147737 - DNA, 135 bp, Enterobacter cloacae; identical to SEQ ID NO: 130331

SEQ ID NO: 147738 - DNA, 564 bp, Enterobacter cloacae; identical to SEQ ID NO: 130332

SEQ ID NO: 147739 - DNA, 288 bp, Enterobacter cloacae
atgtctgccagcatggcaagctacccattactcaaaatcctgcacaactatcgctatatcctgattccagcactggtattcactaccgaaatgacagtgtgggcagcgctcaatcttaaaggtgtgggtgatatgggctgggtctcctggcgagtgtgcctgctctttagcgtgttcctcgtatgctttagcgactcagcctttaacaaactcgatggtgggtttcttatgtatggttcagtcgttccgtggggcggaatgctaaggaaggtgcgaacaagttcctga

SEQ ID NO: 147740 - DNA, 1839 bp, Enterobacter cloacae
atgaacaaagtttacagcattatttggaacgcggcgctcggtatctgggtggtcgtttctgaattaacgaaaggaaagaaaaaaagcagttcgcgtaaaactgtcgccgtactggcagctggcgcattaagcggtgcttcattgctggcttctgcagcccagattaccgcaacgggtgaacacgatattcatgaagacttcaagacaggtatttccgctggggtttatgagggtatccacgactacggcttcttatatgaagataacacaactggtcaggcactgaatatcagtggtgcaatcccaacatttagcccgggtcaaagcggcgttgttgaatcaaccactatccgggaactgctggaaagcggcaaaatcaccctgctggcgaccagccctgaccagagcgtaaaaaccattaccaactctgaagaactggcggaatacctgacttacaaccagtcgtcaacgccttcgcagagcacagaatttgatatcaacgatccggcgtttcccggcgaaaaaacgaccatcaaagtctttgataccaatgagttaaatggttttcttaccgaagcgcaagtcggcgatgcggtattaaacacctttgatgctcagaaatcagaaatctataagcaatttggtatcgcactggcgacaaatggctccattgccaatctgaatattggcaacgacaccctcaatgtgcgtgacaaagccaataccattgaaatgctggcaaaagattcctcgctgctggaagcacaaggtactgcaagccaggtgaactggcagtcagataactatataaaatttaacgcagccccggtgatccctgaaaaaacgttcaccggttcagcgcaaacctccgtgtttggcgatgatgtgacgctgatgacctatggctatgacgaggatggtcaggtcgtcaaaaccggggagcgcacatttaccattaccaacacacaagaactggccgaattcaatgactggctgttgggcaaaagcgacgacgcggcactcaaccctgatggtgaaaaagtcagccaaatccagctgtggatagatgcggaggaagtcacaaccgtcaccgcagcacaaacaaagtacgccgggctgattgaaaatctgctcacctccggtaagccagctgacatactcagctgggattacgacgtctggaccgacggtttgtcacataccaacaacgcgaccgctggccgtggtgagttacatgccatctacgccaacggcgcaggcacctcaggcaccttgaacaaagacgcgattattgccgttgacggcagtattaatggcgtgatgaaagccattaatggtggggttatcactaaccttggtgagctgaacgcattacgcacgtctaccgggcaaagcctggcgattggcatgctggcaaaagacgcgacggcaaccaacaacgggatcatcaactccgggctgtttattgataaagacggcaaccaaaacgtcaacagctatggcgcatttggtatgcaggggcaaggcgccagtcaaatcaccaacgaaggcaccatcaaccaggcgatcaccaccgataacttcggtaccgcttctgccgccgatccctggagtaaggacaaacccgctggcgagctgacgctggccattggtatgcaactgtctgacaatgctcaaggggtcaacaacggcgatatcaacgtcgtggacgggcgcaaaaacggtgcatcctacggcagcggcatcgcctatggcgtagaagtcgccgacaacgccacctttaccaacagcgcaggtgcctctatttatcttggccgtaacgcaagtgatccgtcttaa

SEQ ID NO: 147741 - DNA, 336 bp, Enterobacter cloacae
ttggcaccattacccaacattgaactgaacgattgcgatccgctggtggccaaaactgccgctgttgcgttcaccggtcagatcgacccaaccgacaaaaccctgctggccatcacctccggcagcaacgacaacaccgcgaaaggcgtgggtatcgagatcctcgacagcaaatccagcgttctgacgccagacggtgcgaccttctctgctgcgcagacgctgatcgaagggaccaacaccctgaagttcaccgcgcgttataaatccacggctgcgactaccgagctaggccaggcgaacgctgacgccaccttcgttatgaaatacgaataa

SEQ ID NO: 147742 - DNA, 132 bp, Enterobacter cloacae
gtgaggggcggctgccggcaacttgtcgaatatgccacggtgacgctgacgctcaaaatcacgctggacgagctgtacctgatgagcaaaacgccggttaagacgcagctgcagtatagtaaacatgcttaa

SEQ ID NO: 147743 - DNA, 1593 bp, Enterobacter cloacae
atggaatttagaaaggtaaaaaacataccaaataagtcagaaaaaaatacggtctacctagttaaagacggatggaatgactggttttactgggaaactctttttactatgttttatagcaatgactctggtgaattatccaaaattggcaatacaaaaatagcagaaaaagacatgaaaggggcatcttcactttcagaagatgaaaagggacagcctttctttacacctgacctacctgatacattcccctcattggatgagaattttttctctctggggcaaagcgagaacttttatgaaactcttaaccagatccctggtaatacaagagttgaaatactaacaggcatcagggactgcgcatacaatttagagatttttgaaaattacaaatctcaccctgctatgaaggagtctcttttaagggacattagcgaaaggaatgttaaagaatctttgcatgccattgcttatgaagaagaccacaacaagcctttcaatttctcgtatcttttcccaaccagagatgttaatgagaatgaaataagactggaatttagcgttaataataaagatataccacagagcaatatccaggctttaattggcagaaatggagtgggtaaaaccaccttattttcaggatttattaaaggtataataaaacttgatactgatattgaaaatcctgtcggttcacttcaagtaaaggaagatgccgagtgggaagacaacagcacttattttaactccctaaacttatgttcatatagtccatttgatagatttggccctatcggacataataggttaccctctggcgttaaatatcagtatataggtttgatggtactagaccagagaggagataacaaagaacaaaaattaaggccgaaaagttcagatgaactacatgcagaattttgtagtagtatgcaggaatgtttagtaggagtacgaagaaacagatgggaggaatgtctctctattttagagaatgaccctcttttttctgaggcaggtgtttcgaaactcgcgcaatttgaggataaagactatacaaaggactggagagagattgtaaaaacatttttgaataagttgagctcaggtcatcttgttacgctactcagcatcactaaattggttgaggtaacagaagacagatccctgactctcattgacgaaccagaggctcacctgcaccctccgttgatttctgcttacatccgtgccgtgtcacatcttatgagtgaaagaaacggagtagcgattgttgctacacactctccggtagttcttcaggaggttcgctcagactgtgtatggatattaaacaggacaggtcagtatgttagtgccgaccggccgcaaattgagacgtttggggaaaatgtcggaactctgacacgtgaagtattcagccacgaagtagtgaacactggcttttataaaatgatagcggacgcctgtgaaaaatttgctacatttgatgaagtaaataattattttagcaataaattaggtggagaagcacgagcattagcccggtcccttataaataagacaaaaagggatagcgatgattaa

SEQ ID NO: 147744 - DNA, 840 bp, Enterobacter cloacae
atgattaatataaacaagccaacaatcaatgatataaacataattactaactgtgctttagcttgtactgatgctttattagcacaggaattgatgggtgcaattccatatttcacacagatttatcaagactatgatcgtttgatgactgcgagtacgggctatacgatcccgcgttcactggcgcatggaaatctgaacgcagattttatgaagagtctttacaccaaacaacttgtaggcaaaacaggccgttgccgcgatgactatgacagaattttggcttcggcgccaagaaaaaaatgtcctatgtgttcggaaagtatagtaacagccttagaccatcacgttcccaaatcaagttattttctttattctattttcccaaaaaaccttgtgcctatctgctccagatgtaacgaagcaaaaaaacacacgatgcctgaccaactgaataaacaatttattcatccttattatgatgacttttcacaagcacaatggtttgaagttagattcacaagcattaaccctattgagttgacttacgtatgtaaaaataaccttcacttaggaaacggtgcagacgagaaacttaaaagccatttcagacgtttgaaactagatgagctttattcttcaaatgcaatagttagattagaggatatgaaaagcaacttccagccgcttctggaaataaatgattgggattcggtttatgaggaacttattgatcaactaagaatggtcagtcgtcgacctgactcatgggagtatgcattatttagcaagttaattaacgaaagatggtatatagaaggtggattttcaaatatttaa

SEQ ID NO: 147745 - DNA, 474 bp, Enterobacter cloacae
atgaccaacacgattaaccttaacgatacactcccgttaccaccgcaacctgccagtttttcgccagcgctgaccgccacccacgtacaggacgagcagcgcatcagcttctggccgcagcattttggcaacataccgcagtggataatgcttgagccgactatcttcgcatggatggaccgcttctgcacggactaccacggcggtatctggaatttttacatgctcagcaacggcggcgcgtttacggccccggaagcggagagcgatgaactctggtcgctgttcaacaccatgaatggcaatggcgtagagatgagtgctgaggctgccgggatagccgtctgtctgatgacttacagccatcacgccatgcgcaccgaatgcgatgccatgacggagcactactaccacctgcgggactacgcgctgaaccacgcggagtgtaacgccattatgcacatcattgactga

SEQ ID NO: 147746 - DNA, 357 bp, Enterobacter cloacae
atgcagaacacaacacctgtagcaaatcatgatattgccaacccctggtggggacttaaacccgctgtcatgccgagctttggcgcacggctggtgcaggagggcaatcgcctgcattacctggcagaccgcgccattatcaacggagtcttcagtgatgcggatttacgccatcttgaccaggcgttcccactattactgaagcagcttgagctgatgctcaccagctatgaactcaatccccgccactctcacagcgttacgctttacgcaaaaggactgacctgtgaggccgactccctcggttcgcatgggtacatctatatagcgatttacccaacacaacctgcagcataa

SEQ ID NO: 147747 - DNA, 231 bp, Enterobacter cloacae
atgccacacgccagtaaagtcagcgaagtcattaaactgctgctacagcatcaacacgatgatttcatattatgttcgctctggtacgaagatgatgtgtgcaatctggacgcttccgccacggatgaagaggcccatgcagccttacgctatgcagccaacaaccatgacgctgaacagggcattaactggttcacactggaggccgcacttgacgccatccggcagtaa

SEQ ID NO: 147748 - DNA, 378 bp, Enterobacter cloacae
atgcaaacccaacccaccatcccgatgcgggaggcatcgttatgcacgacgcccgttgaaatctggcagcaacttctcacgtatctgctggaaaggcattacggcctttcgcttaacgacatacagtttggtgatggcaatgtgatccagcagcatattgacgccgggatttcactggcagatgcactcaattttctcgttgaaaaatctgaactgattcgtattgaccgccccggtttctccattcagcatcagtctccctttattgaccgcattgacatactacgggccagacgggctaccggcctgatgaaacgtaacgggtacaaagcggtgaccgatatcaccaccggcaaatacagcggggtgacccgatga

SEQ ID NO: 147749 - DNA, 774 bp, Enterobacter cloacae
atgactacaactatttatgaccgtgtgaatcgtttagttgcaacggactcgcgttggtccagaggcttggatgatctaggttatccagggcacgtcgcatatgtggatgataccgggttcggtaaaatggcagtccgcgacgatcatgttcttaccctggctggtaatggacttttaattcagcactggaaagagtggtgggccacagacttaagcgagccaaggccacctatcttgattgatggcagcgaagcaataactcttcacatcgtcaagatctcaactaacactatcatctttgatattggcgaaatgttagcagctcaatatatcgatgaaaacggtcagattattaccaatgctgtttttgccggtaccggggcaccttatgctggcggaacttggcaaaaaactggttgcgcaagaacttccatcgatgctgcaaaggcgaatgatattcggactggcggcgaagttagatatgttgattttaatagcggcagtatgaacatcgaaacaagcaagctcttgatttcagatgttgctgaagcgcttttacataaggggatgatcatggatactaataacctgttaagtcagccagtgccgatcacagaaaacgaagtttcacacattcgccagttgattgctaatggtgacataacaccctgcgctccaacgggtgggaagactgttaactggactgcaaaatcactgtcacgtctcgatgctgcaattgatagcatccggagagacgaggctgagcaggcttaa

SEQ ID NO: 147750 - DNA, 198 bp, Enterobacter cloacae
atggttctggatgaagagcgtataagcatgaaaattcaggcgatggggcgggcggtcatggagttgtcactggcagatttacctatgacccagcaaaacatcatcgacaagctgaagcagtaccggaaggaaacaggaaacgtgatagggaagggagctaacagggatgcagctgagatagtgcggaaagggcaataa

SEQ ID NO: 147751 - DNA, 180 bp, Enterobacter cloacae
atggtggaatcaatttctaataactttgtgagatttgcagccttactgagcgctataggattaataaaaaggcatagtgaaggcaatagcgtaatgaatttgatagagattgtcatgatagctatgtggctgcaaatggattacggaaaaattttatctttattaaaaaaatcacattga

SEQ ID NO: 147752 - DNA, 1134 bp, Enterobacter cloacae
atggttaatatgaaaacagaaaaacttaatggaattgaggcgctaaggggtatcgctgccttggttgttgcacttggtcataaccggggactatttggacaggtagatcctgggtcctttatggatagaatcacggcaaatgctatatttggcgttgaagttttcttcataattagcggttttataatctgctattctaccagaaacataaaggcgccatcactaagaaatacatccgcctttcttattaaaagatttttccgcatatacccggtatattttgtaatactatccatatacgtactgcttttttataagaatttgtatacaggaatccatgcaggtggagaactgactatacataacattataaagtctattttcctaataccgctggattggaactcattaccaccttactatggatggggaactataatcgtttcgtggtcacttgggtatgagctgtatttttattttgtatttgcaatttccatgacaataagtattaaatacagggctattatttcatcattaatattgatagcagtcagtatttctttatctttggcattaagcgataacattataattgatgcgcaaaaatattatttccagggaggttttttactctctcattttggatttataggaaacccaattgtctttgattttatacttggaatgttgatttcacatatcactccttatattgacagattaaatattaacaatgacatagttaacagtttcgccatagcattccttggcctgtcattcgtgttttggttgaatggtatgtcagaaggtcatggtataacaagatctgcctatatagcattcactatagttatttgcgtaatcactcttgaaaagcactcaattataaaattcagcaatgcccttacatcattaggcgcaatatcatactcactttatttgatacatgtgcccgtaataaagtttatagaactatatggtcaacttattggcttaaacactaatgttagatcgcttgcactgtatatatcgtcaattacaatatcaatatgccttgcttatataatatataacgcaattgaaaaaccattcattaatacaggcgcaaaactagcaaggcggatttctaaataa

SEQ ID NO: 147753 - DNA, 156 bp, Enterobacter cloacae
atggcaaagcgaaaaaagatttattccagtccattcgaagaagagtgggctgtgctgaatcacagaatctttcacgcccgattgggcatcacgtttaaatggctagccgctgccacccttttcgacgcggcgcaccgtatcggaggagttatgtaa

SEQ ID NO: 147754 - DNA, 159 bp, Enterobacter cloacae
atgcgtgtgtggcgtaccaatgtagagtttgcgcccgccggggatcaggatgtgcgtttgctcacccaggcgatagcgcaacttttcacgcgcttccggcgtctggatattgcggggtacttcaacgtcatcgttctggcattcgttggcgcgcgctga

SEQ ID NO: 147755 - DNA, 459 bp, Enterobacter cloacae
atgccagtacagatgccccctggcatccgtcagcatcagagagaacgccgaggcgtcagccttaaccttgccagtggccacatcccaccaggcgacagcaccaactatttgcacgttgccaagccagagcgaggccgtgcggtttgcatagcggatctgagggtgaatgttgtattcccggatgcggtcagggtcgaggcgaacgtctccgacgggtttactgtgcagctgatactggctatcccactcgttaatcgtgcgggtttctttacggcggttctccatttcttcacgggtgaaccgttcaggccaggcgcagtctgcataaaaatcgataaccgtgtccggtgcgtccgcaaactcaacgccgtcggcggtcagcttataatccacgttttcgaccaacagtcgcgccgccttgtggatgcccgcaaagacatattccggacggaaagataa

SEQ ID NO: 147756 - DNA, 255 bp, Enterobacter cloacae
atgggcaagtttactttcgtcattgagttcgaagacggcaaggagccgccagtacatgcccatatggaagctttcggcgggagggttgttgcggtcgcgttccgtgatgcattgagcgaggacaatcctccgaagacgatcaatacatatcctcaggtgcttagcgagatgcggtgctttatctgcaatggtaagcacccgatcggtatcgcctgcccattaagttcgccaacagtggtgtctcatgatgcctaa

SEQ ID NO: 147757 - DNA, 621 bp, Enterobacter cloacae; identical to SEQ ID NO: 27254

SEQ ID NO: 147758 - DNA, 1356 bp, Enterobacter cloacae
atgtttgtttatttgactattgaaaattttaggtcggttaaggaaaaatcgacattaaacttgagcgcatccggttctagtaaccatttaacaactcatatctataaaaatgatggaatgaatgttggaacgctcatgagtgctgggatttatggtgctaatgcgtctggtaaatctaacgttctcatggcttttgaagctataaaatttatcgcaacagaaagcggtgatttgaaagaaggtaaacggattccctgctatgagccatatgctctttcttcggctacgaatgaggctcctgtaaagtttgaggctgaattttattctgttgaggggaatcggttcagttatgaagttgcttttattaaaaatcggattttatttgaatcattagactattatccatctagggttaaagcaaatttatttactagagatgagagcgacacctgggaaacaatcaagtttggtgggcattataaaggaggtattaaaaaaataccattcttccctaataattcatacttagcgaaagcaggtaataatgccgcatcaccagacataattaaagaagcttataacttttttagaaagggaattagacatataggtttaaatgaaaagataagaatatcttcttttggggagagggaggacgtcgtaaatgaaacggccaaggttttatgcatggttgacactggtgtttccggtatatctgtacgggaggttgaggcggaaatgccaataaaaatggatgaggaaatccctcaagaaataaaggagataattgaagaagattataaatatcgttatatgttctctcatcctactgatgaaggggggagtgtttctttccctatggggagagagtctgaaggcacccaaaaattatttgaaatcatacctctaattagatctgcgtttaatgatagtatggttgtaattattgatgagttagataatagcttgcacccgcatattgctgacttgattgttaagttatttaatgatcctgatgtcaataaaaaaggctcacaacttgtattctcaacccataatatgcagttaatggctccagagaaaatgagaagagatcagatatggttttgtgaaaaaaataaaggtgcgtcgtctctttatagcttagatgattttgataagaaaaagataaaaacaacaacaccttacgcagcttggtatgatgagggtaggtttggtggggttcccgacataaactacttaaaggtagcctcatttatatctggtgatatatccttggtaatgccggatattgacgtcaaagaattgtctgatggtttttttgaagagtttgacggggatctttctgatgagtaa

SEQ ID NO: 147759 - DNA, 213 bp, Enterobacter cloacae
atgacggaactggaaaaacagttgctgaccgcattagagcagctacatcaggactactcgcaaaggctggacgagtgggagagcgccttcgcggaatggcagaagatgtctggtcttatgcaacgggagaacgcggcgctgaacgagcgcgtcacgcgcttgagtcagcaggtggcgaacttgagcaggcagttacagcgtttgagccagtag

SEQ ID NO: 147760 - DNA, 486 bp, Enterobacter cloacae
atgagcagtcttttagcgctggcgaaggacttggagcagcaatcgaaagcgcagcagcagagtaccggcgagatgctgaaagccgcattcagcgagcacgagcagtctgtaaaagcggaactgagcgcaagcgcgaagagaatcagcgacgccatcagcgcccacgagcagggtatgaccgcggcgatgcagtcgaaccggctgagcgtgctgcgtatggtcggccggacgtggctgaccatcaccctggtctcggtactgctgatcgccacgagcgggagcattctgtggtggcaggggcagcagatcaccgggaattaccagactatccgggcgcaggagcggacgcaggccatgctgtcggagaagaaccacggcgtgcagctgtcgctctgcggggagaagaaactgtcctgcgtcaaagtgaacccgaaagcgggagcttacggggaggaagggaactggatggtactggagaggaaatag

SEQ ID NO: 147761 - DNA, 540 bp, Enterobacter cloacae; identical to SEQ ID NO: 35480

SEQ ID NO: 147762 - DNA, 234 bp, Enterobacter cloacae; identical to SEQ ID NO: 28326

SEQ ID NO: 147763 - DNA, 1959 bp, Enterobacter cloacae
atgtcagttacagagtctaaggtaaaaacggagcgtaaatccagccgtaaacctgcaaaaacgcaggaaacagtcctgtcggccctgctggcggagacggctgaagtgagcgtgccgctggcctcgctgattaagtcaccgctgaatgtgcgcacggtgccgtattctgcggagtccgtcagcgaactggcagagtccattcagggcgtcggcctgctgcagaatctggttgttcatgccctgccaggtgaccgttacggtgtcgccgcaggcggtcgccgactggcagcactcaacatgctggcagagcgcaacatccttccggctgactggcctgtccgcgtgaaggttattccgcaggaactggcgactgccgcatcaatgactgaaaacggtcatcgtcgggatatgcaccctgccgaacagattgccggattccgtgcaatggcgcaggaaggcaaaacgcctgcacaaatcggtgatttgctgggctattcaccccgccacgttcagcgaatgctgaaactggcagaccttgcgcctgtcatcctcgatgcgctggcagaagaccgcatcaccacagagcactgtcaggcgctggcgctggagaacgacaccgcgcgtcaggtgcaggtgtttgaagctgcctgtcagtcgggatggggcggaaaaccggaagtacagaccattcgtcgtctggtgaccgaaagtgaagtggcggtggtggggaacactaaattccgctttgtgggggctgatgccttctcgccagacgaactgcgcaccgatttgttcagcgacgacgagggtggctatgtggactgcgtggcgctcgatgccgccctgctggaaaaactccaggctgtcgcagagttccttcgggaagccgaaggctgggaatggtgcgccggacgcatggagcctgtcggtgagtgccgtgaggatgccggaacataccgctgtctgccggagccggaagcggtgctgaccgaggcggaagaagaacgtctgaacgaactgatggcacgttacgacgcgctggaaaaccagtgtgaggaatctgacctgctggaagcagaaatgaagctgatgcgctgcatggcgaaggtcagagcgtggacgccggagatgcgtgccggaggtggagtggtggtgtcctggcgttatggaaacgtatgtgtccagcgtggtgtgcagttacgcagtgaggatgatgcggctgacgacgctgaccgcacggaacaggtgcaggaaaaagcgtcagtggaggaaatcagtctgccactgctgacgaaaatgtcttccgaacgcacgctggcagtccaggcagcactgatgcagcaaccggacaaatccctgacactgctggcatggacgctctgcctgaatgtgtttggcagcggagcgtacagtaaaccagcacaaatcagcctggaatgtaaacattattcgctgaccagcgatgcgccatcggggaaggaaggtgccgcattcatggcgctgatggcagaaaaagcccgtcttgctgccctgttaccggagggatggtcacgggacatgacgacattcctgtcactcagtcaggaggtgctgttatccctgctcagtttctgcaccgcatgcagccttaacggtgtccagacccgtgagtatggtcacacgtcacgcagtccgctggacacgctggagagcgccatcggctttcacatgcgcgactggtggcagccgacgaaagcaaactttttcggacacctgaaaaagccgcagattatcgcagccctgaatgaggcaggactatccggtgccgcacgggacgcggagaagatgaagaaaggcgatgcggctgaacatgcagagcaccatatgaaagacaaccgctgggtgcctggctggatgtgtgcaccacgcccacagacggatgccactgaacgcaccgataacctggctgatgccgcctga

SEQ ID NO: 147764 - DNA, 435 bp, Enterobacter cloacae; identical to SEQ ID NO: 13693

SEQ ID NO: 147765 - DNA, 720 bp, Enterobacter cloacae
atgagcgcacgttcacaggcactggttcccctcagcacagagcaacaggccgcatggcgggcagtggcagagacggaaaaacgccgccatcagggtaacacgctggcggaatatccgtatgcgggggcgtttttccgctgtctgaacggaagccgcaggatatcgctgtctgacctgcgatttttcatgccgtccctgaccgcagaagaactgcacggcaaccgtcttcagtggctgtatgccatcgatgtgctgattgaaacacagggcgaggtctgcctccttccccttccaggcgatgcagcagaacgcttgttcccgtcggtgcggtttcgtgtcagggaacgcagtcgccataaatccgcgctggtcatgcagaagtacagccgccagcaggcgagggaggcagagcagaaagcccgtgcgtaccaggcgctggtcgcccaggctgaaatcgaactggcgttccattcaccggaaacagtcggaagctggcatgcacgctggagtgaccgggtggcagagcatgacctggaaaccctgttctggcagtggggcgagcgttttccgtcactggccggaatggaacgctggcagtggcaggatatgccgttctggcaggttattgcggaagccagtcttgcagcaagagaggccggtcacgctgtccgtgagatggagcggtggatggtgccgaacaaactccgggaggcagcgtga

SEQ ID NO: 147766 - DNA, 243 bp, Enterobacter cloacae
atgccactccagtcgatgaactgttcaccaccaccgcttatggtagtaaaaatggccatgccgccattagagacgttctgtattccaccactattgatggtggtagaagtagctatgccggcatttgatatattctgggttgcactttcgatggttgtaaaaatggccaagccgccgcttgagacgttttgtattccagcactgttaatggtagtggatgaggctatacctgtaatgttttga

SEQ ID NO: 147767 - DNA, 165 bp, Enterobacter cloacae
atggttatccccgaggacgcggataccatcatgcccgccctgccggtggcagaaaaaaagctcccgggcagggagcggaagacaacgtgtcacagagttaaaacctggtttcaggcacctcagttatcggccgccgccgcgccggccttagagggcaggcggtaa

SEQ ID NO: 147768 - DNA, 1311 bp, Enterobacter cloacae
atgtatatgcgttcacttaaaaatctgttctccctgaaccgccagcgctcagccatttcgtatgacgcaatttgtcagaataagcctgtcattgaattcagtccggagggggtgatacataaagccagcccgctttttctctccactatggggtacagggctgatgaaataatcggtcaccaccatcgtatattctgcccaccctctctggtgagttcaccggaatacagccatttctggcagcgccttgcccggggagaaagctttagtggcaagttcctgcggctggcaaagggaaatcgttccgtatggcttgaagccagttatatccccgttactgaccggcgcggtcgtgtgaccagagtcattaaaattgctgcagatatttctgagcgcgtgcattctgcgcttgagcaggaagcagtcgtaaatgccataaaccgttctatggccataatcaccttcaatcctgaagggatcgtgcttgatgcaaatgaaaatttcgtcaatgccactggctataaacgggatgaagtcatcggtaagcatcatcgtctgttttgtgccgagacgctttacaaaagtgatgaataccgacagttctgggagaggctgaatcagggtgagtttttttctggtcagtttccacgtattaaccgtcagggagaccctctgtggttccgtgcaacttataaccctgtctttaacagtgacgggcagctttataaaattgtgaaattcgctacagatgtcacggctgatgtcctgcgaaaccagagagagcaggaggctgctgtgcatgcatgggatatggccgtgcagacacgaggaagtgcgcagaacggtgcaaatgttattgaaaatagcatccttatgattgacagaattgcgcaggggatgggagctgtctccaccgatgtctcccggctcaacaatcagtctgaaagtattgacggtatggtggaaaccatccggaagtttgccatgcaaacaagacttattgcattgaatgccgcgattgaagcagcaagggcgggcgcatccggaagaagttttgcggttgttgccgcagaggtgcgtaatcttgcggcgagcgtcagtagcgcgactgaagaaattgagcaagtcgtggccagcaatagtcaactggccaaagatgttctaactggcattgaaaacagcctgatgaacacccgggaaggggttacactcatgcgtgaagcgggtgaagtgatgaccagcattcagaggaatgctgcaggagttgagactgcggttaaggatgtcgccatttcagttaaagccggatag

SEQ ID NO: 147769 - DNA, 3009 bp, Enterobacter cloacae
atgcccgtcgattttctgaccactgagcaggaactgaattatggtcgctatgttgcagaacccaatgacgtgcagctggcgcgctattttcatcttgatgagcgggatcttgccttcattaaccagcggcggggaaggcataaccggctgggaattgcgcttcagctcaccaccgcccgttttctgggcacctttctgacagacttaacccgggttctgccaggtgttcagcaatttgtcgcggtgcagcttaatattcgccgtccagaagtccttacccgctacgcagaacgggttaccaccctcagagagcatactgcgctgattaaggaatattacggttaccatgaatttggcgatttcccctggtctttccgcctgaagcgcctgctgtacacccgcgcatggctcagtaatgagcgacccggccttatgtttgattttgccaccgcgtggctgcttcagaataaggtcctgctgcccggagcaaccacacttgtacgtctcgtcagtgaaatacgcgaacgggcaaatcagcggctgtggaagaaactggccgcgttgccggacagctggcagaccgcccgcgtgacggagcttctggacattcctgaggggcagcgtacttcaccgctggagcaactgaaaaagggaccggtcaccgtcagcggcccggcatttaccgaagcgctggagcggtatatccggctgcgaaacctggaattttcccgactgaattttaccggtctgcctgctatacaactgcgtaatttggcccgttacgcaggcatggcgtcggtaaaatatatcgcgcgaatgccacagcagagaaaactggccgtactcacagcattcgttaaagcgcaggagactgcggcgctggatgaggccgttgatgtgctcgatatgctgatactggatatcactcgtgcggcgaagaaaacggggcagaaaaaacggctcaggacgcttaaagatcttgatcgtgctgcgctaatattggcgcgggcatgttcattgttgctggatgaacaggctgacgatgctgaactgagggagaccatattcaacagcataccgaaaagcaggctggcagaatccgtctgcaaggtaaatgagctggcccggcctcagaacaacaatttccatgacgaaatggtggagcagtacgggcgggtaaagcgctttcttccggcggtattgcgcgacctgcatttccaggcagcgccagccggagaacatacgttgtccgccattcattatctgaccgaactgaactgctcgaaaaagcgcatcctggacaatgcgcctgaacatattattaccggcccctggaaacgcctggtatacgatgcggagggccggatacagcgtgccggttactcgctttgtctgctggagcgccttcaggatgcactacgtcgaagggacatctggctcgaaaacagcgatcgctggggaaatccccgcgagaagctgttgcagggggaagaatggcaggctcagcgggtccccgtttgccgggcgctgggacatcccactgatggacataaaggcgtgcaacagttggcggcccagctagatgaaacctggaaaaccgtcgcatcccgctttgaaggaaatgcggaggttcatatttgccatgacggtaaacatccttccctgactatcagcagcctggagaaactggaggagccaccatcgttgcatcgtctcaacagtcgggtaaggctgctactcccgccagtagatttgacggaactgttgcttgaaatagatgccagaacgggatttacacgtgagtttacgcatgtcagtgaatccggggcccgggcacaggatctgcacatcagcctgtgcgcggtcctgatggcagaggcctgcaatatcgggctggaaccgctgataaagcacaatataccggcgctgacgcgccaccggcttagctgggtaaaacagaattacctccgggcagaaacgctggtcagcgccaatgcccgcctggttgattttcagtccacactggagcttgctggccgctggggtggtggcgaagtggcttcagctgatggcatgcgctttgtcacgccggtgaaaaccgtcaattcaggacctaacagaaaatattttggttccggacgtggcatcacctggtacaacttcgtctctgatcagtactctggattccacggcatcgttgtccccggcacattacgagattccatttttgtgctggaaggccttctggagcagcagacagggctgaatccggttgagatcatgacagacacagccggtaccagcgacattatttttggcctcttctggctgctgggataccagttttccccccggcttgccgatgccggtgaagcggtattctggcgagtggataaatcggcaaattacggtgcactggacgaactggcacgtggttgtgccgatctgtcgaaagccgaggatcagtgggatgagatgatgcgaaccgccggttcgctgaaactgggcaccattcatgcttcagaactcattcgctctttgctgaaaagctcgcgcccatcagggctggcacaggcgatcatggaagtggggcgcgtcaacaagacgctgtaccttcttaattatattgatgatgaggattatcgtcggcggatcctgacgcagctaaaccggggggaaggccgccatgctgtggcgagggcgatctgctacgggcagcgcggtgagatcagaaagcgctatcgtgaaggtcaggaagatcagctgggggcactgggcctggtcactaacgcagtggtactgtggaacacactttatatgcaggaagccctgagctggatacgcagtaatggagaagaaatcggggttgaagatatcgcccggttgtccccactgatgcacgggcatatcaatatgctggggcattatacgtttacgctaccggaggatattttgaagggggaactgagagaactaaatttcaatttaaacaatgaattaacttcttag

SEQ ID NO: 147770 - DNA, 459 bp, Enterobacter cloacae; identical to SEQ ID NO: 147755

SEQ ID NO: 147771 - DNA, 159 bp, Enterobacter cloacae; identical to SEQ ID NO: 147754

SEQ ID NO: 147772 - DNA, 342 bp, Enterobacter cloacae
atgcatcaggattacaaaacacgccttaccgcactgagtgataaactcaccgacgtggtgctcgaagaagccgatccggaaaactggccgggggcggggaagaaaccgagcgaactgaccaaggatgaacgcggtgatcgctactgggataagaagaatgcagccgcatcgctgacgctgctgattaaggttcactccctgattggcatgcaaacgcgcggcggtacgccatccgataatcctggtcagaatgatgaagcctttgcgctgggccagcaggtttcaaaagctgagcgagaggcggccgcgattattgagcgcctgcagaaagggaaaaaatga

SEQ ID NO: 147773 - DNA, 858 bp, Enterobacter cloacae
atggagcgcgtcaccgatgcgttcggcaagctcacgctgatgggccacttcgacgatatgaacaaatcggtaaacggcatgatcacctctgacggaattctgtccggtacgttcgctggccgccgccttgccaagctcggcattaacgacaatatggccgcgcgtatccgcagcgaattcgaaaagcacggcgaggtaatcaatggctggcatatcggcaattttgaaaaatgggacgatcagcatgtggctggtgtcttccagtcggcggtgctcaaagacgttaacaataccgttatcacaccggggatcggcgatacaccactgtgggccagcacgccgctgggtaaaactatcttccagtttaaatcgttcgctactgcgtcctacaaccgtgcaacgctgggcggcctgcaggagggaaccggtcagttttattacggtaccgctttccagattggcctcggcgcactgacgtacgcgctgaaacagtctgcaaacggtaaagaggttgactggtcgcctcagaaactcgtcattgaaggtgtcgaccgttccggtattctcggccctctgatggaatataacaatatggcggaaaaggcatccggcggaatggtggggctgggcgcattgctcggtaccggcacacagtcacgttatgccagccgtggctttatcggctctgcgctggggccgacgtttggcctgctcgataccattaccgacgtgaccgctggtgtgctcaatggtgatgcaggtgaccgggtgctgcacaacgtgcgtacgctgctaccgggaaacaatcttttctggattgcgccgctgataaatcaggttgaccctggcatgcggtaa

SEQ ID NO: 147774 - DNA, 687 bp, Enterobacter cloacae
  misc_feature (506)..(515): n is a, c, g, or t
atgctgagttttgcagaagaagaggtagaatttaaagcgctgggtgatatttgtacattgatttctgctggaggagatgtccctgaaaattgtgttaaaggccaaacacgaccaacaaatgaacacccttatccagtttacgcaaacgccacggatgaaaaggcgttatatggttacactgattcgtacaaaatcgacagtgatgcggtgacaatttcagcgcgaggggcaaaggttggatatcatacagtcagggaggcaaagttcacccctattattcgcttgatagcattagtcgccaataagaatttagttagaacacgatatcttaattatgttttagatatgacgcctattgggggcaccgatggtggaatcccacaaattacagttcctatgattaagaaaattatcgtcccggttcctttcgcaagcgatattaatagatcacttgccgagcaggatcgtattattgagattctagatagatttgaagtcttgacccnnnnnnnnnncggcggaaacagtacgaatactatcgtaatttgctgctcaattttccaaagccagacgccaccagtaactgacagactattgataccagcagagtttgttttcacccgcccggtatcaggctttacgaatgccggaagatgctctaacccccttccggactttgcccgatga

SEQ ID NO: 147775 - DNA, 660 bp, Enterobacter cloacae
  misc_feature (540)..(549): n is a, c, g, or t
atgacacaacagacacacaccatcgctgaatccaataactttattgttcttgagaaatacaccaaagcctgggaatcaagtgaaagctaccagagcgaatcagacctagagcgtgaactgattcgggaccttcttaatcagggttatgagtttatctccgttaagtcaccgactgcgatgctggcgaatgtgcgggaccaacttcagcgtcttaatggtgtggtgtttaacgaaagtgaatggcggcgtttcgcagagcagtatctggacagccccagtgacagcagcctggacaaaacccgtaaaatccatatcgactatatctgtgatttcacgtttgatgacggtcgtctggaaaacatctatctgatagataaaaagagcctgctgcgcaataaggtgcaggtcattcagcagtttgagcagaccggctcacacgctaaccgttatgacgtcaccattctggttaacggtctgccgctggtgcaaatcgaactcaaaaagcgtggcgtggcgattcgtgaagcctttaaccagatnnnnnnnnnnataactccctgtttaaatacctgcaactcttcgttatttccaacgggactgatacccggtactttgccagtaccactaaacgggataaaaatagctttgatttcaccatga

SEQ ID NO: 147776 - DNA, 846 bp, Enterobacter cloacae
atggcaaacgaattaacaatcacggcgagcgcgctgcaggaaaaaggcatcgacgtcgctacctggagcgcgctgaagaacagtatctatcctggcgccaaagacgaatcggtaatgatggcgctcgattactgccgcgcccgccagttggatccgttgctgaagcccgttcacctcgtgccgatgagcgtcaaagactcaagaacgggtaaaagcgaatggcgcgacgtggtcatgccgggaatcgggctttaccgtattcaggcagaccgctccggcgattatgccggggctcgggagccggagttcggtcctgacgttactcagacgcttactggtgtcgaagttactttccctcagtggtgcaaatacaccgtctacaagcgcatgcccagcggcgagatcgtcgagttcagcgccaaagaatactggattgaaaactatgccaccggcggtcgcgacaccacggcgccgaatgcaatgtggaaaaagcgcccatacggccagctggcgaaatgcgcagaagcccaggcgttgcgtaaagcatggcctgagattggacagcagcctaccgccgaagaaatggaaggtaaatcactggacgtagatatccgtgacgtcacgccgcgcaacacgactgaagcacttccaccagcagcaagcgaagaaacgctgcaggcgataaccgatctcttaacgaccctggataaagactgggagaaagacttcctccctgtgtgcagcgacatcttcaaacggccaattcttgaggcgtcagacctcactgaagaagaggcacagaaagggttcaacttccttcagaaaaaagctaaggcggcagcatga

SEQ ID NO: 147777 - DNA, 837 bp, Enterobacter cloacae
atgtggaagattaaacacttattcatgaacgctgagcagggcgcagaacagccaggcggcggtaacggaggtggtgaagatggcagcaataatccgggtactggcgaaccttctggtaattctctgctcagcgccggcgcgggcgaaccgggcgcgtctgactggctaccggaaaaatatcgcgttatgggcgaggacggaaaactcaatattgagggctctgcccgcaaactggcggatgctcacacttcgcttgagaaacgtcttggcagcgtcggcacgccgccgaaaactgcagatgagtatgagcctaaggtagaggtcgagggtttcaactgggaagaattcaaagccgatccgcgcatgcagagctttatgaaatctgcgcacgccaaaggcattaccaatgaccagatgagtttcatcctgggtgaatacgcacagcgtgctcctgagctggtgggcggtgcagctgcgctggattctgaagcggccagcacgcagctgcgcgaggtatggaaaaccgacgcggaatttaacaaaaacatcggcctggctttccgcgctttcaactccctggctgacgacgccgacaagggccgcattgacgagatcggcaataacccgatggttattcgcatgctggctaaagtaggcgctgaaatgcaggaagatgcgccagcgggcggcgatgtcaatatcgaggagcagcagaccattcgcgacctgatgaagtccccggcgtacatggatccgaaacacgctgaccacgaacgcgtatctgcgcgagtcaaagcgtactaccagaagcgttacggcgatcaaaccgtagcgtga

SEQ ID NO: 147778 - DNA, 171 bp, Enterobacter cloacae
atgagtaataaacaaaccgcacaagcattaacgcaggaccagcaaggttatttgttcgaggccaaagccaatttactggctgggctgattttacagcaacagccaacgaagcaagaggcggaagcgctggcagaaacagtcaatgcagcattcgacaagctaaccgcctaa

SEQ ID NO: 147779 - DNA, 1005 bp, Enterobacter cloacae; identical to SEQ ID NO: 31749

SEQ ID NO: 147780 - DNA, 1005 bp, Enterobacter cloacae; identical to SEQ ID NO: 133534

SEQ ID NO: 147781 - DNA, 126 bp, Enterobacter cloacae
atgagtgagctaagttatcttgaaaaactaatgtatggggttgaagttgagtggaaaactttaggcagtgtctgcaaaattgaaacaggaaaactaaataccgctggaatacagaggcattattaa

SEQ ID NO: 147782 - DNA, 795 bp, Enterobacter cloacae
atggcgaaaacatttaattttgaagagttttatgtttccagaatcatgaggatttacccgccagtagctttttctataataatgatttatgcatcatcctatttaatatccccaaaccattcatatcagattaatgatctaattcagtcattgccttcgctttttaattacccgatgacgcgtataaatgacatacctctcgtaataatgaattccggtgttctttggacaatggtgtgggagctaagactatatgttgccatacctatcatattcatattattaaaaagattcccttaccccaaatcttttgtgctgatatctatgtcctatgttgtctaccaatggtactttataagtaaagatattcaattgagctatgtaatgtactttcttgctggctttatggttgcaactataaaaaaagaaattaagttacatgattcaatcagttcaattatactttttttcgctgttatgttgataggaaaggcatatgatgtaataactccattattaatgatggttgttttttatactcttaagtgcggatgtacatactttggtatacttacgtgcaaaccagttagagtccttggtgcctgtagtttctcaatttacctaatccatggaattcctcaggccgtatctaaatactacttgtatgatgagggttatatgatttggaaattggtgtctgtagcaaccttaggtgttattgcccctataatgtacaaatacattgaaaaacccacaatgcatataaatctgttagccgcgcagaaggtttcttaa

SEQ ID NO: 147783 - DNA, 147 bp, Enterobacter cloacae
atggatgaactggagcatgatggaaagcgcgacagaagtcaaatgatgcccaaacgacgagcacaggcaagaattcaggagcaactgaggagcattaaccccgtgctggttaacccggaagagttcagggctagcctgaaacgctag

SEQ ID NO: 147784 - DNA, 168 bp, Enterobacter cloacae
atgacgatgcagtccaagctggcgtatgcagtgaccgggtccaccagcctgcgcgatagcctggcgcaggaggcttcatttctgctgaaacaggcaaaagctatcgacgggcaggaagatccgccggaagagctgggcggctatccaacttatgagtcgaggttctga

SEQ ID NO: 147785 - DNA, 342 bp, Enterobacter cloacae; identical to SEQ ID NO: 24324

SEQ ID NO: 147786 - DNA, 744 bp, Enterobacter cloacae
atgtttgggcttggtcgtccggatggggcattaatattcaacacaacgagccaggatgatcttcttgttggattgacagggtatgggcttacggttcttcgaaataatgcacagataccagagccatggaatatatggaactattcaccgacaatatttgcccgtgcaggtgatacgtatagccttttttcaatgccttttcagtcatctggaaaagtacgtgtttttgggggcactacagcatcaggctggactcatagcaggatattatacgatgataaaaatactgttgtagatagcaatggcttcataaagcaggcatccccggtcgtcaaaatcttcactgatggtaagtatgaaactaacgacgaatcagaaggcgtcacggtcactcgtctggatgtcgggcaatatcttattgaaggctgtaaagcactcaattcagacgctgcatggggaggtatcgacggagggtttgagattcccacagacaggaataagcaaccgcttatatggctggactacgaggttaacgcagacggctctgtgctggtaaaaacctatcaccgcgaacatccttctgcgccagcatttgccaggaatgagcgtgatggattggcagatggcgagccggttgacatcccggctgaccagttcgtcagcgttcgtgtagaaatgccagctgacagcatctggaatcagaaacaagcggaagaggctttaaagcaggaacagggctcgtaa

SEQ ID NO: 147787 - DNA, 192 bp, Enterobacter cloacae
atggcgcatgaattttctttagaacaagcaaaagaaaaggcccatcaagcagaaataatttgccgcatgatggaagtgtaccctaacaaaatggactgcacagaaattgaagctatagcttcgctacttagcaagttaactggcgatgtatgcgcttggttcatagaagaacaagccataaaatcgaagtaa

SEQ ID NO: 147788 - DNA, 309 bp, Enterobacter cloacae
atgaccactagaaatattattcagcttattgatatccctgatttcagatttaccaatcaagatccggatattaactatgctgatgttgcagatgattgtgattcaaaaaccatttcgactatcgaagcaattcgtcatttaagcgaatcgattttcagtatgtctctggaagaagagaaagataatgaaaaaattcgcaatctatcagccattatttatgacttggcagacctggcaattgctactaataaaatctcacaaaccgcaacttatctttctggcgtaaaggatggcactcatggcgcatga

SEQ ID NO: 147789 - DNA, 702 bp, Enterobacter cloacae
atgaacaacaacacatactcagcccggttagtcgaagcaatgaaagaagctggctttacacaagcatcccttgcaaaagcggtggggatgtctcaatccagcatctggaagcttacttcaggcgcggcgagcggatcacgaaagactgtccagttatcccaggtccttggggttagacctgagtggctttcctcaggtgaaggccccaaatacgtggtagggcttactgaggccgaggagtctatttcacacgagccagcaagagacacctatcgtgtggacgttctggatgttcaagccagcgcaggtcccggaaccttcgtgtcctctgagtttatagagacaataagggctatagagtacaccgaagagcaggcaaggcttatgtttggtaaccgaccagcccatgctatcaaggtcattactgtaaatggcgacagcatggagggaaccattgaccctggtgattttgttttcgtcgatacttcggtcaatcatttcgaaggcgatgggatctatgtctttatttttgggaagactattcatatcaagcgattacaaatgcttaaaacaagtttgatggtcctttctgataacaagctatataactcttgggagattgaggagagcgatgaaggtcagttctacgtccttggcaaagtactaatcaaacaatcagcagaatttaaacgcttcggataa

SEQ ID NO: 147790 - DNA, 228 bp, Enterobacter cloacae
atgatttcagagccaatcgacattgccatccggcgggcaggtagccagggggcgctggctaagctttgcggcgtctctcaggcaacagtatggaaatggcgccatggaaaaaaagttaaagcagagcacgttctaagaattgtagccgctgctgaaggacaagttgccgcatatcaaatcagacctgacttaccggagctattcccaaagccagaaaaagagcagtga

SEQ ID NO: 147791 - DNA, 546 bp, Enterobacter cloacae
atggatattattagaaattcagtctggctctctcaaggcactgatttgcttgcagaggggctttatcgtgttttggattttgacagaaaggttgatttgttaattttgtttaaaataaaatcagaaagaacgggtaagccaattcctttctcattttcattgtttaaatattatattgaatcaaatagcataacttgtaaagattatatatacccttcatatatgttagtagatgagaaagaaataacagatgaagacaggggaaggcgagatgaaaattacaatatcattaaagatcttgtagatgacagaatgtttctgttcgactatgcattacataaaaagtctcaccttttaatggactactccagaaataaaaaaatatcacaatatactatcagaacgcttctggcgttgtactggcgacatgggcaagatgtttatgcattactacccgcattctcgaactgtggtgccgctgggaaaagtagaatcaaacatgaaattaaacttgggaattccaaaaaaaaacagagcattacctaa

SEQ ID NO: 147792 - DNA, 837 bp, Enterobacter cloacae
atgacgatcccggaggggctgagcgtgccctgggatgaaacgctgtgtaagcgcgcgctggatagcgacaccatcttcagtaacgatgtccccgagcgctggccggagtgcgaagcggcgaaagctctcggtattaccacttacatgagcattccggttcatctcgccgatggctcgctttacggtacgctttgcgccaccagcacggctaaaaagccgctcagcgagcgcggtgaacagatgttaaaattattcgccgggttgattggtcagtacattcagaaagaatctctggtgaaccagcttcgggaagccaacgcggcgctcatcgcacactcttataccgatgcccttaccggcctgcccaaccgtcgcgccatttttgaggatctgactactctgttttccctggctcgacacctgaaacgtaacgccatcattgcgtttatcgacctggacgattttaaattgattaacgatcggtatgggcatgaagcaggcgaccagttcctgattgaagtgggcaagcgtttgaccgcagaaaaacagcaggacgatatcattggtcggctgggcggcgatgagtttctggtggcctctctgagtcatgtcgacaatgaggagcacatgaatcagctcaaagcgcgcttcagcgcacgcatttcaggggaatactggctgggtaacattaaccttatttatccgggagccagcctcggcgttatcgaagtggacccagacgtaaccgatccggacagcgcattacgtgctgctgatgtggcgatgtatcaggataagaaaggaaaaagcaaaacacgctttctcgcgatggattaa

SEQ ID NO: 147793 - DNA, 333 bp, Enterobacter cloacae; identical to SEQ ID NO: 13702

SEQ ID NO: 147794 - DNA, 768 bp, Enterobacter cloacae; identical to SEQ ID NO: 13701

SEQ ID NO: 147795 - DNA, 507 bp, Enterobacter cloacae; identical to SEQ ID NO: 13700

SEQ ID NO: 147796 - DNA, 1068 bp, Enterobacter cloacae; identical to SEQ ID NO: 13699

SEQ ID NO: 147797 - DNA, 204 bp, Enterobacter cloacae; identical to SEQ ID NO: 13698

SEQ ID NO: 147798 - DNA, 249 bp, Enterobacter cloacae; identical to SEQ ID NO: 13648

SEQ ID NO: 147799 - DNA, 1428 bp, Enterobacter cloacae; identical to SEQ ID NO: 13647

SEQ ID NO: 147800 - DNA, 237 bp, Enterobacter cloacae; identical to SEQ ID NO: 13646

SEQ ID NO: 147801 - DNA, 780 bp, Enterobacter cloacae; identical to SEQ ID NO: 52392

SEQ ID NO: 147802 - DNA, 189 bp, Enterobacter cloacae; identical to SEQ ID NO: 13644

SEQ ID NO: 147803 - DNA, 882 bp, Enterobacter cloacae; identical to SEQ ID NO: 13643

SEQ ID NO: 147804 - DNA, 828 bp, Enterobacter cloacae; identical to SEQ ID NO: 13642

SEQ ID NO: 147805 - DNA, 222 bp, Enterobacter cloacae; identical to SEQ ID NO: 13641

SEQ ID NO: 147806 - DNA, 978 bp, Enterobacter cloacae
atggatcaagagtccggcaatgccaggattcaagttccttctgactcagtgaatggtctttcgataggagcggctaattctacagatcctaataaatgggcgcgttcctcgtatagtgctatggggccaggcagaagccctggtgttattaagcctgacttagttgcttttgggggcgaagaaagcgaatattttcatgtactaactgaagatgtaaatccagtaatagcacctctaatgggtacaagctttgctgcgccatatgcattacggactgcggttggaatcaaggcccttttgggtggaaatctaacaacgttagcgattaaagcgctgatgattcattcatgttctcaaaaaaattattcccatgccgaagttggttggggaaaactacctgaagatgttaatgatataattataagccctgatggagtcgccagaatagtgtatcaaggagagttgaagcctggcaaatatctcagagcagcactaccaatacctgatggcggtcttaatggtatggtgaacctaacagcaaccttttgttattcaacatctgtcgaccctcaggattcagcctcttacacaaaggcaggcctcgaaatttcgttccgaccggatgagaataagaaaaagcaaggcgctcagaacgctgatactaaaggtttttttgagcttaaaaaatatgctaatgaacaagagcgtcgttctgatatggggaaatgggagacagtactacatgcatcaaaaagtatgcgtggcacgtctctaaataaacctgttttcgacattcattataatgcaaggcaaggaggaggcgcgatacaaagtaacaaagctgacaaaattaaatatgctttgatacttacgataaccgcaaataaacatccggatttgtataacgatatattacgaagttataaccaaattttggcacctattcagcctcaagctactgtccctgtcagaacttag

SEQ ID NO: 147807 - DNA, 405 bp, Enterobacter cloacae
atgaattattatttttcgaaatcagagctgggattctattgcgatgaagtgaatgaagccattccgactgatgcagtggagatcagtgaggatgtatatttatctcttctggaaggtcaatccaaagggaaattcatctccgcagatagcgctggaacaccggttctgactgatccgcctgaacctacccaggtggaattagtggcgcaggcagaagacaagcgcacagcattaatggaggaggcaaatgccagtatcaccccgctacaggatgccgctgatcttgatattgcaactgatgaagaaatggaatctctcagggcgtggaagaggtatcgtgttttgctgaaccgtgttgataccagtaaagtccctgatattgaatggcctgataagccggagtaa

SEQ ID NO: 147808 - DNA, 1218 bp, Enterobacter cloacae
atgtcctaccgtatcggtactttccccgccattgcaatggcggcattgttctctttcgcaagctgcgccagcgcggcggatcagatgcctcttgagcactggcgcagctactcaggcgtaagctgggataaacctgaaaacgtgcaaatgccagccgtgttttccgggtcggtgaatgcccccttagcaggcattcactttgatgcaaagggccgggcctttgtcagcacgccccgactgatttcagccagcgcccccgccacgttgaatattctcgacaccgatcctcagtccggacccgcgcgcctgacagcatttccgtcccgcgagcgtaatgcggttgattccgctcccgatcagaacctgcgcaacgtgctcggcttttatgttgatcgtaaaaacggctggttatgggcgctggatatggggttcatcgcgggagaaacggaatccccttcaggctcgcagaaattggtcgtactggatctcgactcgggccgaacggttaaacgtatccccctggacggcgtggccgaccgtaaggcaagtttccttaatgatgtcgttgtcgatgagaatcatcgtatcgcatacatttccgacagcgggtcgcgcagtgcgcctgaaaaccgtgtcggcctgatcgtcgttgatttcgccaccggcacagcccgacgcgtgctgaatagtcaccctgccctgcagattgaaccgggggtaaacgtcatttcccatggcgcggaggtatggccaggtaaaccgctattgattggtatcaacggcattgcgctgtctcccgatgcagaaacattgtactggacggtgacgacgggaacacatgcatacgcggtgcccactgccgtgctgaagcaacatgattcaactgatgcgcagattgccgctcaaattcagaatctgggcacggtgggaggtaatactgacggtttggtgaccgatgcaaaaggctacctctatattacagatgtcacccataacggcattgtcagatatgatccgaagacccgtaaaatgttacttattgctgcaaatgaagccataaagtggccagacacaccggctattcgcccggacggtgacctgatcttcacatcaagtagccttaatgaccacttcgctggaatggtcaaaccaggccatgaacggtacgatctgtggcgcttgcgacaggacacgaacccgccgatgaacactcgctaa

SEQ ID NO: 147809 - DNA, 216 bp, Enterobacter cloacae
atgccaggttggaatcgcaatgtaacgctccgacggatggacgtattttttagtaaagatgcgatagaactgactgactggttcagaatgtattccccgcagcgtatctgtataccagagctctccttcgcagtcccagcctttcagctccagataacgatggtcatcaaaacggtagaccacctgcgttggtggttctttcgcctggcagcctga

SEQ ID NO: 147810 - DNA, 489 bp, Enterobacter cloacae
atggagcaacgtacactaaaagacctgatggtctatagcccaaaatctggcgtttttacatggatcaatccaccgaaaggtcatgaggaattgcttggtgagcgggcaggcagcccagccaaaggaaacaagacctactggttgattcaaataaacggaaagaaatataagcgctcacatcttgcccacttatttatgacgggcaagatgccatccggtgtagttgaccatataaacggcaattctctggatgatagatggctcaatatcagggacaccacatacgccgtgaacgcccaaaacaggctcgttggaaagtccggcagaaaacttccaatgggcgttaagaaattaaaaagcggccgttatttagcaagaattggcgttgaaagaaaatcagtttctcttggaaccttcgataccgttgaagaggctcggtcggcatatctcataggtaaggagaagtaccatgcttcagcgttcgcctga

SEQ ID NO: 147811 - DNA, 357 bp, Enterobacter cloacae
atgaaaaaagtagttcttttagcgcttggagcgcttttgttgtctggctgtactgttcgtgtggccgatctgaccgtggcaagtaccaaaaattacaacctcaacggtggtaagttctacaaaggtaagcgagttactgctgaggacagctatccagtaatcatcttccctactggcattcctaacgtcaaaaccgcagcagaccgtgcgatcgagaaagaccgctgcgctgttggtctgaccgatgttgtggtaacgcagctcaaccacgcgtttatcttcggtaaaataggcctacgcgtagaaggcaacttagtcattgaccgtagccttcctggttgcgaaaacgcgagctaa

SEQ ID NO: 147812 - DNA, 408 bp, Enterobacter cloacae
atgacgattgacaggattctttcaattatagcaaccacagtatcatttgttgcaattcctgcaagtggattcataagttacagatacgcaattttaggtgagcgccgtaaggaatttaacgcagttgcagataatattcgccataagttgcgtgaacaccagaggcatatggagaaaaatatctatccatctggtgagcatgtagatatatcacagaaggattttgacaccctagcagatgttgcatatgaaagagatagaaaggcaatccgtacattgtgcgataagtatcaaaaatccctgcatgccagcataacggttgatgagtatggcgactatgaaattttaggttttgatgaggctatgggagacctagcagaacttttatcgctcatcgaaaggaaatag

SEQ ID NO: 147813 - DNA, 690 bp, Enterobacter cloacae
atgaaatctcttgcagagaagatgcgtaaccacgaccgcgagcagatgagccgcatggctcataacctgccagagcagtatcaggaacgcgcaccggtcgagcaggtggctcaagtgttcaacgggcttttcaaccaactgcgtgccgcgttcccggccagcatggcgaacttccgtacccaggacgacctgaacgaattccgccgtcagtggctgctggcgtttcaggagaacgggatccacaccatggcccaggtcgatgccggtagccgcgttgcccgccgccaggagcgcccattcctgccgtcgcctggccagttcgtcgcctggtgcaagcagagcggcgggatgctgggtatcaccgttgaccaggtgatcaccgaatactgggactggcgcaaccgttcgttcgaattcacctccagcgagaaattcccctggactcagccggtcatgtaccacatctgcgtcgaactgcgtcatcgcagcacagagcgccagttgacgcatggtgagctggctcgcgatgcgggtgatctgctggatatgtgggaaaagcgcgtcaccgagggtaagccagtgccaccggtacgccgggcaattggagcgcctaaggccgatcgaggcccgactcccgcagagatgctgctggcaaagtacaatcgcaacaagtcgaacgggatggtgtga

SEQ ID NO: 147814 - DNA, 171 bp, Enterobacter cloacae
atggctagccctctcgcacgcgtcatcacaaacgaaatcttccgcgttccggcgcgccgcaagcgtaagcccgcggttaagccgtccgacatcccgaccttgaaaggctacaccgcccgcctggtggatcagaaatggctgcgcctcgcggagaggaggaaacgtgcgtaa

SEQ ID NO: 147815 - DNA, 519 bp, Enterobacter cloacae
atgaatcatcaattagctaatctcgatttccgggacatggtggctgtttctggtgatcgcgtgatcacaacctcccgcaaggtggcagcttacttcgacaagcagcaccaccacatcattcagaaaattgaaaagctagactgttcgaatgaatttctaaccagcaacttttcgcgggttacctatgaacacaagggtaatcagtatgttgaatatgaaatctccaaagacggcgcgatgtacatcatcatgtcgtttaccggcaaaaaagctgccgccatcaaagaggcgtttatcaaagcgtttaattggatgcgtgacagactgatggagttggctcactcataccaaagagagcacaacgaattaatgctggagttcatgaaggaaaaggatgttgcaagtatgtcaggccgcttgctgaaccgctggggcagaatcaagaagccacaactcatagcaagaatcgaaaggcttgagcagcaggcgcaaatatcgatccccggactgccaaagtga

SEQ ID NO: 147816 - DNA, 264 bp, Enterobacter cloacae
atgctggtgtcctatatgtccgatggcagttgtggagataagaaggagttgcttaatgtgaacgggaaggatgttcctgcaacttacaggtgtgtatcggtcggggcaaacaggattgagcactttgcagttaatgatgccgaaaaggtcaatgagatggttaaccacctcaagtcagatttcactttgttgcttcagaatgatatcaaagtctgggctgctaacataaagacgccgaagtatggcttagcaccaaaattttaa

SEQ ID NO: 147817 - DNA, 234 bp, Enterobacter cloacae
atggctgaacgatacgatgtgcatgcctttaagtgcgaagacaactggtcgctgttcatctggataaacgactccggcgttaagtttattggccgccatgctgaaacttacgagaaagccaaagctgactttctggagcaggctgatgctaagcgcctcgccagtcaatcaggctcgatgaggcctcttgatgatttcaaaatcgttgagaaggtggaggtattcactctatga

SEQ ID NO: 147818 - DNA, 924 bp, Enterobacter cloacae
atgaaagtttctctggtcgttcccgtcttcaacgaagaagacgcgatacctattttttataaaacggttcgggaatttgaagggcttcagcagcatgaagtcgagatagtcttcataaacgatggcagcaaagacgctacagaatcaattatcaacgcgcttgctgtttccgatccgcttgtggtcccgctgtcattcacaagaaacttcggtaaagagcctgcgctattcgctggcctggaccatgcaacaggtgaggcaataatcccaattgatgttgacttgcaggacccaattgaggtcattccacacctgatagagaagtggcaagccggggctgatatggtccttgctaaacgctctgaccgctctactgatggacgactcaaacgcaagaccgctgagtggttctacaagctgcacaacaaaataagcaacccgcagatagaggaaaatgttggcgactttcgcctgatgtctcgggatgttgttgagaatatcaagctaatgcctgagcgaaaccttttcatgaaaggcgttttgagttgggttggcggacgcactgacgttgttgaatacgcccgcgcagaacgtgttgccggggattctaagttcaatggctggaagctgtggaaccttgcattagagggcattaccagtttctcaacttttccactgcgcatgtggacgtatatcggtttgctcgttgcgggaatggcctttatgtacggcgcttggatgattattgacaccatggcattcgggaacccagttagaggctatccttctatattggtatcaattttattcctcggcggtgtgcaattgatcggtattggagttctcggtgagtacatcggcaggatttatattgaggttaaaaatagacctcgttatattttgaaggaaaaaataaatggttag

SEQ ID NO: 147819 - DNA, 1335 bp, Enterobacter cloacae
gtggctaaaactcttttacgcagcggtaacctggatgattttcaggccgtgggcggcggcggacaagccgttttcgaatcagcgttacaaatccgggaagcgctccggttgcgcaaacaacaggctatcgttgactgtctggcgattccgcaggtcaacgacagcggcgaccgcgtggactggtattccccggtggagggaaacgtcacaagctggaaagcggctgatgaggacgaccgctatcgcgccctgcgctatctggaaaacacccttgcaagcgtagagtcgttaagcaagaaatgtcttcagtcgccgaaaacagcgcaacagctcttcggctcgctgctgtcgaaagcatttcagttccctggggaaaatttcgtttttctcgtcgacggaaaaccgatcctgtgcttctggggttttgtgaacctgaatgaaaatgcgcgtgacgatgtcctcgactgcctgcgtgaatcgctgatccctgagcccgcccctattgtgattgaagatcctgaacctgagcccgagctagtgcccgaaccggccatcacctttgaaaaagctgacgagccgctgattgccccggtcgccgcgatacggattacgccggaagacctgtatgcgcccgagcccgcaccggttgttgcgcaacctgcgcctgaacccgcacctgtcgtcatcacgaagaagcgtcgcgttcccctttggacgctgccggtcgcggcggtgatcgttgccgctattgccgccccgctgatgtggccaaaaccggccccttctgcagagcccgcgcctgcgccggtccctgagcccgtggctatcgccccaaaaccgatcaaagccgttgagccactggcgatgaatttacccctgcatcaggctgaggtggtggcgagcaaagaaaaagagcctgaacccgctcccgtggtgattgtcgcgatcccgaaagatgccatggtaatggaggccggtcaggtgaaagccggatcgacacgcttcctgaacggtacctggcgcgcgattctcgacgtgaaagacccggtcaccggcaagccaccgtcaatgcgctatcaaatccagaacaataaaggtttcgtccgcatagtccatggcgacaatattgtctgccgcgcggagatcttctccgggctacacagcaatggtgagctgatgatcaagagtcgcggcacggcccgctgcaccgacggttcccgctacccgatgccggaagtcgcctgtaaagccggcaccagcgatatcgcagaatgtcgcgcccgttatgatgccaacaccgtcgtccccctgacgttcaagaaagcaggtgcctga

SEQ ID NO: 147820 - DNA, 126 bp, Enterobacter cloacae
atgaaaaaggacttgttgctgctgagaatattgaagaggagggactggtatttaactcgtattattcagtcgcttttgttgtatttaataagaatggtgttagatattaatcttatacatagatga

SEQ ID NO: 147821 - DNA, 1068 bp, Enterobacter cloacae
atgattagtataagacatcatttatcgaattcattttacgatcctgatacggttctgaatgagaaggcgcaggccgtctggcgctatcttaataaggaaaacgtggtgggggcaggtgctgtgcggggtaaatccatcaccaagcgggcccaggaattcctgactattgtcgaaagtcacgaacatgcatgtcactattccagacccgcagcccgtcgtcacagcgcgctattgaaggctctgctgaatgacggaacactggaaaaactgatcacgtccggcccgcgagaactcgacgcccttgcagatacactttctccaatcctggccaatgctgacttcgagaagtgcgggactcatgccgccttttctgaattgctgcaaaataaagttttcaactataaagcctaccgtgattcggatttttgttcctctttatacattgaactgaaattcaccactgtaacctgcccatattgcaatgaatatccggtcaaggtcatactgcgttcaaaaggcaaggacaagaaacccatcctgcattttgacctggaccatttctaccccaagaataaatacccttttctggcgttgtctttttataatcatattcccagctgtaaatattgtaacagtctgcataagcaggatcggccttttacaataaggacgcatactcatccgtatcttgataacttcgacagtctgtcctcattttcgtacagccatggggcactgattggacgcgatgttaattcagtcagcattaacaatactaccccaaatgcgcttaatttgtgtggtgaccttaaacttgaagaacgctatcagcagaatattggctacgcaaaaatcaatcaactggtccgtatcctggctgacaatgcagacctgtttattgacgaagaggaggagagtgtcacgactgaattcttgcacctgaaaatgaggctagccgatttcggactaacgcatgatgccagccgcattatggaacaaccctggagtaaaatgcagcgcgacctggttaaattctttgatgtaaacaatatcatactcaggaaataa

SEQ ID NO: 147822 - DNA, 1638 bp, Enterobacter cloacae
atgaaactgtgttttttgtgggtggatcgttttaaaaatcttgctaatttatccgccagtttctgcagtgaatatcagtatgcctttgacagcgagaaaaaacagttaacacgtttcgcaaagcccccattgcctgatagccgtctgctcgaaccacacctttcacatatctccggtgtgctgggtgccaatggtacgggtaaaacaacgcttctggaactcatttgcttagtcaccaaagcgaaagacgatctcaacagtaattacattctgatttacgagagtgaaggcgagcttttttattattcctctgaggacagcaataaaaacctgatatcgtcatttgagattcagcacagtcatggtgcctctcatttggagcaattaaatgttattttcttctccaatgtttatgatgacggttttttaaacttaggatctcctatcaaagatatttccgttaaccggcaggcaaggtattttgggaaagaagaaaatgacaaaagcaagtttattcaggatctcgatttcataaaatctgatgcattccgctatctgcgctatccttccccgcgtcgggcatcagtcaaaattgaccctcagttctggtcgcgatatacgaacagagatctgaatcatgaagattacagcgttattcgaaaacttcgggatatatactctattaaacgaagggctagaataagtgtaaaagaacatgcctgcgtggtcatcaaactgggggtcttagctcgaatttatgccgatttttattcggatgcatctgtaagccacatatttcagaaaaatttgtccgatgaggataactttacacctgacctagacctgttaatgatagagcttattaagggttttgaaaatgatcatccttcggtggcaaatatgctttccttgttacgagatattgacgagatgtttgaaatggtcaatttgaaagaggaacgtcgctatcgtaattatcagattaatttcacgatcgctttaaagagaaataatttgtcggcatttgagggaattgtggctttagtccatattatccccagggcgaatatgcaatgggcggaactgagctcagggcaaagagcctatgttaatcttttcagctccgtctggaatgcccttgccgacagcagagatactgatgcactggtctgtattgacgaaggagatctctatttacaccctcagcttcaggtcgaatttattgaaaagctggtccgggtcatgcctcatctgacgcataaagaaatgcagataatcgtcacgacgcactcaccgctgctggtgacggatttacccggccagtgtctgacagtgctgacaaaagataaaaacggtctgactcaggcgaagcagggtggaaaaacgtttggcgccaacctttatgatatttaccggaatacctttcaattagataatcaacgcacaggcaacctgtcgcaagattatatgaccagcattatccggttactggacaaggaggtactcatggatgcagatattgtcgacttgactgcttcgctcaatatcattggagataaactgctgcggtatcatatcgagaagaaactgaatgcttatcaacaacaagctggcataatgggtggccagtatgattag

SEQ ID NO: 147823 - DNA, 702 bp, Enterobacter cloacae
atgtttgatccaaaaaaattcaccgcaccgaccgccaggccgcttcccgtcgtcctgcttctggatgtcagtggcagtatgtccggagagaaaatcgataacctgaacaaggccgtcagggatatgctggatgcctttgcgcaggaagagaaaatggagaccgagatcctggtttccgtcattacttttggcgatcaggttgagctacatgttccctacacccgggcttctcaggtgcagtggcagggtctgcaagcaagcggtatgaccccgatgggaaccgcactcgaaatggccaaggccatgattgaagacaaggaaaccacgccgtcccgcgcttacaggccgacgattgttctcgtttcagacggacagcctaatgaccgttgggaaaggccactggaggactttattctcgaaggacgctcgtccaaatgtgaccgcatggcaatggctatcgggcgtgatgcggatgaggcggttctgaagcgatttaccgagggcacgccgcatgaccttttttatgcggaaaacgccgggcagatgcatgaatttttccagcgagtgacaatgtctgtgaccctgcgtacccagtcccgaaacccgaacgtgttaccggcgtccattgagctcgatgcgcgtacgaagtcaaatattgcagcgtcagtctctattgcgaatgatgatcaaggttattggtag

SEQ ID NO: 147824 - DNA, 1572 bp, Enterobacter cloacae
atggaaaggaatcaggaaaatgtggatttaccgacactgataacgaatggcgcacatcatagtgaagctcaggcagacgctttagctggacagatagaggttacgccagcgggggcaaacaaaactcgcagagtgattggttcatttattcgttcttacagagataaatcgcctgatctctccagtaaggcctggcttaaccttgaattcgctaaatatccggatatttggcgcactgaagaggaacgccaacaagcggctagcgagattgttgaggaggtggcgattttccgatcctctcagcaagaattggcggcacatcacagcaaaggattaagtaccagcaactggctggcggggaaaattgagcagggtgcaacggcaggcggcgtcaccaacttcggcgcatacgccacgataattgatagcgccattgagacggcaaacaaagcaaacattgatttgctttaccggaacgatggccagttgaaccagcagcttaatctggatggttttattgctgaacagcaccatgctgataccttcaaccttgatgcagtagccaaaggcagtgaataccgcgctgaagtgttaaaacccaaatccggcgggacatatggcaaaaattcggtagatgttgtgattcgggatggcgagggaaaaattgtacgtcgctatcaggccaaatatggggccgatgcggatgcaacagacacattgcttaaaaagggtgattatcgggggcagcgcaagttggtgcctgaagggcagtctgaagacatacctggcagtactgaaacaatagaaattgatggcgttgaatcgaagccgctttctaaacaggaagccaaagagaggcaacgcagagcccaggaaaaagccgaagccaaacaatatgactggaacgataccagcaggatcgatattgcaaaaaatatcgggaaaaacgcgggtactgcggctcttttgtctgtgggatttcagggggcacgtattctcgggcggcggatctggaagggaataacagggcaagaaaataatagtgctgaagaagacctccaggagtttgtacagagtgctctgaaatcggcggcgacctcggggttaagcgtcgctgtcacgggtgctgtgaccgtagcagtgaaaagtggctggttgggcactgtgttaaaaaatacaccggctggcagaattgctaatgctgtgtgcatcggtattgaaaacgcgaaggttctctacaaatacgcaaccggagaaatcacagcggaagaagcgcttgatcaagccggcagtgtcacatgcagccttgtggggggacttgtcggtggggccaagggagcgggcataggtgctgcactgggaaccgttctgggacccgtggggactgctattgggggccttgttggtggggtggtcggcggcatggcaggaagtaccgttggagaagcgatttatgaaggtggaaagagaattgtatctgcagttgttgattccgttaaattggtggggtcagcaataggcagtggtgtttcatcgttctgtagcggcgtggcctctctgtttggattttaa

SEQ ID NO: 147825 - DNA, 2148 bp, Enterobacter cloacae
atggatattaaaggcattattgaggccattcgttccggtgtaacaggcattcagattctgggccaggacgtcaatcgaatcgatgaagaaatcgagaccgttgcgaccacactgggcttcagggtaaaggagtggaatctggggtatggttgggttgattttaagacaaaaagggctctgaaaccggatcaagacgcattgctgtatcaggatttaaaagccattgcggatgacgatccgacgggtcggatttatgtcatacagaacgcctgttccgtattgaaagatgacatcagagcgattgcaagactgcagcaggaattgttaaggatcaggcgtcactttaaggggcaggcagcgatctttttcgtctcaaaagagagtatagaattttcagagcttgtggatcttttgatccctttctcttgctctcctctttcgttagagcaagtggacggcatttttgactctctcttacaggagtactctgtcacggttactacagcagtgcgtaattctcttaaatccatattttcaggtatggagcgagacagggtattccaaatattcgaaacgctaaacaataaatataagggcacatttccccaggagtctgtgggtgatgctctggccctgaaaaagagagcgttatctcgctccggtttgctggagctggtcgatagtcaaatagatattggccaaatcggtgggctggaacggctcaaaagctggttacgtaacaagaaacacatcattgatgatttaacgaaagcgcagagtttgggcatctcggcccccaaaggtatgctgttagccggtatgccgggatgtggaaaatcaatgagtgcaaaagcggtgtcttcattattcaatgttcctctttttcgtttagacattggctccctgatgggaaaatttgtgggcgagagtgaagcaaatatgaaggccgccctaaaggttgcagaacaagcgagcccttgcgtgttgtggatcgatgaactcgagaaagctttttcaggcattaacgggaccgggggaagcacagaaatcacaacccgtctgtttggttattttctgacctggatgcaggagaagccgggcgcggtgtttgttgtggcaactgccaatgacattacccatatccctccagagctattgaggcggggacggtttgatgaaattttttatgttaatttacccagtgaacgtgagcgaaaacagattttcgccgttaaattaaatcaactgacccttccacctaaagggctcgaccttgcagagcttgcaaccctgtctaaaggtttttccggcgctgatattgaatgtgttatcaatgatgctttagaaagtttgttccgcagtaatgagcctgttctgacccaggcccttattaagaagcacattgacctggtgacacccataagtgttgttcttaaagagaaaattgcggtctaccaggcgttgtttgagaaattgagtctcaaagccgcctcccttgcagaggaagatcttgagaacattaatgcactgagtgacagcgatgcagtgtcggaaagagaaaacgccgcatcaaatgaatttatcgcatctgaaaagctcatacaattagttaacgatcaaagcccggtcgttcgccaggctgccttaaaaaaccctcaatgtccattttcagccttacagcaagtcgtaaacagatattgcaaatttgattttagtaagcccggctcctggagtaacaacgaaatcaccaaaaatgagttcgagctggcattgcagcaccccaatatgagtggcgagctcattcttgaactccattcaaagcaactaattgatgcgcaaaagctcttatcgctggcccataagctttcatttgaggagcgaaaaaaaatatttgatttggcaacaataaaattacctcggcctgttacagcaggtacggttcagaatattctttgctttacaggcaatattgttaaatataacgatgttcttattgagatagataacgagcgaggtaacacccaaaaaatcaacgcttctgttgacgggcttgttgtcaaggtgtgcgtcaaaaccggtgaaacaattcatgcaggtgaacagatcgcgcaaatactcgtacctaaaggtcagggacgtataaattga

SEQ ID NO: 147826 - DNA, 1701 bp, Enterobacter cloacae
atgacggatttcagggcctctctcggactggaacagacaaccggccctgttctgggggctttgttggcggaagattacaccgacgtggtcatcctggggtttacgcgcccggtgaaaatcgaaagccacgcggatgatgtccagccaaaaattgccgcgacagaaggcgttgacccggctgcggcaagacagtgtatgggcctgttttcaaatacagaaggtgcgcacacgcatttcaatgaatggctaaataaacagcttcaggctgccggtaaaaaagtcgatgtacattttcaacccgtggagctggcacatctcaatgacacggaaggtatctatgaggcggcaacgcaatcccttaactccgttgctgcctccgaaggtgaaaaactggttacgctctacctgagtccgggcactccggtgatggcattcgtctgggcttttgcggccctgaggtacccaacgctaaaaaaacgtcttatcgcatcttctcagccgggcaaaccgccggaaagaatcgtcctgccgaacgagtggctggaatggcacggaagacaggtccggacagtcagtgcgggatcggatcggtatgatgccatttttcacctgttcggcgaacagcggatccctaacctgcttggtgtactccagttttcaagccggaagcatatcttcgtgaattctgcccagtttcctgccgatgtcatgaaaccgtttcttggcgaagcagaatacggtgaaattgcggtggacccgtatgatcctgacaatgtccggtccaccattctggagcagattgcggacatgcctgctgaggcgaagatcggctttaacttaacgggtggcaccaagttgatgtatgccggggcccttgccgcctgtcgcaaggtgaatgcaacgccattttatttcgatttttcaaagaagcaggtgatcaatctaaatagcttcacgaaaagtgagattgtttcaattgattcggtagaaacattcctgaagttgaatggtgatggattaaccatctctaagcccggtctgactgaacacgatatttctcgcgagatgattacggcttctcagttaatttgggaaaatcgtaagttaatggtgtctaagtatcgcgaactgaaatcttatctcgaagagaaatcattcaaatgttgggggaatgacttctacgcagagctgacaatagaaaaacaaggaaaactgaccatcgggggtcagtcgtttgtgtttgatgaatgtccggattttatggaatttctcctggggaaatggttagaggtgtatgtctttagtgtgttaatgccgttaaaagaatcggccgtactgaaagatatacgccttgggcttgaagtatccgttgaggacgttgattcgaacgataactttaagtcctatcatgatgggtttaaggaaaaaacaggttatcaagaatttgatgttatctgtaccgacggatacgctttatttgttattgaatgtaaaagtgggaaagttgaagcacaccatatttcgaagcttagcgaaattaccaagcattttggtggggtgaaaggcaatggggttatgatttcagcatttcgcccctcacatcctgtggtcaagcaaaaatcagatgaccagacgaatgtaaactggttttttggggagcatgcgtcagaccgcttgttgaagttttttgagagtaattaa

SEQ ID NO: 147827 - DNA, 537 bp, Enterobacter cloacae
atggggaaaattcatcttcaacggaatttagcccgttatgcaattcaagtgcctagcctagctcaggaaaactgtacggatttcgtcatccgtttatatcagtggcatcaggatatttccgatatcacgctacaaagcgatggggatattccatccttaaccgcaaaaggctcctcgagccttgctgagctctctgattttttatcccaacatgtatataagagcggggtggcaagagttctcattctgtctgatggcaatttccccagttcagacaccatcaactttcaaaaccagctttgcaccttccccgacctcattatccggactgttgcagtcggcgctgatgctgacctgttgaagttgcggaaactgtctacaaacaacaccgtttaccttccggagaatatcgcttcagcgatgaacagcactctctttggctctgatgagccggtgaccgctccggtatccgcagcccagatacagcactccgcacccgctgaaacagctgggcctgaggaggactgggatgcatga

SEQ ID NO: 147828 - DNA, 729 bp, Enterobacter cloacae
atgcatgatccactctggaacagctggggggcctcagtaatcggcccccttcatgttaaagcgggaatacccaatcaggattcctggagggcgcgccggtataaatggggaaatgtcgtcgttgtatcggacggactgggcagcaaggcacattcagatcacgggtcaaaagccgcctgtctagctgtctttgaggcagccaggaactatcagaatacccctgcggcttctgtcggtgatgttctcagactcattcatgccaactggcttatgaagatagcgccgtacgcttcaacagagtgttcggccacctgtcttttcgtcatccagacagaaggaactatcactctgggtcgtctgggggacggcatgattgctgtccttggcgaaactgacgaacaccaccttatcctcagtgatacccgacacgattccttctcaaacttcacaaacagtcttcaacaggcgtttaggcccgaacaatgggaaaccgcgacgattgcaagcgcggcgtgccatgctgttgtgttatgtacggatgggatatccgatgacctgttacctgaaaaacagatgatttttgcacaggagctctgctccacgtattcaaacgttaagcctgaggaaagaaagcgggatcttcggcgttggctcagtgaatggccggttccaggacactccgatgataagacgattgcctgtctgtttaagcaaggaggcacccggtga

SEQ ID NO: 147829 - DNA, 1497 bp, Enterobacter cloacae
gtgagtgaatggttcaataggtatgtggatgaatatcagaatgtgcacattcaggacaaggtgctcggtcaggggggccagggtgttgttttccgtaccagggaccctgatctggcgatcaaactggtgaccgatgagagcgggaaccctgtcaccgatgacgtcttggtggaacggtattcgaaacgctttaagcgcgtccggctcttgcctctgccggaaaacctgaatatatccgtaccggcagcgctgcttcagaacaaggccggttacgtgatgcaactgttgagtgaaatggtcccgttcagccatttctggcttgatggccagaccgcagaaaaaatggggcctgaccagatcccggcatggctttctgccatgccggagaacgaagctaaaaagatcgtccattactgcaaaacgggcgggctaaggcgcagacttcatgcgctctacaagtgtgcatcattactggcacgtctccatggtaacggcatggtctacggtgatatctcgcccaacaatatctttatttcagaaggcatgaatgatacctccgtctggctgattgatgccgacaatattcgatttgaaattttggcagggggaagcgttgtttacacaccaaaatacggcgccccggagctggttcagggcactgatggtggaagaccgtcaagcgattgtcatgcgtttgcggtggtggcgttttaccttctttctttgattcacccgtttgttggaaaaaaagtggatggaacagatgaaggcgactgggctgatgaagaaaatgatgacggggatatagaagataaggcttacgctggattgctcccctgggttgatgaccaaaatgatgatgccaactcttccgacagcggtctgcccagatcccttctcctcacagcgaaactgacggccttgtttgagagcacattcggtccgggaaggacatctcctttgctgcggccgacaatctatcactggcctgaagctctcgcccaggccgcggatatgaccgtcacatgcccgggttgctcgatgcattattactatgattttattcaccctgaaacagaggcgcaccattgcccttactgtacaacaccgaggccgcaggtgctcattctggagtcttatcgatggaagggcactgacacccccctggaacttccctgctggcgctatgtccgcgagatcccgccggggtcagagctgacagtaccgagacgcgtctttgatgagtttctcatgcttgattctgatacagcagaggtgctcatctcttcaggcgatgagggcattctgattaaaaagtcagatcatgctaaagccgatgtctctgttgccgctgacagccatccgcaacgtggttttcagacagtttattcacagatgaaaatagaccgtgcaaccccggatgttcagttttggatgttctcaaacatgaatagtccccggttggttaaatgcatgatcagcggaagtgacaaatga
